United States Patent Application Publication US 2012/0108651 A1 - sequence listing, part 6

SEQ ID NO: 454 - DNA, 247682 bp, Homo sapiens
aacagcacactatagtcttgaactcctgacctcaagtgatcctcctgcctcagtctcctgagtaactgggactatagatgtgcattaatgcacttattttaaaaaactgaaatctaaaatctctgtctcctaagagacttaagaaaagcttaataaattaacttaaatattcttaagaaaatattccccaaagagcaaaataattacaatgtcaggacagagcctaaattctatctagtttaggtttatgcctctgacggtgactctaaatggatttgtcagggttgtcctttgatgtccccctcaaaacaacagtaccataacatactagattctagttgcccttaaggactatatggaactatcatcaatggatttatctaaacccattttgaagctgtgtggatattcattctttttgataagttcctgtgtccccgcccaaatctcaacttgaattgtatctcacagaattcccacgtgttgtgggagggacccaggggggaggtaattgagtcatgggggctggtctttcccatgctattcttgtgatagtgaataagtctcacgagatctaatgggtttatcaggggtttccgcttttgcttcctcctcatttttctcttgccgccaccatgtaagaagtgccttttgcctcctgccacaattcagaggcctccccagccatgtggaactgtaagtccaattaaacctctttttgttcccagtttcagatatgtctttatcagcagcatgaaaacgaactaatacagtaagttggtaccagtagagtggggcattgctgaaaagataccagaaaatgtggaagcgactttggaactgggtaacaggcagaagttggaacagtttggagggctcagaagaagacaggaaaatgtgggaaagtttggaacctcctagagacctgttgaatggctttgacaaaaatgctgatagtgatgtgaaccataagcttagtccaggctaaggtggtctcagatgcagatgaggaacttgttgggaactggagcaaagatgactcttgttatgttttagcaaagagactggaggcattttgcccctgccttagagatttgtggaactttgaacttgagagatatgatttaggatatctggcagaagaaatttctaagcagcaaagcatttaacaggtgacttgggtgtgttaaaagcattccattttaaaagggaaacagagcataaaagttcagaaaatttgcagcctgacaatgaagtagaaaagacaaacccatttttttaggagaaattcaagccggctgcagaaatttgcataagtagcaaaaagcctaatgttaatccccaagaccatggggcaaatgtctccaggccatgtcagagaccgttatagcagcccctcccatcacaggcccagaggcccaggaggaaaaagtggtttcgttggttgggcccagggtccccatgctgtgtgcagtctagggacttggtgccctgtgtcccagctgctccagccgtggctgaaaggggctaacatagagcttgggctgtggcttcagagggtggaagccacaagccttggcagcttccacatggtgttgagcctgtgggtgcacagaagtgaagaattaaggtttgggaacctctgcctagatttcagaagatgtatggaaatgcctggatgcccaggcaagtttgctgcagaagcggggccctcatggaaaacctctgctagggcagtgcaggaggaaaatgtggggttggagcccccacacagagtccctactggggcactgcctagtggagctgtgagaagagtgccaccgttctccagaccccagaatagtagatccactggcagcttgcactgtgtgcttggaaaagctgcagacactcaacaccgaccaatgaaagcagccaggagggaggctgtaccctgcaaagccacaggggcagagctgcccaagaccatgggaacccacctttgcatcagcatgacctggatgtgagacctgcagtcaaaggagatcattttggagctttaaaatttgactgccccactggattttggacttgcatggatgctgtaacttgttttggccaatttctcccatttggaatggctgtatttacccaatacctgtacccccattacatccaggaaataactagcttggtttcgattttataagttcataggcagaagggacttgccttgtctcagataagactttggactgtggacctttgggttaatgctgaaatgagttaagactttgggggactgttgggaaggcatgattggttttgaaatgtgaggacatgagatctagaggggccagaggcagaatgatatggtttggctgtgtccccacccaaatctcaacttgaattttatctcccaggattcccacgtgttgtgggagggacccagggggaggtaattgaatcatgggggccggtctttcccatgctattctcttgatagtgaataagtctcacgagatctgatgggtttatcaggggtttctactttgcttcctcctcattttcttttgccaccaccaagtaagaagtgccttttgcctcctgccatgattgtgaggcctccccaggcatgtggaactgtaaatccaattaaacctctttttgttcccagtttcaggtttgtctttatcagcatcatgaaaatgaacaaatacagacttttgacaaatacttcttctgtctttctgggtagtggaaatattataacagcaaataaaacatgttccctggctatgaacaatttttagtccaagaggagtaatacccaggcaaacaaataagtaaagaatatgataaatgctaaaatacagctacatatcaggtgctaactggctccttgggaaattggataaggtctcatgggtgtggtgacattaaacctaggtcgtttttgtttttgtttttgtttgagacaggtgtgactctgtcacccaggatggagtgcagtggtacaatcacagctcactgcaacctccacctccccagctcaaacaatcctcctgcctcagcctcccgagtagctggggctacaggtgcatgccaccacacctggctaatttttgtatttttggcagagaaggggttttgccattttgcccagtctggtcttgaactcctaagctcaagccatccatctgccttggcctaccaaagtgctgggattacaggcatgagccactgcgcctggccgtaacctaggttttaaaggatgtgtagtttactaagcagaaaatatagtagaggtacattctagacagaaagcttacaccaaagcaaagggtgtgaaagagcccaatatgttgggggatatcgagtaggaaagcatggctgtatgtataaatttgtagagaagactgagtggcgagatggctggaagaagaggttagtaccaagctgtgaaaggatttatatgtctgcatgtgaagttttgcttcttcctagtaatggtgagtcagcagcaacacctttttttttttttaatgtagatatggtgtcttgctatgttgatcagactgatctcaaactcctgtccttaagtgatccccccacctcagcctcccaaagtgctgggattacaggtgtgagtcattgtgcattgcctagcaacactttttaaataaggaagtaacatggtcaaatttgaacttcagaatgacatactcttgtgacaatgtagaggatgatttgggggagaaagaaaaaatagacacagagactccagcttcttgtcctaagcttctgaaatttgggaactcccagttcatatcttaaatttgatatctagcacattctctctcatccttctgaactaattctgttatgtacacgaagcattctctctaaacactttgttgttagttgcttttttcctgggaatttgtttgtttgagacagggtctcactctgttacccaggctgaaatgcagtggcatgatcatggctcactgcagccttgaactcttgggctcaagttatcctcccgtctcagccacccaagtagctgggactttaggtgtgtgtcatcatacctggctagtttttattttaattatttatttttaaacatattttttgtagagatgggtctcactatgttgtccaggctggtctcaaattcctgggctaaagcaatcctcttgccttggcctctcaaaatcctgggactataggcatgagccaccatgcctagtctgggcacttttttttttttttttttgagatggagtcttgctctgtcgcccaggctggagtgcagtggcacgatctcagctcactgcagcctctgcctcccaggttcaagcaattcttgtgcctcagcctcctaagtagctgggattacaggtgcgtgccaccgtgtccagctaatttttgtatttttagtagagacagggtttcaccatgttggccaggctggtctcgaactcctgacctcaggtgatctgcccacctcggccacccaaagtgctgggattacaggcgtgagccactgcgcccggtcagtctgggtattttatacatggttatttaggtgtaggaagcatttgccagtgctttctgattgacttttaatgtctttctcaatgatgccttttgtttttctggccgttttggggtttttggttttggtttttttgtttttttttttttgagatagggtctcgctccaggttggagtgcagtggcatgatcaccccaggctcagctgatccttttgcctcagcctcctgagcagctgggattaaaggcatgagccaccacacttggccacctttttctttaataaatatttttaatgaattgattgccatgaggcgcccataaatcctattgattggtaggtctttgttttctaaacttctaatctagagggaaacaaattcatttaacagacgtttattgtataactgatttctgcaggcactgcacatggtcccagaaatttaaagatgaatgaagactgtctctgccctcatggaactcacaatctagtaggaagaattttttaaaaagacataaatggttataaaagtgcatactagctgggcgcggtggctcacgcctgtaatcccagcactttaggaggctgaggcgggtggatcacctgaggtcaggagttcgagagcagcctgaccaaaatggagaaaccccgtctctactaaaaatacaaaatcagccaggtgcagtgcgcatgcctgtaatcccagctacttgggaggctgaggcaggaaaatctcttgaacccgggaggtggaggttgcagtgagccgagatcacgccactgcagtccagcctgggtgaaagagcgagtctctgtctcaaaaaaacaaaacaaaacaaaacaaaacaaaacaaaacaaaactgcatagtctaggacagaagaaggcataactaatttttgtgggctaccaagaatcagtaaatcatcccccctttcaaactatatgaatgtgtaatttgcaactcttattgcagcatttgaaaacatagaataacaagaaagtacagtccataattacctttgaacttcagttcaatttacgccatatccccttaactagtttcttacaatgcattagttattcttaactgcccaagagtttgtgaacatttcttttctttacaaattactccaaagctctggtccattggcttgtggcagtacaaaattaccttctataaatagcatttttaattgaaacatatgaatcccagacagtggcatcacacttagtttctgctgtgctcttgtggaagataagcctttcatgcagagcctagtagctcagcatgaatttcatgacctgcatttcttagtagctactttgcctttagcatcttttctgcttgatcagttgataaaagcttgtcctagtttcttgaacctgttttatagcaataattcagcctgcatttattctttccttattgcttccttgaagtttaaaactgtttagtgtattcaccgtttgcttttctatagtcttcaattatagggaggattttcttccctatcaatctcttaataggtcttctgcagagccagagatgtctattaattttctcattataaaatcagaaattataatctgataaattgatgtctcagctgggtgcagtggctcatgcactttgggagactgaggcaggaggattgcttgagctcaggaattcgaaaccagcctgggctacctagcaagaccttgtctctacaaaattaaaaatattatctggatgtggtggcatgcaccagtgatcccagctactcaggaggctgaggtgggaggattacttgagcccaagaattccaggctacagtgagttgtgattgtgccattgcactccagcctgggtgacaaagggagaccttatatatactaaaaaacaaaacaaacaaacaaacaaaaaacaaaaggtgcagtggctcacacctgtaatcccagcactttgggagactgaggcgggtggatcacttgaagtcaggggttcgagaccagcctggtcaacatggcgaaaccctgtctctactgaaaatacaaaaattagccgggtgtggtggcacacacctgtagtcccaactactcgggaggctgaggcaggagaatggcttgaacctgggacacagaggttgcagtaagcagagattgcaccattccactcctttctggatgatggagtgagcctctgtctcaaaaaacaaacaaacaaaaacaaaaaccatctcaatatattctctctcttgtttttttcttattgttctgaatttgatgtttacagtcgtcatgctgtagtactgcctttaacatccgatgctctatttatcatcaatatcttatcacttgcctcttttcaggattatggagttgtcttctgacttaccgatttacctcggtgatttttttttttggtaaatttttaagaaatatattatgataagttaagaacctgaaaagtcaatttaaatcaaaggctgacattttttttctttctttcacattcaagtcacaaaaaatacacttaattttaacaactcttatatatttctactcttcttaagactgatgtagtgtatgtttcattgaaaaatttcaccaataaccaatgtgtttcaaaaatctattatcatgtaatctgtgacagaagagaaatctagcagtggcttctttttgggaaaaacaaacactgtctggaaggtcatcacatctgcttaaaaaattttaaagattttcaggccactcatttattatttgttttcaggttataatacatgcctattatagaaagtttaagactatagaaaaatataaagaagaaaaatgtaaacagtcagtaattccactaccagtaaggccacctgttatttcggtgaaacttcaaatttttgtgaagccttactctagcaacctcctacttttctaagtcctcctcctcaatagactgttcaggacattcagagtggaagactgactttgaatacaggggtccttcggatttttatggaagggatggaactgtaggaaaaacctacaaattgctccagagatgacatcttgttcttatttagccttctttgagtcattaacagtcgggcgccactggtgctgaaacttatcattattataaccacaaatgggttaatgcccaaacaaagctatattcttggggctggttcccagctccaccacacagaccccagcagccagcacccgccaagtcccaggataatgctccacaaataagacgatgtcaaatgttcagcctggactcaacattatcttcttctatctgggagcttccagttgctagcagggcagagcaaaaggaaaaataaataaataaaagccaggtcaacaaaccctaaaaaaagagactgtgtggtttagtggtcagaccactggcctggatgttgggatagctgagatccagttgtagctctaccactatgtggctgcatgatgctagacaagtcactagacaagtcactgttgtgacttgtgcctcagtttccctagttagaaaatggaaaagtgccttagaaaggttttttttttttttttttttttttttttgagacggagtctcgctgtgtcgcccaggctggagtgcagtggtgcgatcttggctcactgcaacttctgcctccccggttcaagtgattcttctgcctcagcctcctgagtagctgggattacaggcgtgcgccaccacgcctggctaatttttgtatttttagtagagatggggtttctccatattggccaggctggtctcgaactcctgaactcgtgatccgcccacctcagcagaaagtttttatgaggacaaataagattatttgcaaatagctacaagttgcttgggaataaagtaaaattatcacttaataattactatggtattaccttattaataaaatagtaaaaagccacagttatggaacatatgaacctcccataacctcaagctagatgggggaagcagataagaaggcaattaaaaaaaaatcagatttgctggacttcacaccaaataccaaattagtaaatttgcctcaagacactaagccctgctcctactttggctctgtccttttaacctcaccacatccaaacttagagtgactcacaggagcctagaattgagacacatatacaattttaagggaaagcaagaattaggaggtttgaggctccttactggaggacgctaagaataggccactcggaacacaaagagaagaacctcctctttccttttcctcccagtgtaggtggtctactggtttcccagtcattcctttgatagcttgattttgttttctttgtctctttttcacaaacctcaccttgttggagggggagggcactaaaaaagtgaggacagagtggctttttctgctatgtctgaactgtgtctagtgctacagatctctgacctgttgtcaggagtggagaggggcgaaaagaaatatttaggaacttgaaaaccagtgaatattctcttaaagaagaagtgagcaattgggcatatagggaaaaaaatctaactggtgtcctcgtttctgcagcccctctccctcaagaagagcaatgtcttggtaggaaaaaggaaagacacctgggaaaggtaccaaatagtaagggctaggaatagaaagaagaaccaaagataaaaaggaattgagcctgggcgcggtggctcacgcctgtaatcccagcactttgggaggcctgaggcaggcggatcacctgaggtcggcggatcacctgaggtcaagagtttgcagaccagcctcgccaacatggtgaaaccccatctctactaaaaacacaaaaaattagccaggcggagtggcgggcgcctgtaatcccagctacttgggaggctgaggcaggagaatcgcttgaacccgggaggcgctggttgcaatgaaccgagatcacgctactgcactccagcctgggcgactgagtgagaattgagaagaaatggcaattagttcagaggacttaatgagtaccttttgtgtgtccagccgtcataggcagaaaagacacatctctgacctctagaagcatccagggtatatgcatacgtaagcactttgtagcaatttaagatagtaaataccaaagagataaaaatagctaatgggatactaagtgtttatgggggccaaagggcgggggctattactgagttaggataaacagtgtataaaagcagggatagttatgaaattcagaaactgcgtatatgggcggctgacagtaattcttcgacactgggaaacataacggattcaaaagaattcttcatctcagattcctctaaaaccaagtcttcaagaatgggagtccaaagaaacctggaccatcgtgaagcgactgcccccggaacttgagtggccagctccactttgcgacacggagactgtttgtgtgacacctcctccagctcccgtcccccttccgccgcgtgggtgccatggcaacggagagagacggcaacctgggttccggaagccggagagctggagctttgaagccaccccggtcaaaggatgctgagtccggagcgcctagccctaccggactacgagtatctgggtaggaaccccctttaactttggggagggaaagacgtgcagacgaattaggccagggtctgggaggaggcgggggcggggtctgagtgggatcgggtccgggtggtatggggaggggcggagaggcgggggttccagggcctgagcctgtaaggccgagcaggaaggaaaaaagcacctgggaagtaaagaatgtttgaagtgtaggggctggaactcaggcaatgtggattgtgttcaaatgggtcaggttggcgttgaggatttggggccctgttggggtattattgatatgctggtagtggagtaagaataaccttggaacctcaagtgccaaatcagtcagcgaacatttcgagcttttctttttcattaggcactgtgctaagcatttttcatgcatcattcttcatttgaatttctcaacagccctaggaggaattaccgtgttttcttccagttttgcaggtggagaaactggggctgaagaggtaacttgcgttaagttaggccacacagctagaaaatggtagcgctaggatcagaaccggatttgcccactccaacagaacttgagatattgacttggctcttgagctaagactgtatatgtagtactttgttgagcatctttagtgtataaggcatttaatgaatgaaaaaaggcacacacacgcatagatatgtacacacacacacatatgcacacaatacacattttattttattttatttttgagacggagtctagctctgtcgcccgggctggagtgcagtggcgcgatcttggctcactgcaagctccgcctcccgggtagctgggactacaggcgcccgccacctcgcccggctacttttttgtatacttaatagagacggggtttcaccgtgttaaccaggatggtctcgatctcctgacctcgtgatctgcccgcctcagcctccaaaagtgcttggattacaggcgtgagccaccgcgcccggccacaatacacattttaaataattcatagacttttatttttttaaagacgttttgttttgttttgttttgttttttgagacagagtttctctcctgttgcccaggctggagtacactgcaacctctgcctcccggattcaagcgattctcctgcctcagcctcccgagtagttgagattacaggcatgcgccaccacgccaggttaattttatatttttagtagagacggggtttcaccatgttggtcaggctggtctcaaactcctgacctcaggtgatccgcccacctcggcctcccaaagtgttgggattacaggcgtgagccactgcacatggcgagaagttttaagtttacagaaaattgagcagatagtacggcgagttcccatataccttgggtctccctcactcacagtttccgctattatttacatcttgcattagtgtggtacatttgttacaatggataaacatatatatttataatatataataatatattatatattattattattatatagatatattattatagatacatattattaactaaagtccatagtttacattagggttctttgtgttgttcagttctgtgggttttgataaatgcatgtcatgtattcaccattccattatcatacagaatagtttcactgtcctgaaaaatcccctgtgctccacctattgatccttctccctccccctgcagcccttgccaaccactgatcttatggtctctaaagttttgccttttccagaatatcatgtagttggagtcatacagtgtgtaaatttttcagatgggcttctttaacttagcagtaagcatttaagtttcctccatgtctttctgtggcatgataactcatttctttttatttctgaataatattccattgtatggatgtaccatgcacatcttttttttttttcttcttctttttttttttttttgagacaatgtctggcactgtcactcaggctggagtgcagtggcactatcacggctcactgcagcctcaacctccgggctcaagtgatcctgctacctcagccttccaagtagctgggactacaggcacatgccaccatccctggttaattttttaattttttgtagagaaagagtctcactatgttgtccaggttggtcttgaactccagggctcaagcaagcctcttactgtggccttccaaagtactgagattacaggtgtgagtcactgcacctggcttacatctttttttttttttttttttttttttgagatggagtttcactcttgttgcctaggctggagtgcaatgatgcgatctgggctcaccccaacctccgcctcctgggttcaagtgattctcctgcctcagcctccctagtacctgggattacaggcatgcgccaccacgcctggctaattttgtatttttagtagagatgggtttctccatgttggtcaggctggtctcaaactcctgacctcaggtgatccacccacctcggcctcccaaactgcttggattacaggcgtgagccaccgcgcccagccaacatctttttaaatgaaaaacaattctggtttacattttgtttaacttattttaaaaattaattttaaaatattttttaaggttggtaatatggaaacttgattcaaagtattttttaggcctggcatggtggctcatgcctgtaatcccaatactttgggaggctgacgtaggaggattgcttgaggtcaggagttcaagaccagactggatgatagagtgagaccctgcctctaaaatgcatagatagatagatagatagatagatagatagatagatagataggtagatgtttttagtgaaaagcctacccctttgcctccatctgcccagtttccatccatcctcagcctcccaaaagtaaccactattattgttttcctgtgtatctttccagagtttattatatacataaaggagtatacagtgcatactttttcatttaatacatcttgaagtaatttccgtttcttttgttttttcttttctttctttcttgagacagagtctcactctgtcacccaggctggagtgcagtggcaccatctcggctcactgcaacctccacttcctgggttcaagccattctcctgccccagcctctcaagtagctggaactgcaggcacgagccaccacacctggctaagtttttgtattttgggtagagatagggtttctccatgttgcccaggctgcttttgaacttcctgagctcaagcgatctgcccaccttggcttcccaaagtcctgggattataggcgtgagccactgcgcctggcctcgaagtaatttctcagtcagtagggagcttcttcgttcttcatgaaattcatttttagctatatagtatttaaataatttatttaaccagtcccgcactggtaaacaagttgtttttagccttttgctgttactaagaatgctgcaatgaataacctgcagttttgttcctttgcaagtgtatctgcaagaataagttccacaaagtggaattggtggattaagggcatatgcattgaagtacttatagatattgtcagattgcccttaataggtgttgtaccattttgccaccagcaatgaaagagaatgcctgtttccccattgtgctgacaacaaaatacatcaaacttggatttttttcaatctaagtgacagatagtctgagtagatttaatatgcatttttaaatgaagttgagtgcctttttaccaagtttaagggctgattggtctttgaaagctatatatatacacatatatacatgaacatatatatagacatatatatagagagagagcttaagacagtgaccacatccattaatcagctaaaaggggatatcacagacaattttgtatctaatgaataacagtatcaatgtcaagcaatgcctagacttttttccaaagattttatgtattttattacccagtactcaatgaatatatgaaatatttgaaaaggctagttcattgttcagttccttgggtgtttgctgtttgaattttatgtctcaaaggcttggcagatttggtgtattggtgccttggtgaatagaagttggtggtctcttcataaatggcgttttcaggaaggccaattcagtggcagtgttgagaatgaatctacaaacagaatcagagtctcaggttggttgaaaaagcttcaatgtttgtgaagcccaaccaatcacctaataattgaatcctatacaaatgcttcttcatgctttgttgcatatttaagtgtcttaattccttgtcctaaccactaactagacattcatactgccctcagcatggtcacacccctcactgccttctcctggttcatcaaaccgtatcactctgctgaaatgcgtttgtctttagttgagaactatccctgccttttacaatttgtctctcttagaggcatgctgctttgacctattcaccctcaattttttttttcttttttcttgagacggagtctcgctctgtcacccaggctggagtgcaatgatgtgatcttggctcactccaacctccgcctccagggttcaagtgattctcgtgtctcagcctcccaagtagctgggattacaggcacctgccaccatgcccagctaatttttgtatttttagtagagacagagtttcaccatgtttgccaggctggtctcgaactcctgacctcaggtgatccacccaccttagcctcccaaagtgctgggattacaggtgtgagccaccacgcctggccaacctattcaccctcaatctaatgaccgtttaaaaccactccctacagaatagattaataaaatatttcctgatttaaatttttaaatacctgtgatttttccatttgtttttatttttatacattataaagttacttgtatgtgtaagcctaaagaagactatacttatagagaaaacaaaactgcagactggaaagccctaggcattcagtgaaacccaaaagctaaagttgagttccccttggttagtgtatctggagacctctctttaggattatggtgtaaattacagggatacctatccaaagaatatctagagatatccctttctccctgctagctagggattgtatttacctttctgactattagtgaagaaatcaatcttttatcatgttgggtaaactgatcctttccccactgactttgtagattaggaacctgtaatcatggccttgcatggcttaagatcttaagatcatcactaaagaatagcttagtgatgttcatgtctgcagtcatcagaatgtagtgataaaaattgtgttaatgcctaggcctgaagagagaaaggagagtctggtaaggagatgaaataagtatagaccctctctgtaggacccgcaaaaggtttccagccttatgaaacctacttagtggaagcttctgccagaggctgaaggtgtgtctgtgtatctggttgggtgtggcgagctctctagagccaaagggcagcctgttctggtcccaggtttgccaaacataccacctacgtgctgacctgagtataagcatgagggcgtgaggtttattttttactccacctaatttggtgaggtgcatgctttcactcacgctccaagttgcctcttcttttccatggaacctgcttattctcactacggttgatagtgggttagtataatagataactctagaaatcaaagatggcctttctcctttggggactagacatttagaagaatcacaataaattgggtagttttttttttaagctatagtttttgaactcttcctatatgcctggcactgtggtttatctcatttaattttcacaactaccatatgaagtgggtactcttactggtcccaattagtagttattaatatcatcttctcattttataaataaggaagctgaggcttagaaaggctaattgatttgcacaaggtcacacaggcaatgatgcatagtaaacaggggttcatacccaggtttgtcatattccacagcttgtgttttttcctcttcactaaaaagataaaaacaaaccaaaaaacccctattggttcaaagggcagtaattcttgcttccttattaaggatgaggctcttgcaaataaatttcttgggaacaagaattgtgttttactcatcattgtcaaccttctatcattgtctaccttctatcactgtataccttctatcattgtatactctcctacacttaattcatacgtatatgtgaaatggaatatgaataatctgaccttagggtaccctaaacatgagtagctaacaaaagcaaccgagacttattaagaacttactctgtaccaggtaccattttaaatgctttacatatattgatgtatatgaagatagtttcagttgttatctccattcggcagatgaggaaactacacacaaagataccaaataacaagttgtaagtggtggatccagaattctaacccagcagtctaattgaagtccacatggttaaactctatgctataaatactttgagcaactcccaaagtggggctccaactattgtgtagacctatacgtggatcctggagtaaggtcaagtgattccagtgtcttcatttaacatttctgccatgaggaggcatccgaggaatgaggatggatcagggaatggtaaaatttccaatttcttcttgccactggactcatctctcagaggcaggcagtgaggaagataacttctaccatttgggagaattttattgacaatcatctttgtactttgggtagctgtatgacctagaagaaatcacttaacctctctgtgccttagtttccacatctccaaaatgtgggtggtaatagtacagtcatggtggcttacgcctatattcccagcactgtgggaggccaaggagggaggattgcttgagcccaggagtttgagaccaatgggacatagtgagacttcgtctctactaaaaataaaaaaaaaatagctgggtgcaacagcatgcatctgtagtcccagttactcaggaggcggaggtgggaggatggcttgagcccaggaggtcaaggctgcagtgagctgttttcacaccactgcactccagcctgggtgacaaagtgagaccctttctcaaaaaatttaaaaaaggccaggcatggtggctcatgcctataatcccagcattttgggaggccgaggcgggtggatcacctgaggtcaggagttcgagaccagcctggccaaaatggtgaaaccccatctctactaaaaatgcaaaaattagcagagcgtgggggtgtgttcctatagtcccagctactcaggaggttgagacacgagaattgcttgaacccgggaggaggaggctgcagtgagctgaaatctcaccactgcactccagcctgggtgacagagtgagactgcttctcaaaaaaaaaaaaaaaaaaattgtgcttgcctcatacatgtaagcatttatcctgttagagcacctgtgtaggtgctcaataaatattagctgctagtgttattaccatatttttgtgcaaatacgtaaacatctggtggcaaccaggaatgtgtgcctctcagatctcctacactggggaggggagggtaattgactcctgaccccagctctgaatctaacaccttgttcacactgaggtcacactttccacagactgctcctagtcaatgactgggcaggacagacccacttccatgagatgttttactcctctagtgggtgactttggcttaaagactctcactgcacactgctaagtccctcattctcccttctccctcctaaaggagggataataattagggtccctcctaaaggagggataataaattagggtcacacctgcatttgatctcttagctctcccagactcctccggcttccttcccattttctatcatgggcgtttcccccagtacatctctcgcatgtctgatcctgttttggtgtctgtttctcacagtatctgagctaagacaacatctaacagttactgatatagtctcttccagccatgaggttaatacaacttctttaggacttggcaaaggttctgacataggaccccttctatgtggaagataagtgttactaatcttaattttttttgtatttgctgataccacagcatatgatagttacttgtctgacttccagacacattctattttttgattttgaatgaatcctgataaacttatttttatttgaatataactagtgagccttccaaacccaattctattctaggaaatattgctgtttacagtaagttagcagaaattctcttagggccttaaagtgtttggttgctgcagaaaggaaatgaaataaaataggtgttaaactgacttcctaaatctttggaaactaggtttataatacataaaactggtcactttgaaatgattatgggccaggtgcggtggctcatgcctgtaatcccagcattttggaaggctgaggcgggcagatcacttgaggtcaggagttcgagaccagcttggccaacatggtgaaaccctgtctctactaaaaatatgaaaaatagctgggcatggtggtgcgcacctggagtcccagctacttgggaggctgaggcatgagaatcgcttgaacccgggaggcagaggttgcagtccactgagatcacgccagtgcactccagcctgggcgacagagcaagactctgtctcaaaataataataataaataaataaaataattatgaacatgttcacaaagtcacctctttctttccttttcctccccctacccttctccttccttttcttcctccctgaataccttctctatataaagccaggcatgaatatatgaatataaagcatccctccccacaggaaacttacacagtagatgggagatgggacatattcataaatgaccataacataaaaagacagtataataagtaaagagtatgtgacctatatggttctagagccagcagctatcttggccttttctcagtttggtcagcagcttctcagtcatggaagggacagcagttcccttggtagcctagttctggaatgggccttttgggagttgttcctggaaggtcgatctagatttttttccttttccaaagattctgtaacctatttaatacatgtaataaataaatatctttttgttggggggaaaaaagagccagtaagttctaagccatgttgttcccaacccttgcctacctccatttctccaaagtaaattgcagagtgatgtcagtgttattctggggttttaagatagctttaaaatttttgactttgtttatcatttatatattcaagtaatgttaaaatctttattccaaatgctattcagaagttggggatcacttttatttgcacaaatgcaatatgtgctaaatgaataattctaggaggccgagtagataaattgaagttttaaaaataatagtagagcaggccgggagcagtggctcaacgcctgtaatcccagcactttgggaggccaaggcgggtggatcacgaggtcaggagatcgagaccatcctggctaacacggtgaaaccctgtctctactaaaaatacaaaaaattagccgggcgtggtggcaggcgcctgtagtcccagctactcgcgaggctgaggcaggagaatggtgtgaacccgggaggcggagcttgcagtgagccgagattgcaccacggcactccagcctgggcgacagagcgagactccatctcaaaaataagtaaataaataaaaataatagtagagcagaagagacatgatccattatcctatttctggttcatcatcctatttatgtccttcatagcacttatcagagttatcttgtgtacctacttgtatacttggttattgtctgtttcttattagaatgtgagccatgagggcaggccttttctctctaaaatctagcacaatgcttggcccaaatgaagtgctcagttgttgaatgaatggtctactttaagtaacagaataaattttaaaataaatgggagaaaggaatccagttcaacaaatagttactgaattcctaacatgtgagagaaactatgtttttccccccttccatgaatgaaaaaggatgattaaatctgctctggatcttttcggttttaactctgatttatacctaaagttaatttcttggttgataccatagtttctgtgtttgggttacataacattaaaatttaatccattttgtaaaaccaatattttaaaaaggaaggagattttctacaattttggagcatctcaatgagatcctgtcctttagttggacagagtgatatgctttgattaagactggaattacccttgtaaactaatctctgggtcctctttctgtgttgggatcacccttacactacttccctaggggccttaggaaatagctcattctatgattggaatttcaagtcaaaacacatttatctgagcagaattttaatgatttatcaaagagaggagggattttcccaaacacaactgaacttacaaattactgatcccactagctatgttttttcttaagcacctttctttaaacaaagcaattactgctgaaatcatcaaatgtatttttttcatggaaagcttttgactaagttttgtttgattagcaggaacctactaaaagtaaatattgtttgagacagcactttcagagcctgttctttttcttcattcaattagcttttaaagcactattctttggagaaagtaagagccttttttccagctgtcctattgtgtaactcaaggtctcgttaatactattatctagccccgagattacaggtaattgtgataaaacacaagcttcagtttctgtaatctcagacagaaatctgcttgtgccccaggacttcagatcaggtgttttttaaattcagacttctctcacctgggacagtcccattggcccaaagtaaacagaggcatctggcggggatagagctgcattagggcccattgccactttttttttttccctttaaattaatgtggcagaactcctcctgtggccaacttacaaagacctgttctaaatgggaaaattctgtattttaaaataggcatgcttgaaacaataacacttttgaatgtaagatatatgaaaggccacacgtcttcggctttgcttgtcaaatggagaggctgccagaaccggtcggctccatggttctcatgccccaaagtcctgcaaattgacacgtaagtaggcaacacacaaagaagttcagcccatgagaaagtgagtttgggcgcttgggctggcctcctttctctctgtgtggagttctttccaactttgcctcttctgtcccatcttagtttttcagaaaggagagattaaatgtgtctggtatatcagcatgttaactgcttgggcaacatgaggctagcactcaggacactgttcagcctgtcatatggaaggaattgcctttcagaggagattataattgtgtatatagccacacaaatgcacattctgcctggaggaaattgcacagaagaggatgccttatgctgccactcaggtctctttgtggaaggctgcgtaagaagtgcttacatggcatagtcacctcttttggacttaatgagtcatctttttgtgtgatggctacataaaaaaaaaggaaagaagaaatgtactcttccccaagtgagctgcttttattggccctgctgctttgtctaagagttttatacactcctcatgacatcatttacaatgctggtgcacagacagtaaacaaaaaataatttagcccttgggcacctagacgaaacttaagtagtccaatttagagaaatgataacaataaacttcataaacagtgaacacatgagcttaaacagcaagcatgactccagtcctttttggaatgcgatgcattgaaagatggctatagagaaaactagaagctccacacgtcagttatgtgcagttaagccttgagtccatggtctagtgttaatctcaagagtacattctagttagtggataaaatacaggctaccatgtgagtaagtcattaagctccttgagccacagcatttcacctataaaagtgggaaaggtaatattgccacctacctcacaggaatgaaagatgattgagaagataaacttgtggagttccttatagggaaggtattttgtaaatagaaaacactgttattattctccttgatcaaatttccccaacaaatggagttgataaaagctacctcacagagggttgagaggctgaattaattaatatacgtctagtatcttaagagtaaactatttaatgaaacctaaaattgattgtctttcttgatagtctatgaactaccagacctgctgtttagaaacatgattgtcttctaaagtctcacatatgcagtctttgccttctcttcaagggttggcacgataaagaatagtgaatgtacaggcaaaagataggctaaatcttcagggagaacagccttgccttttttcttttcaagggtatatttacaaatagcctttggagtcttgctaatctttgttaccatgcctgaacatagggactgttttgacctttgttcttccaataaatatttatttttgatatcatatttctaaatgagaaacaaacttagaaggaaaagaagtggttgaatttgtctcacattataaattttttcttatctttcctaggatggtaagagaaaataacttttttttttttttttgagacagagtttcgctccatcacccaggctggagtgcaatggcacaatctcagctcactgcaacctctgcctcctgggttcatgcaatcaattctcatgcctcagcctcccgagtagctggaattataggtgcatgccaccatgcctggctaatttttgtatttttagtagagatgggggtttcgccatgttggccaggctggtctcaaactcctgatctcaagtgatcctcccgcctcggcctccccaaatgctgggattacaagcatgagccaccgtgcccggcctgaaaataactattattgaaggaccagacatcaggctctccaactggaaagttctcaaacttagccaagtgattaaaaacagctttggctgttcagaatttaatcttttgttttcaattacagttagtagtatttgggtaacttcatttcccagatttcatttgctgttaggtgacacaaaaaggggaaagactttttcttttctttttttttttttttgagatggagtctcgctctgtcgcccaggctggagtgcagtggcgtgatcttggctcactgcaagctccgcctcccaggttcacgccattctcctgcctcagcctcccgagtagctaggactacaggcgcccgccacctcgcccagctaattttttgtatttttagtagagacggagtttcaccgtgttagccaggatggtctcgatctcctgaccttgtgatccgcctgcctcggcctcccaaagtgctgggattacaggcatgagccaccgcgcccggcctaaagactttcttttaaattctaatcccttaggcagggatcatgtctcatatatatattttttaatacagagataatatttcaacttttaagtagtacagctgcctaaatactgtcttaagtagaaactgttttcttttttccttttttctttttttgaggtggagtctcactttgttgcccaggctggagtgcaatggcccgatctcggctcactgcaacctccacctcccgggttcaagcaattctcctgcctcagcctcccgagtagctgggattataggcgcctgctatcacgcctggctaatttttgtatttttagtagagacagggtttcaccatattggccaggctggtctgttggtcagggtggtcttgaactcctgacctcatgagccacccgcctcagcctcccaaaatgctgggattacagccatgagccaccaggcctggcctggaaactgttttcaaataggtgttcttcatatgccatctagagtaattctcatatgcaggaggactgaaggagacagcagtctcgttcagtcctcacagcaggtagacaccagctgatcccacttttctttgaggaaactgggatttaagttatataacttgtccaaggtcactgagctagtatgtctggagctgaagtttgaatgaagtttatctgactctaaagccagtagtattgttagccactttctttcaggttttgtaatttctaagagccttctttcccattcagttcaataaaaatttaagtgtcagaacttaaattcagtagaaaattctacagaatatatgatatattccttagactctttttttttttttttttttgagacaaggtctcactctgtcatccaggctgaagtgcagtggcatgatcatggctcagtgtagcctcgacctcctgagctcaggtgatcctcccacctcagcctcccaggtagctgggactataggagtgtgctaccatgcctagctaatttttaaattctttgtttgttatgttgcccaggctggtctcgaactcctgggctcaggtgatccacccgccttggcctcccacagtgctgagattacagacgtgagccaccataccctgccagattgttttaatatatagaagataatttaacattttcttggtgaggtagtgtcattattttagacctaatttattatattgtgctataaatgtgttataacagttacccatgaagatggatgttattttttttatgcatgagaagaaatggtggctcaaataacttaagtaaattttccatttatatagatagcagttagtgaagctgttatttgattctaattcttctaatttgaaattaagtggtttaggtgccactcagtgttaaattctaatttatagctattaattaataagaagacatctccctgctcccacaccagtacttaccattcccttctctccagactaatgtttcctactgagtcagtaagctgttgaggtctactgaggtttgtttggcgcttcaggtggtttggtgctcctaatctctcagggtattagggtgagggctgagctggtgttataaaaacaaaacaaaacaaaaaacctccaccacttaactccccctccctcccagtgcaatggctcatacaagaagcactttctttctttcttacttaatccaaatccaggatgtgaaaggcagggtctgctttaggaagtcatcattggatttcagctagcagagcagtcattctgtctgaaacacatggtttccaaagctgcctcaattgtagccattttcagccagtaaaaggggaaacagtgaatccagggcaaggaccttttaggcaagtgaagccgaagatgcaaacatcacttgtgctcacatttcataggtgagaacttaataaggtccctgctaactgccaacgaggcagggaattttagtctaatggacagtcgtgtgcaagaagaatggcagtgtatttttggtggtacacaaacaaaaatctgtcatacctagtatatgcggtggagacatctaccctactcaaggcaagttgtattgttggtagctgcttgcccttattcacaggtgaagcatagatgtgctggtcagtatttggtttttgtcctctacctcttgaagtacaaagttattttatccttggtccctgtctctgagttcagttgctccctttttacaatggttattattttctttcttaactttatgttgcctgtcatttctctgtgtcacttcctgtcctttgtaaacatttccaataatcagaatagttcctctctatactctagtgagtcgttcaccttagtgagaacatgtaattttagaatttttagttctttataattggtttgttgctgggcgttggaggtaactttgctgctaaataattttatttttctattgagagttagagacccattgtagaaaccaaaatcttgtttccagagagctagttttacaataaagaaagatatttatcttcctagactggagagtgatttgtaagagatttaggaggagagtgagaaaaaggcagtgccacagacactggggacgtgggggtggagagtttcaagatggaggaagtgttcaatgataccagatgcctcagagaggtcaaagaagatacgggctgcaaggcaggttgttagtggcattaagggaggttttcatggagtagtgtggcaagatgcctgattttgctggattgaagagtaaatcggagggtgaaggcgttgagaataggctagattcgtttcaagaagtttgaccaattagggaaaggaggagagggggtgatagcaagaggaggaagagagagtttattgtttttagtttttagatgggagaaacttgagtatgtttttaggctgaagggaaaggaaccattgtacagggagagagggaagatccaagggaaggaaaggatgatgaatacttgatggaacatttttagaagtacgaggaaatttaggatcaaaggcagaggtgcaaggctattttgaagttgggagtcaggaccatatttatccagaaggcactgtttgtgtggtgcctaaccaacaaactgttatgggatctttgaaaatatttgagacctaaaaaaaaatttatcaaccctaaagtatggatatatgttttattatatatgtataaaacaatataatgtcaactttcattattacatgtaatattgacagacattttgccatatttgaaagcaattcataagtaagaattttctcaattaggaagaattcccaagtgagaaatcaggtcttaaggtgatcttaaaaccgcttcacatggcgtaattaaatttgaacaacagaggtgggaagtaagggtgatgaaggacatggttaaacttagaaatggagctagaaattggtgttctttacctgatgacctcttctttgtctgaagtaagaatcaagattatcttcttagagttagggaagcagaagtaaaaggcttgaggagagcaaagaaagtttgtattagctactgggggaaagaagaaagatagctcgactagggccaagtacaagtattctgagctacattaaagcatgtgaagtaaggctgcataaatcattttaaaaaaagaagtaactaagaatgctaacaggagcaaagttgactatgggaattggtaaaagaaaaaatacaaaagcattacaaaataataattagaagaaacagttgaaaaactcttttaggaaaacatgatgtcacaaataatgcataagaagagggaggattcggctggatgcagtagcttatgcctataatcctagcacgttgggaggctgaggctggtggatcacttgaggtcaggagttcgagaccagcctggccaatgtggtgaaaccccatttctactaaaaatacaaaatttggttgggtatggtggcaggtgcctataattccggctaccctggaggctgaggcaggagaatcgcttgaaccctggaggcagaggtggcagtgagccgagatcgtaccactgcacttcagcctgggcgacacagtgagactctgttttgaaaaaataaataaataaataaaaaataaaataaaaaagaagagggagaatccagagagcgcaaaattccacttcttccattgaagaaagttcaaagaattgctggatttaaagtttttgatgtttatgtttcttaactacagaattttaaaaatcaaatgggtctataagagttataacaaaaaaaagcagtaccctacaccataaccttctcaccccgaagtctcactcctcagaggaggccattttctttcttttttttttttttgagtaccagtaagtctttatttattcattgtattttcccagggaaaggagaagggaagggaagagtcagcatgtgttaaaaaatgatgagaaaatgggaaaggaagtacccagtacagcaaaatcaaccgtcaaataaacacaccccagtgatggggtcaccaaagcccaaaggggctcagtctcctgcagttcaggaatgagggaaaaggatcaggaaaaaaacagacaggtacaggctttcctaccctccctccccataaattcaagattttacacaaagctttggtttctagcagtaaacatggagttacattcattcatctcctattaaacaatcttgtggccactttgacataagtttctaccacctgcataaaagttcctgagtgacttggatatacattcatattccctttcttggcctcctgaccccactttctacatggaaggcccccaattgcatctctttactttaggattagaaattaaaagtaagtaggtttgatccatccaaaatacagtagtgtggttttttttttgttgtttttttgttttttttttttcgagacagggtcttgctctgtaaccaggctggagtgcagtggtgcgatctcagctcactgcaacctccgccttccaggttaaagcgattcccccgcctcagcctcctgaatagccgggaccacaggtatgcgccaccacacctggctaatttttttgtatttcagcagagacggggtttcaccgtgttggccaggatggttttgaactcctgaccttgtgattcgcccgcctcagccttccaaagtgctgggactacaggtgtgagccactgcgcccaggctacagcagtgtcttaagtgtttggcatgaatacatgaagaaatggtcggcctagcgtggtggctcatgcctgcaatcctagtaccctgggaagccaaggtgggcagatcacctgaggtcaggagttccagaccagcctggacaacacggtgaaaccccgtctctactaaaaataaaaaaattagctgggcgcggcgggtgcctgaaatcccagctactcaggaggctgaggcaggagaatcgcccgaacccaagaggcagaggctgcagtgagccgatcatgccactgcactccagcctgggcgacagagcgagactccatccacccccccccccccaccaaaaaaagaaagaaatggtaatggtcttgacttaggaggttgggaacaagggatggagggttttcctagcttcaggatttttgcatacatcatttaagagttgtggagacactccaagcattaaatgtgtatgtgtgtgggtgtgtaagttttcttttgggggtgaacagaaaagagggcagggtagaagacaagtttttaggacagaagatctggtctaataggtaataggggaaggggaatacaaaagaaaggatggttcaagatccccactttaagaagcgggccccccaaactaatgtttcagatctttttgcctggtgcagaaacttctgtcaaagatgctttggctatttttctctcaatacaaaaagaactttgtaaacaaaacccccaaagaacacggaggaagaccaatacattatatttacacaaactaggccacctagcaatcaacttagtgaagtcctacaaagcccagacaaatacagtaacttggggggcagcatttaggggagacaagaacccaggatcagacacacaccacccaatgcgttctattgtatttgtcccgtttcaacacagtgaggtaggtttgcggtgatctcacagcatgtaaacgaaaccccctttttcgaggaggccattttcaaatttttcagcattaaaaacaatttttttttgctgtgtactttaaaataacatgcttaaattgctcttcttgatttttcagttttagatattatttaatgactttatattatagaagatgaggatttaggtctcttatactactcaatttcccttcttcctagtcttccaacaaaattattataatttttggttaaatcaatattcagtgtttattatgactgtgaaaattatacatatgtatgcacgtatacatagtatatatgtatatatatatacacacagtatacaacatatatatgtaaaatatatataatatagtatactatgattacatttctcctttttgaacattttttttcattttcctgcaattaataattgcctttccttttgtgcatggttttcgatgaacttgtgccccagactttatagcctaaggtcagttcaaacacatcaggcatcctctcagtttcaatttcttttcttcaaggtaacttttctgaagtacttcttcatctaactggtccccctgcttcagtctggcctggttgctctctaaatccttcatctttatcatgggtattacttcattcttcatccttacatggatattacttgtcttgcttaagtaagttttagtgcatatttcctaaagcctatgtcttcctttttccttacatgttccttctttttattagattgcatcctctagtagctttctgagaaagggtgcatgcaaagtaatattttagggaatcttctgtttatgaaaatgactttatactacccttacccttgattgatagtttagatacatataaaattctgtgttggagataattttcccttagaatttttaaagcatttctcccctatcttttagctttctgtattgctattgagtgatctaatgccattctgatttgtgatatttcatgtagttttacattggtgtggatcttctttcattgtcttgagatcctttcagtgtagaaattcatgtatatcagttctgagaagttttcttgaattatgtgtttaatattgtctcatctctgttctatctctggaactgttgttacttagacattggacttatggatttatgctctaatttttcttgttttctcttttctgtcttttttgatttttgtatgttatatgaatatccttaacctttccaatccttttgttgaatatcaaaaatatctattgtattagccagagttccccagaaaaactgaactaataggatatgtaaagacctagatacatagctatatagatatacagctgacccttgaacaacatggatttgaattgtgtgatccacttatacacagattttctttgccacctctgagacagtaagatcaaccccctccatttctacctcctcagcctattcagtgtgaaaacaacgatgaagacctttataatgaatgatctacttccacttaatgaatagtaaatatattttctccttgtgattttcttttttttaaattttaaattattattattgtagagatgggatcttgctttgttgtccaggctggtcttgaactcctggcttcaagtgattctcctgccttggcctcccacagtgttgggattacaggcatgagccaccacgcctggccccataattttcttaacattttcttttccctagcttactttattgtaagaatacagtatataatacatatacaaaatatgtgctaattgactgtttatgttattggtaacgctgtcagtcaaatattggctattaatagttatgttttgggggagtccaaagttatatgtggatattttttcttttctttttatagagatagagtctcgctatattgtccaggctggtcttgaactcctgggttcaagcattcctccctccttgaagtcccaatgtgctggggttacaagtgtgagccactatacccaggccccactttgttaaagggtcagctgtatagatttattatgggaattggctgacatgactatggaggctgagaagtcccaccatttgtgcctgcaaggtagagaaccaggaaagccagtggtgtagttccgtctgagttcataggcttgagaaggtagggtgaggaggagcagtgtgctggtataagttccagagtctgaaagcctgagaaccagaagccttggtgtcccagggcaagatgagagggagaatttgcctttcccctctgccttttgttctgcgtgggccctcattgggttagatggtgcccacccacattggtgaaggtgaatcttctttattcaatctactcattcaaatgctagtctctgccagaaagtctatcacaaacacaaccagaaatgatgttttaccagctatctgggcatcccttagcccaatcaagttgacataaaaaaattcaattatggtagatttgatgatttaaatttctactccatttaaaaaagtttgttgaattcctaaatataagatttaatcttgcctttctgagaatattaattgtagagtttcttttttgttgttgttttattggtttttttttttgcatgtgaatgtcgtctacattttctttttctcctgagttctttttttctagtttttaaatgtgtttttcatatacagacttttctcaagtttttgaagctacttgtttaggaaagggtcttacagatcaatatatagagttttatgtaatattcctgtttttagtagggcacctctgtcttcaaactattcttggtgttcccaagttcaacatccttctgattcaacttctcaatagagaataaacctttaattttaaacctgggtggaggaggagtagtaactttactatgtaaggttgggaagaggatctagaaatataactgcttcttatgtagacttttaacccaattttccatttttacctttacttactcccacggctttagaggtgcctgatacctactgttcctaagcctttctgatgttgtataagagggtgtgcttgttttttgttctcttttctcagtatagccacttaagttttagctttttttctgttcatacaataagttgtgtgtctaatttccattttccaaaatttttaacatttcttatctgctgccatcttaacttcaactctatttttataaatctatgtcttcttttatttagatatgcttagcacaccaattcagtggggtttaaataatttttttttttttttttttgagatggagtctttctctgtaacccaggctggaatgcaatggtgcgatttcggctcactgcaacctccacctcccaggttcaagcaattcttctgccttagcttcccgagtagctgggattacaggcacatgccaccatacctggctaatttttgtatttttagtagagacagcgtttcaccatgctggccaggctggtctcgaacacccaacttcaggcaatctgcctaacttggctttccaaagtgctgggattataggcgtgagccactgcactgggcctaaataattttttgaaagacacagagtctcaatatattgcccaggctgatcttgaactcctgggctcaagtgattctcttgcctcagtttcctgtgtaggtgagattttttagtatactatgcatgacgccacaatgcctggcattttttagtgtactcacaaggttatgtaactaccaccatgatataattgcagaacatttttatcaacccataaagaaacttcataccaattagcagccactcccattttactttccccgcaacccctggcaaccactaatctaatttttgtctctatgaatttgcttattctagatattgcatacaaatgataattattatacaatatggggtttattgtgtctggcttctttcacttagcataatgtttttaagattcatcgatgtttgctgggcgcggtggctaacccagcactttgggaggccgaggtgggtaaatgacctgaggtcaggagttcgagaccagcctggccaacatggtgaaaccccgtctctactaaaaatacaaaaaattagccaggcatggtggcgggtgcctgtaatctcagcaactcaggagtctgaggcaggagaactgcttgaatccagtaggcagaggttgcagtgagccaagatcgtgccactgcactccagcctgggcaacaagagcgaaactctgtctcaaaaaaaagaaaaaaaaaaagattcatcaattgttgtagggtatttcagcacttcattcctgttgtggctaaataatgtttgattgtatgggtacatcacattttgtttattcattcatcacttgatggacctttggattattttcactacttggattttatgaaaatactgctgtgaacatctgtatacaagtttttgttcgaacaccttttttcatttcttttaagcatatacctaggcgtggaatttctaggtcatttggtaactctatgtttaactttttaaaggattgccaaactttttcaaagcagctgctccattttacccaccagcagtatatgagggttctaatttctccatatcctttccaacacttgttgttgttgccttttttattatagccatcctagtgcatgtgaagtagtatctcattgtgggtttgttttgcatttccctaatgattaatgatgttgagtgtcttttcatgtgtttttggccaagggtttgtcttcttggagaaatgtctactcaaatcttttgcctctttttaattgggttgaggttaagatggcagtttagatctggactgttgaattgtaacagtctttacatattctggatactagacccttatagatatatgatttgcaaatattttctcccatcttgtgggttgtctttttactttcttggtagtgtcctttggagtacagtttttaattttgatgaagtccaatttattttttctttggatatttatgctttaggtgttatatctaagaaatggttacctaaaccaagttcacaaaactttgtacctattttttattctaagagttttatagtattagcttttacatttaggtttttgatccattttaaaatggcttgaggtaggagtcaaaaatcatttttttacatatgagtatccagttgtcccagcaccatttaaaaaaaagactgttctttccccattgagtgtttttggcactgtattagtccattctcacactgctaataaagacatacccaagactggataatttataaaggaaaaaggtttaattgattcacagttcagcatggctggggaggcctcaggaagtttacaatcatggcagaagaggaagcaaacacgtccttcacatgataggagcaaggagaagtgctgagcaaaagggggaaaagtcccttataaaaccatcagatcttgtgagaagtctctcactatcacaagaacagcatggaggtaatcacccccatgattcagttaccccactgggtcccttccatgacacgtggggattatgggaactacagttcaagatgagatttgggtggggacacagccaagccatatcaggcacttacgtcaaaaatcaatttgctataaaatataagggtttatttatagactctcaattatatttcattggtttctatgtctgccttatgccagtaccacacagtcttggttactgtagctttgaataagttttgaaattgggaatgtgaatcctacaaatttgttcttctttttcgagattgttttggttattctgggtcttttgcatttccttatgaattttaggatcagcttgtcagtttctctccaaaaagccagctgggattttgatagggattgtattgatattgtaggtcagtttgtggagtgtgccatttaacaatattaagtctaacaacctacgaacatggagtgtctttcctattatttaggcctttaatttctttcaacaatgttctatagttttcattgtataagtcttatacttctttgttaaatgtgttcttaagtatttcatttttatattatcatagttagcactgttttctctatttcacctttgaattgttcattgctcatatatagaaatatagtgccagcctgggcaacatggcgaaaccccatctctactaaaaatacaaaaaattacctgggcttgatggtgctcacctgtagtcccagctattcaggaagctaaggtgggagaatcacctgaacctaggaagctgaggctgcagggagccgtgttcacattactgcactccagcctgggcaacgggagtgagaccctgtccaaaaaggaaaaatgatcttgtatctttcaacattgctgaactagtatattagctctaatagtttcttagatttcttaggattttttataccagataatgtcatctccaagtagagatcattttacgtcatcctttccaatctggatgcttttattttttttttcttgcctaattgtgctggttagaacctgcagtagaatattgagtagaattggcaaaagtggacatctttgtgttgttactgataggaggaaagcacattttgtcttttgccatcaagtacaatgttaactgggggagttttgtagatattctttatcaggttgaggaagttcccttttattcctagtttgtttagttttagttttagctttttttttttttttcatgaaaggatgttagactttgtcaagtagtttttccacatctattgagatgatcaagtagtagggtttaagtctttttaaaatcccttcagtgatattttagcagaggttttggagggaaaaaaagaaaacacatttaagctgatacatttaactgcaagatacaaagagattttaaaaaagatattaggggccgggcgcgagaaggcctggatgggcagaccatatgaggccaggagttcgagaccagcctggccaacatggtgaaacccgtctatactaaaaatacaaaaaaaattagctgggtgtggtgcacacacctgtaatcccagctactccggaggctgaggcatgagaatcgtttgaaccctggagataaaggttgcagtgagctgagatcacgccattgcactccatcctgggcaacagagtgagactctgtatcaaaaaaaaaaaaaaaagatattagaaactaatgtagtttgtttgaagttggtcatagctagaccaactagctatgaccaattactagaccatagctagaccatagtttaagaaatttggaaatttagaaaagataactgcttgatcatgctaaaacacctaattcattatttttaaatgtataattaaaataataaataacaacctattatccctcaaagaaaaaggaaaagtataggtttttattcgatgactcagcagttttctatctggtctcgttaccttcaattctttctctttatttctatcagagctatctttctaaaacctaaactggatctggttaaaatctttcactaactccccatgttagcatggcatacaaaccttgtgatatggcagcttttttccctccgtctagcacaattcttccatcaaactgttttctctagctatgctgaacaatgtacagttccagaattcacagtgtcttctctctctctctcttttttttttttttgaaatggagtctcgctctgtcacccaggctggagtgcagtgacgcgatttcggctcactggaagctccgcctcccgggttcacgccattctcctgccttagcctcccgagtagctgggactataggcgcccgcctccacgcctgactaatattttgtatttttagtagagacggggtttcactgtgttagccaggatggtcttgatctcctgacctcgtgatccgcccgcctcggccccccagagtgctgggattacaggcgtgagccaccgcgcctggcccacagtgctttctcttatctctgggccttaatacggactgttttgtttacttagaactgtaattctcaaactttttggtttcaggatctctttacacttttaaaaataattgaggatttcattgagctttaggtaggatatatctatcaaattgttactgaaactctaggggtttggtataggtcccattgcttgcccctcagaaagctgatcactgagactacgagtattgccagggaacaaggctttaatcgggtgctgaagctgaggacatgggagatcagtcccaaattcatctcccgggactgactaaaattgggggtttctatagcagggaagaaacgtaaccatgtgtgggaaaacaggaattagggagggctaaggaaaaggaattggttagtaggaagcagatggttggacaggtaatcatgacaggtgagtgcacaaattttaagactgggggggtcgatttctatgtttattcaaagaaaccataaacatcagttctatgggacaagtggactactttcaaaatactttcaaaatgttactatatttgaatttaaaacagaaaatttaaacattaattcatttaaaataacaataatcagcctatagcatattaacacaaacagcttttttttttttatttttttttggagacagagtctggctctgtcgctcgggctggaatgcagtggtgcaatctcgggtaactctacctcctcctcccgggttcaagcgattcttcttcctcagcctcctgagtagctgggattacaggcatgcaccaccacgcccagctaatttttgtatttttagtagagatggggttttgccatgttggtcaggctggtcttgaactcctgacctaaagtgatctgcccgcctgggcctcccaaagtgttaggattacaggcatgagccaccgtgcctggcctaaagagcatttttattaaaaatattttctaaaaaccaaaataattagtgacaatagtagcattgttttacacttttgcatatctttttaatctctagcttagtaatagaagacagatgaattctcatatttgcttttgcattcagactgttacaaaatgttgctttagttgaagaatatgaaggaagtctatccttacacagatacgtagttcaaaaaacaggaatattttaaattgccttttcaggtatttatttcaccaaaactagagaaatagtagtttcttacaggttagttgcattgtgaaatctaaaactacatcagtgaacttttcagagtcttttatattaaagttcacaggtctatgtgcactacgaaaggacattttaccctcgtatgatttatgcagaaaatggtgcttcacttaagtatagcaggtcttccaaatgtgtatttcatgatacagtatcaaaagatcacgttcattaatatcaccacagatcttatcagaaaagtcttttttttgtttgtttgtttgagatggaatcttgctgtgtcaccaggctggagttcagtggcgtgatcttggctcactgcaacctctacctcccgggttcaagtgattctcctgcctcagcctcccaagtagctgggactacagacgtgcgccaccatgcccagctaatttttgtatttttagtagagacggggtttcaccatgttggccaggatggtctcgatctcttgacctcgtgatctgcctgcctcggcctcccaaagtgttgggattacaggcgtgagccaccgcgcctggcccagaaaagtctttaagaatcgagaagctctcaggctcatggatgaagtatgttttcctcctttttttcccatactgcacagatgtagagttttccaaaattttaatttttcatgtgaaagcttgactttttatcactgataacaaatactatcacttgttttccttgaagtaacaggctcattttgttcatttttgagaaaatttctgccaaatacccaagtctgaacaaccaggatttgtgcattagttctttcaagtaaaaatggtgttttataaaaaaaaaacagctagttgagcttgcatgtcaaataatcttccagtgcttttctttaagacaactttcatgcttttgcagaaattttttatgcatactttctagtttgtacatagaatattaaaaaggcatgtacttatggggcaaggggtaagatttaatgaaattaatatttactgtatcttcaagaatatttgtaagtgaaactggctgtattagtcagcttgggctgtcataacaaaatatgcaaactggggtggcttaaacaactgttttctcgcagttctggaggctcagaagtccaagatcaaggtgctggccaatttggctcctggtgagggctcccttcccttccagatttttgccttctcggggtgaccttatatggctgggagagacagactctatggtgtcttttgaagagcaaacatttaaaattttgataaagtgtaacatcaaattttttctttaatagctcatatattttatgtcatatttaggaaatttttacctaacccagggtcactaagattatctcctatattttcttctggaagttttatagttttagctcttacatttaggtctatggcccattctgagttaatgagttaatttttctaatggtgtgaggaaaggttcatttttttgtatatgagttgtatatgaatatcgaagtattccagcaccatttattaaaaagattatattttctccaatgaattgccttgccaccttgttgaaaatgaattggccatgtatgtgcatatttctagattcttatattccatcattgtatatatgtatctttatgctaatatcacactgtcttaatgactgtagctttaccataaatcttaaaatcaggtagagtaagtcctccaacttagtttttctttttcaaagttgttttcgctatttcatgtttcttcatagctatgtgatcttgggcaggttacttgtcttctctgtgcttagtttccagatttgtaaaatgaagaataatattagactcttaggaggattaaatgaataaaactcttacaactgtgcccggcacataggaagaactccataaatattagctaatcttagtaattttgggtatatttaatgaggtaaatattggatttatccttaatcctggcaaaaaataatcttaaaataggaaactatattattatttataactatattattatatattattattaactatattattatcgagacaacatttcaacaaatttagttcaaatatcaaattaacttttattaatgattcatgaacagggcagtatctcctctaaaaatttagaaaaggggctccggtgagctgagtggaggagattggctttataggtagggaagggcggaagaaagcagaaacaagaaactgaagcagattggttgttttgaagttactttccttgtagggtcagaacagaggagacttcttttcatgctggctgaaactggcccatttggagatttggctgttatctctcttgacttctcagaaggtcagataactgacttagttttagtttggtgacctggagctttagcctgagtgactccattttggtttagtctactggggcctagcgcaggaactcagttgaaatcaaaggccttctataaattttatttaacactattttaagatacaagcaaaaatgtaaacatccctcaatacaattctagcaaatggcataaatatatatatatttaattaatatatataatatataattatatataatatttaatatatttaaataatatatttaatatattattaaaataaatatatatacatatatatgtttatcccagaaatagaccagtcttatctataatattatttataagaaaatgataactggaattacccataggagcacattagtagacattcaaagccttttgataaaattatctaattttttttagtatctaatcttgatcacccccccgaacaattaaaaatagagtgtttctgctgggcgcagtggctcacagctgtaatcccagcactttgggcggctgaggcaggtggatcacgaggtcaggagttcgagaccagcctgaccaacatggtgacaccccgtctctactaaaaatacaaaaattagccgggtgtgatggtgtgtgcctgtaatcccagctactcaggaggctgaggcaggagaatcgcttgaacccggggggcggaggttgcagtgagccgagatcgtgccactgcattccagcctgggcaacagagtgagattctgtctcaataataataataaaaaaaagagtgtttctaacttttgttaatgtcttcatttacaaccaagagaagcattagggttatatttcttgaaaaataagaaaaagaaacactgttcttaggcctctagaatcctctagaaccactgttcgtttttatactattggatattcttgtcttacagaaagaccagatctgaacattttttttaaaaagatgaatataggtccccatgactcccacggcaacactgagtggccttgttctacctggctcactttgctaatacagtggggttttttttctttctcttctgtccttatgtgtaaggcagaatacaagggcctgaagcccccgcccctcctgcatttgacaacagggttggacattgtgtattgagtttttttgtttacattgttctgattaaagtatgcaaaataaaaagatgcagttttatataacagaagatggatatagaaacattataaatggtaaaagcttttataattgtttgctgatgagaatatgaaatgatatattttggaaaattgtttggcagtatataaagctgaacctatgtataccctgtgacccagttattcacttctaggcacagaaacaagggaagtgtggacatatgtttaccaaaaaactcatactagaatgctcgtagtggcactattcataataggtccagattatgggaaactggaactaaagaaaacaaatgccgtcaacagtggaactgataaataaattgtggtatattcaacaatggactgttattctgtaatgagattgaacaatgggatattatgctgcaatgagaattaatgaacagttacccacagctatatggataaaccccacaaacataatgtttttttttgagacagggtctcactctgtcacccaggctagagtgcagtggcatgatctcagctgactgcaacctccgcctcctgggttcaagcgattctcatgcctcagcctcccaagtagcagggattacaggtgcacttcaccacacccgactaatttttttgtatttttagtacagacatggtttcgccatgttggccaggatgcacaaacataatgttgagtgaaagaagccagaggcaaaagactgcatactataatagactatatagatagtttatatatgtatacacacatacatatataaaacaggcacaatttaccattgaggggttagggactagacagtggctgtaggatgttttctagggtgctgattataagtataaatttacatttttctgtatattattatatttaaatagaaagttgtaaaaaatgtttggtagtaaatttctaacttaaaactaagcaaatgatacacaattgagatcccggaaatagatgccaaagaacaaatctatttaatctgtgacaaactaagtgtaacaaagtaagcatggcacatgtatacatatgtaactaacctgcacattgtgcacatgtaccctaaaactttataataataataaataaataaataaataaataaataaaattcattaattgagataactagatttcaatatggcaaaaataaatttaggttcatgcctcataccatatggtacattgaattgtagtttgaattaaaatattaataaaatattaatgtattttttataactaaagtataattatggctgagataattttacatataaaaattgatatagatctgtaagggcagattgatgcataaatagatgttggtttttaaaatttgtgtacaacaaataacacagataaaaggaaaatgacagaataaggacgattatgatgaatatgatgaataaagcttaatatgatatgtacagaaaataaatgacacaaatttatgttacagtcctgtcaagcagtcaaaggaaatgatttaagagtttgttcatgtgcaacattcttcataaaggtgaaaaattagaatcaatccacatgcccatcaataagggaacaattaataaattatggtatttctatgatagatactacgatgtagccattacaaagaattagatttgttaatatggaaagatgtacatgaagtattaagtgaaaaaatgagttgtagaataaagtacatatgtatagtgtcattacacttttctacaaaacaagttaatgcaacatttgtcaacaagtatatggtcacatgtagtgtaagttatggaaggtatagatcaaactgttagcagtgaatactctggggaattggcataagagggcgcttatcctgtttttacttcacaccctcctgtattgttctgtttcattgatgtgtgcttttacaattaaaaattttaaactatatataaaggagaaaggtaagttaactaaatattcacatttaccaataaataaaccactggaaataagatacttttgagttagttaaaacacagaactttatattgggacatctgcaaggaaattggtctcttccgtttcttggatgtaatataatctggtgtaatctttctggaaagtaatctgacaatacataacaggagccataaaaatgagcatatcttttgatcctagagccttacttctgggaatataccctaaggaagtaactcaaaagagaaaagaaatttgcttgtgcaaatatatttatagccacattattttaagcagaaaactgaaaataatccaaaaagaattctgtatttaagcaatattttaaaatgcagtaatacattgatcttctaattttttttttttaagtattgctgggtgcagtggctcacgccagtaatctcaaccctttgggaggccaaggcaggaggatcgcttgagcctaggagtttgagaccaccctgggcaacacagtgagaccctgtctctgcaaaaactttttaaaaattaggcaggtgtggtggtgtggcacttgtggtcctagctacttgggaggctgagataggagaatagtgagagcctgggaggttgaggctgcagtgagccgtgattgtgccactgcacttcagcaagcaacacagcgagaccttgtctcaaaaagaaaaaagctaggtgacctaataagattgccatcagcttcatccttttataatgtcaaaaaaatgaaattaaaagtaaagtttcttttatcttttccctatagtaccattcaaattcttctgctcagtttaacatttttcttcaacttggtccctctaacaagactttttactgggtcattttgttttggaaagacaaagtatgaatttagagaagtagaagagagtatagtaattttttctccttatctatttatagtaaacattatagaagcaaaatatttacttacacttaatcaggtttccaaattgtcctggagagtagaatatcctcctccatgatctagtgaggaggttaagttggaggttaaataccttgcataataccccaaagagataggacagggattagagaccaggtcttatataatgagacccccttgctagggttgttgagcattggtgcctgtctgtgggatggcagtgcagggctgggatcaattctctgtttaagagcaagtctgaaggtcagttctttcctttttgagctgggctatttgagcggtacagtgtacactttctgaagagatttctggaagcaattgcagaagtttcttatacagggtagaatctgacctaagctgtccaaagagaaatggcccttagagagaagttgtgcttcccctttgctacctcatattttatgtgctgcctctcatttgttccttttcctctctagttcaaaatgcaggatctgagaaggagacggagctgtcatcagttctaaacctgaacagaatgtttcctcagttagtaaatggaaaaattattttaaaaaatcttcatgtatgtttgtgaaataccaagacattgatttgtggtctagtttgcaatcatgataattatattaattagtaccaatcatgatcattttaaactttctgaatttctctatcctaattctgtgattcagtggaaaatatttatactcaagagattaaggttcaattttctgccctaccacttaacaactgtgtgaccttgggcagtttcttcactggtaatatggagataataatcccagccttatctgactcctaggtttgttgtaaggttcaatgagataatgtatgtgaaagtattcggtaaactttcaagagcaatacaaatgtttttgttgaagttatgaaagtcattaccctgtttaaaacacagtaagcactgaagatgtcagtacgtctcttaagattctaaaatagtgtcaagaaatgttctatcctatcctagcatgcgctaacctaggtctgtgaataggccaaggagccctctccttggttgattggttgcttgccagatatattagtttgatctcttcatttatactttctggaaaatatatggatgctttatgttaggtttgtctgcatacaacagagaaacctaaaataccgtggtttaaacaagatagaagattatttctctttcatggaaaacaagtctgaaaataggcagtccacagctggtagagtatactccagggtttcatcaggactcaagcatatatttttctgtgccaacatcctcaccatagaatccattctttacctcatgacccatgaggactgaaggaactcctttttatccattgggataaataaaggatatctcaactgaatcagtcccatttaagtactttctagaaaatccacacagtattttgcttacattttataactgagtcacatgactaaagactagctacaagagaagctgagaaatataatctttatgccagtgaccatgaacccaggtatgtatactggagggtgtatgtgtgtgtgtgtgtgtgtctgtgtgtgtctgtgtgtctgtgtgtgttgaagagggtaatttataaccaaaaacattcatatttttatataatgctgtggcagagacttcaagttgcaaacttcaatggcttcttcttccttagaaacgtacttgcagttttggccagtcatggtggctcacacctgtaatcccagtgctttgggaaactgaggtgggaagattgcttgaggctggaagtttgagactaccctgggcaacatagcaagaccctgtctctaccaaaaaacaaaaacaaaaaattaaactgggtttggtggtgcacacctgtagtcccagctactccagggggctgaggcaggaggattccttgagcccagctgtggaggttgcgatgagctatgattgcaccacactgcactccactgtgggcaacagagcaagaccttgtctcaaaaatgaaacaggcctggcgcagtggctcacgcctgtaatcccagcactttggaaggccgaggcgggcagatcgcttgaggtcaagagttcgagaccagcctgtccaagatggtgcaaccccgtctctactaaaaatacaaaaattatccaggcgtggtgccaggcgcctgtaatcccagctacttgggaggctgaggcaggagaatcacttgaatctgggagcagaggttgcagtgagcagagaccttgccattgcactccagcctgggcaaaagagcgagactctgtctcaaaaaaaaaaaaaaaagaaagaaaaagaaacaggccaggcatggtgactaacacctgtaatcccagcactttgggaggccgaggtgggtggttcacttgagatcaggagtttgagaccagcctggccaacatggtgaaaccccatctataccaaaaaacaaaacaaaacaaaacaaaaattagctgggtgtggtggtgtgcacctgtagtcccagctacttgggaggctgaggtgggaggctcgcttgaacctgggaggtagaggttgcagtgagctgagatcatgccactgcattccagtctgggtgacagagtgagactctatctcaaaacacacacacacacacacacacacacacacacacacacacacacacaatactccaatttttacctggagattcgagaaattagggaagaaaccaaagaaaatatatttccttataaaataaatattaaaataaagaaaaaaaagtctgggtgcagtggctcacacctgtaatcccagcactttggggaggctgaggcaggaggattgcttgagcccaggagtttgacaccagccatagtgagaccctgtctctacaaaaaaatttaaaagttagccaggcatggtggtgcacacttgtaatcccagctgctcaggaggctgagataggaggattgcttgaacctgggaggtcaaggctgcagtgagccatgatcacaccactgcactccagcctgggcgacagagcatgaccctctctcaaaaaaattttaaaagttagaaaatatatttctatagtgcaataacaaagtgatttgtgcagggaaaactaaaaattctggagacattttttaagctcagcagtatttgcataaagaaatatttataatgtgaaaacaaagtacttcatttaattttgaaagatgtattaagcaaaaaaggaaagaaaaatgagaggaaaaatgctagaaatacagggggtacattggtttaatttgaaccctcttatgtatatgtatctttagctccttttactttagcttttctcgtctctttggaaatgaaaatattcagttgttgccatgattttgcttgctttgtacaaatgaaatgttggctttatggttatagacagaaatatggaaaactttagagctactttgagcaagcccaagaactttgaatcattgaatcaagaggagaaaaaatgaagaaaatatttcaagttctttatctgtaaaatgatggagataaacaatatgatctgaaagtctttcaacttcttaagtttttataattcaggagcagtggtaagaatagtaatgaagtttctaactactacttccaagttaagtacaatccagagaggccagtgggacagaatctgtgggacgatgtgggaggacttaagtgattttaagtcctggtgaagaggaatagtgtgttcaatggaaattgaggaagacaaggacttttcaggtcagggggcttaatgggtcatcattgtgtttgttacagagttttaggagagtggtggagaaaaagatggagaaaaagaaaatggactatgtgctcctaggaagagagatgtgattgttttctaacatgtaggcaatgaaccctcagaggaactatagatgagcattagggtgttcttgaatgctctaaaattatatgcaacatattatattcgtttttctgtgagaaagcatttgtagctttaatcagattcttattgtaagctaacaaagccacttgctcttaaaaatgaataataaagactttaaatgattaaaaacagaaaaagtgacacttcagtggtcctgcagtgggtgaatatagtcattgtgatattttcagagtaagctaggtttcagtcacacacacacacacacacacacacacacagtacacacacacacacaatgagagaaatgtatagaatcgtggggaatttgctgtacagttttgggttttggcttgctattattagctgcaccttgggcatgttacagaacctccctaagcttcaatttcctctgctataaaataaggataaaagtaccttaaatggtggttgtgaaaattagagacaatgtaagttgagtacatagtacagtgcttggcacagaataggtatttggtaaccctttccccacatgagttttttaagtttctgtatttactttaaggcccttattgtatgcagtcatccatgagtatatgcagggggttagttccagggctctctgagtataccaaaatctgtgcatactcaagtcctgcagttggccctgtggaacccgaatctacgagaagttgaccctccctatacgtgtgttttgcttcctgagaatactgaagtttcgacctacatttggttggaaaaaaccctcacttttaagtggacccaagctattgaaatccgtattgttcaagggtcaatcgtatttcactttgaaggactggtcctcagcaagttcatcttctgaactactcagtgatgctcacactcaagaagaccatatcttattaagtggttagtttagaagctctttcccatgcagatttgcaagcggagtgtgtaaaaatcacacattgcacttgttgcctggcagcacgtgtccctgagtggtagtacatggcttgcattgtaatgttatcagtgctggggccagctggctagacatgtactgctacatgggctagggactccattcctcaacaaaacagcagccagcactagggttaacagaaaatgacaaaccaggaatggatgagggaggcgccagcacagcagcgggatgtcttttgatttgcttctgttatttgcatgtctctcttgtgatgtctgtgaaatgtttagaatgacaaagtttttaaaagacctgctgactccgcctgaaaaatgtgaaaaacctcccatttagagacctattatgtccagctagcctgcattttctatatctttttctttattttttattaatgcaaacatttgcatgaagacagaacctttgtttcttaaagagttcatctgctcctgctgcttactggccctgccatgcaagagcacaacagaacctttgttaggctttcagcaaagctgtttatgaacggtggcttactgaggactgcttcctgtgctgtgtgcttccattttgtctaaaaagaaaaaaagaaaatagttattaggagtaaaaagaatttggactttcttttattcaagtcctggatgttgaaatgacaagtagcccccaaatttgtgaggaactggtaattgcatcgaatgcattttttcgctttaccttgaacataatgaggctcttagtaacaatagaaggaacaagtgccttctcattggaatagagagaaggaacagtagtaaaaaggcaacagaaagagtagttgagaacaggacaaaagtggcttccagtaagaacactaacattgtaatagaatgtgttttgatatttagcgtttcccacctgggaggcacagtcctaaagtggttgagttgaataaagaacagcatcacagtttataaatagtggatacagtttgtatgttcattaagtaaatatttgaatgtctaccatgtgaaagacactgaatggtcctgagtgttaaaggaaataaaagataaatgagtcatggtgcctatctttaaggatcaggacatccaacaaagaagataacatacgcataacagaaataactgtgtatcaaggtagaaagtgccactggaaatatttaaaatagatgtttagggagtttgggaaaagggaagatcacttctggctgggacagaatcagggaaaggttcacaaagaaggtggcatttgagttgggcctggcagaaaaggtaggactgaacattgcaacattcctaaaagtgatgagtcaaaaattatgttgttctagtaaaacagatccaaagtatgtttttatagggtactttggtggtgtttttataccattaatttagatgatatgttaagtgttatgagttttctgtgtagactaaactggggcctctctgtctagtctatgttgttccaaccatttgccccatacggtttttgtgcactttggcctaggcctttttgtatctataaatatctacaatagcatcctttactttcataacaaaaatagaaactcaaagggattattgagcactattacagctatatcccataaacagtatgtggagatagttcttagtggggatttcacatgtgagactcttatttgaaaaagaatccccaccttcgtgcagagccacatcaaccacaagagagaggacagggaattctaagcccgtgagttttcagttactttaaattagaacttttctgtatctttttgtcattagaaaaaatgagatcctgttactgttagttcagttgtgaatgccaactaatttttatgtaatatttttaatgtaaaatgccaagcaaatgattaagctgttgtattagtatcttattgcattaatatcactattctgtatattcatagttaaattgcatattaccaattaatattaatctgtaaatttaatgataattgataaatacatggtttgcccccaaaggctatactttttcttttttttaaagagacaggagtcctactatgttggtcttgaactcctgggctcaagggatcatcctgcctcagcctcctgagtaactgggaccataggcatgcatcaccatgcccggctgcaagactacaactcgtgctatagcacaattaattttcaccttgtaattttattacttccctgtttgaaaacatgagtggcatatgatttactacatgtttagcaatttacaggattttttttttacccatgatactttctggaaaatagttatgtgaatgtttatggcgttgacttgataactatactgctttattagtaactatttttgcaaagttattgccatgacaaatattacttgggttcttcatatgtcccttagattgtaactgtgggaaacttaagtgctactttagatttctctggtgttcaggaagtacattttgttatggtcagctagctgagtgctttaagtttgaactatgaaaatctccttaaaaaaaaaaaggacgcggtggcttatgcctgtaatcgcagcactttgggaggccaaggcaggcggatcacctgaggtcaagagtttgagaccagcctggccaacatggtgaaaccctgtctctactaaaagtacaaaaattagctgagcatggtggcgggcgcctgtaatcccacctactcaggaggctgaggcaggagaatcgcttgaaccctggaggtggaggttgcagtgagccgcgatcacgccactacactccagcctgggtgacaacagcgagactctgacttaaaataaaaaagattctgtagtttctggcacttgaaattgcaggactccaacctacaaatgctgtattattatgagatttaggctggaaatactgaggcagtaggatttaagcacttacccttaattgacatcccaaaactatatataaaacaaacaaacaaacaaaaaaacaaaaaaacccaccagttttaggaaagagaagggaagaggggaggattaatggttgaccagagactgttttgagtgtcaaggcactcagcttttcacagctattaaccagtacaataccccttttggttgagggaaatagactttagtttttcatcctctacttaacataaagatctttagacacctcttgttttctggttgtcacaggtgatgttagcatatgtgtaatgctttgtttgcctctggcgtgtcttttagtatttgagtttgactagccgtatagcaggactttagtggtttggatgcatagatgcaatgtattgcttttgtctgttttataattaacaattataaaataaaaggtcattccttaatttgcaaatttgttctcagaaagttctgtttgatacatgtcatactgcatggctctttaaaggtggcagtatcatgcagtacagactggaatataggataataggcttatacacttggagtagagaaggcctttttgaataggacacaaagcacaccaaaaaaaagccacagatacattattttgactgtatcaacacttaaaacttctgtaaaatgaaagataccacagacaagttaaaagaagaccatgaagtagatgtatgtatttgtgacatgtatagaattatctacaagtcaagaagaagaaaaaaagacaaccagagaagaaaattggcaaaggataagaaatacaaataaacatgaaaatgtgcttaactttatttgtaatcaagaaaagtaaaattaaaacaacagagaaaagctattttctaactattaaatcggcaaaattaaaaagcattaggccaaggatagtgaaaatagatactcatacagctggtggtgtgtaaattggaataactaatttgtaaaagcaattgtctatctctggtaaacatgaagatatcctgtgcatcctatgaaatgccaattccatcttgaggaatctaccttagaaaaactcttgcacatatatacaaggaaacacgtacaagaatgttcaacacagcccagtttattatagtgaaaacatggaaacaacctaaatgtttatcagtagggaaatatttaccattgggaactatcaaaaaggtaagtaggttccatattgttttataaaagatctccagacattgttgattaaaaaaaaaaaagatgcagaaaggatatatcagacacttaaaaacaacttaaaacatgaaaacagaacaagctcacaaactatatttctgtatttttgaaaatatgtaccccaaactgataatagttgttatctatgggaactggaattagtctttagctttatctgtattgtttgaacctttaaaaattattgtgtgtttaactagaaataaacatttttaaaaatttaaagatcataccagtactttgatttaccaatttaagcttcttaatactataaagtattaacagggaagagccagcaatttctagataatacaacgtaagatggggcactttgtaggtttttggatttttcttgttttgctttcatttttggttttgagaggtagtggggtgaatggaagaatacgggctttggagtcaaatctaagtttgaatccaagctctgccatttatttagactttgggcaggtttcttaacctctctagtttttaaaaaaattgctattacctacttcgttgggttgtataagaattacatgtgctagatttcctcatttccccattccctttggttaagggaaattggtctagtgtggtctaagatcaaagatggtctcgtatggatgacaaaatgtttcacaagaacacactatatccttggaccaggatataccagtaaagatggaggatgtaaataataaattttagaggtctattaactgtttaaaccattaagctatctatttgtacctcacaagatcaaatactagattatgttagtgatttataaatgatattgaacttgaaacttctaagcagtttacatgacaggttgttgattaacaggtttacttttttttttaaatctcagagaacattttaatttagttcagcaaacatttatttgtgccatccagcatctcaatctcaagaggcctcatagaccaaaatatgtctcaaaaggaagaaaggaaaactctatgtatttatcaatttatttatcaaactctggcaaggggggaaaaagtcaggtttaaagttgagtatatgtatatactctgcttttcacttgtactgctattgcctatgtgtgcatctgttaatatcatatatagcaattcatatgaagattttttccagtgagacttagttattctattattgggactctgtattaaataataatttttaaaaaagagtgctctaactaatgttaaggtggaaattctagacccctcaaacaaaaatttccaaataggaccccttatcatttaattgtgaaataaacaactaatgcttttatggtatttatgcttgggaagagaataaaataaatagttttggattttccccatataaattagggcctgctgagtaattagcagttaataagtgaatgcttcctacaagtttaaaggtcatacctgaaatgggtatatgatgatgtatatttttatagttatagattttatatagcccaagaatccttgaagatagtctaaacatcttggtttgatgagcagaactttcaataagggggtaaggggctaatattgtttgagcacttactatgtgccaagcactattctaagatgattacatagattattttatttaatcttcaccacagtcttctgtggtaggtactagtattgcccaattttatagaaaagggcagagagataaggtaacttatatgaagttacacagtcagtaaatgacagagctagaaatcatatccaggttcagttggctcaagaacccatattcttaaccattgcagtaaaaattgttatgctgttttaatctgtagagtcagcatgtagcaataataatataatcattaacatgttacattttgcatatattgaatgctttctaaagaagtagtttattatcagacatattcttagaatcatacccattttatagcaggattgacagtgttataaagagattacgtgatcaacatggggtgagtcaacagaaccaagaagtttctgatccacaattgccttcacttgctaggttcaagtaaggatcatatagtgtttacttacatttgccttagatttttcagtatagcatgatgaaattctaaatgcttatctcagacagtgatgctatctgagcaagacatggacaattgggcattagtgtgaattttaggacactagagcgtaggtacaggttagaaaacttaatcctcatcttgtggaagtcatggcaaagccaaagaggaaaagcctgtcttaaatgcttttccttttccaaggggcagctaaggtgcccagatatctttgccctccagggatgcaggtgtgctgttttttattctttaatcattcacataaattaaagcctattcctttgcattaaaaaaaatgtaaaatgacactctccgtgttttattgccaggcaagagctttgaacttctgtctcattgaagtttgataaactaaggattttcccgtgttgggtggtacccttaaccacagagggagcattagactgataagagctgcaggtgaaggaaaccaccagggcacggcaattagggagagcttcgcacttggctgttggctggtgtaaaactctctgcagggaggaacttttcttcttagcttcttcccttcacccacacgtaaaaagaacaccagggctttctatttctactttgcgaactaggaatggatgggatggttcttttcaagaaactttcaaatttagggacaagttctaacttcacacaaatgctgattggtatgaaggtggggggacaggacagacagacatacacacacataaattcacgtggacccaaatggaccatatctctcaggtgattttactatcaacatacattcctgcctttgtgcactgtgtaaaataaagataatttttacttccataactgattataaagtgttaatggtgaggcaacgtgttaagagaatgggttcttgtatcaggtaaaccttggttcaaatcttggcttctcttcccactagctgtgtaaattaattttgtaagtctcagttctcccacttgtaaaaatagaagtctaagaataactattataggattgtatttggaagaaatagaataaagcatgtgaaacaattagtacagtactatatctgtcacattgttgtttaataaattgtgcaagtactcaaaaatggtagctgttattatttgtaatatgaaactaaatatctgattggtagattaatgttaaacatgcatggtccaatatatttctttctttccttttttatatttttggtataaagtctattttcttgaaaattcctgctttttttttctagaaggacaaaagtactttgatttttactgctctgaaaatatttatcccgtaaaaagctttcacattaactttgagtccctggagctagggaggagaagcagcaggatttgctactaagtagagctctttcatttctaccatcaaaaagaaaaaaaaaaaaaatcctgtgctagccttaggtagagctaagtcataaaaggccatatagcctaaggaaggactctttttataagatcaggataaaccgatagaagaaaggaaggagaacacagaggtgaaaatgcagctgattttaatgtttccctggccattttccctcccaatttaatatacacctaattataattattatattttgaaaacaataccagaaattggcaggtattatctcacagcttcactcttagttttggccgtttcttaaagaaacagttttctagttggatgaactgttgagttgaggcactgattttgttttcacctctttttgggtggggttgggggtgggcagtcagggtttgcagtggtttatagttgttagttttgggaagcactcatttagatagaatgagtcacagaatgtaaacaggtcatccatctggactttaggctgctgggaacgtggtgaaaccttaggtcaccgcgatcattatggtcaaatgaagacttttgggctcaggttggcaggtaaacttacttgttttatgagcttcactagactaccaggacttcagaaatagttttttgaaataccaatatttataaattttaggtaattccatcatattttcctgaggaatgaaactgtgaaagaagtaaatgtctactttggcagcaacttcatagaattgctttttggaaggatattcatcactttggggttttttgttctcactgctccagatgaaagtatttttctgaattttttatggtaaatgtggacactgaattggaagcttctatgtaaagtttgtcaggaaacctctgtcatacctaaggataaaattcagagaaagggaagaagtatttgagtacctgacatctaagaagttctggcctatgttgtttactgagtaaactcccaataatgctttgagacaggcttttaaggaaacatgttatcaatcacgtactatgtaccaaacacatagtggtgttttacctgtattatcttatttatttctcataaccctataatgtaagtaccattattatccccattttaccatgaagaataggcttgaagaataatttgtttatggtcacataactaggaagtggcagagctgagaatggagctctcaactctctgtaatccaaagcccaggttcttaaccagtgattcttaaacttaagagtacataagaagcatcaggagtacttgttaaaaattactgggctgtagtaaaaaatgtaaggtcactaaatctgggacagtgccagactataaatctgcgttttaaacggcatcccaggggattcagatcaagaaattgattgaccatattttgagaaacatagttaaattatattgcttttcacacttgataaagaagaaaacaggtgtagactaagtaactatccaagattaagctaccaagacagagccatgattcaaactcaggtctgtctcactctaatactcatactttttattatacgcccatgattaactcacacatttccaagtcacaacaaatgcagaaaacatgacatctaataaaccaagccagatagatttcatggtcttgttatttaccaaagttaataacttatatatacaccagtacgaaaattttcatggtccttaaacctttccagtgactttttttttttttttctaatttaaattaactgagttttcttttttttctgttctgaaatgaagtctggctctgtcgcccaggctggagtgcaatggcatgatcttggctcactgcaacctccacctcccaggttcaagcaattcccctgccgcagcttcctgagtagctgggattactagctactcaggaagtagccactgcatctggctaatttttgtattattggtagagacaggttttcaccatgttgccaagctggtctcgaactcctgacctcaagtgatccacccgcctcagcctcccaaaatgctgggattacaggcctgagccactgtgcctggccagagttttctttacaatcataccatccatgcttcaagcatggaattactaactccctgggataagtttctgatgcagaaatggaaaagaatagaaggaggtagaaagaaaagaacttccaggtgtatctgctgaatggtgctaaatctcctcttcaacccacccttgtgattgagatgaagaatgaagggttgatgctaatactaacagccagtcaaatggcaattggtcatgttcacatcatctcccaatctatcctttgagactatagctcagttagggtcagcaagtttgctttgcctattccagtccactgatgaagtgtcatcagacagagccaacacctggattgccttacacatgacctcctactaggattgggatcattctttttaaaatctttctctcattttctctttctctcttgctatttgattgcagctcagcgacatgtcctcacctacatggaggatgcagtgtgccagctgctagaaaacagggaagatattagccaatatggaattgccaggttcttcactgaatagtaagtacatgaatgttgtactaatacagtgaacccagaggaggcgcttggaagcaggcaggatacttgaggaacagagcaggacaatgctgattaggtagtggcagtgaatgtttagttttggtaggttggttgtgggccgcccaaacatgttttggagcatgcctttggtgcagctagtttgtccagtgatgtctcatgaatagttttgattacagtagcttaacaactgcttgtttgatctattagatctatttctgtaggtttctcttttaactttctcctttattcaaaatattcactttgatttcctttcgctgatgttcatctagcctgttttttttcatggctggcttttctcatggaatctaggctaatgttcctctgcagttttctttctacaggatgctgtgccaatcacttaatgatttaagtgtatttctaatcagcaaagtgaagagacaacccacagaatgggagaaagtatttgcaaactacccatctgacaagggattaataaccagaatatataaggagctcaaatatctctataggaaaacatccaataatcccatcaaaaaatggacaaaagatgtgcatagacacttctcaaaacaagacatacaaatggcaaacaggcataagcaaaggtgctcaacatcattgatcatcagagaaatgcaaatcaaaactacaatgagataacatctcaccccagttacaatggcttgtatcctaaagacaggcaataacaaatgctggcgaggatgtggagaaagggaacccttctacactgttgatggggatgtaaattagtataaccactgtggagaacagtttggaggttcctcaaaaaactaggaatagggctgccatatgatccagcaattcaactgctgggtatatacccaaaagaaaggaaattagtgtatcgaataaatatcagtactcctatgtttgttacagcactgtttagagtactaagatttggaagcaatctaagtgtccatcaacagatgaatgggtaaagaaaatgtggtacatatacacaatggagtattatttggccctaagaaagaatgagatcctgtcatttgcaacaacatgaatggaactgaagatcattatgttaagtgaaataagccaggcacagaaagacaaacattggatgttctcacttgtttgtgggatgtaaaaatcaaaacaattaaactcatggacaaagagaatagaaggatggttaccagagattgggaagggtagcagggggctgggggaagaggtggggatggttgatggttacaaaaaagaaaaaaaagaatgaaaaagacctgctatttgatagcacaacagggtgactctagtcaatgataacttaattgttcattttaaaataactcaaagggtacatttagattgtttgtaacacaaaggaaaaatgcttgatggggtggataccctattctccatgatatgattagttaacattgcatgtctgtatcaaaacatattatgtgccctaaaaatatatacacctactatgtacccatgaaaattagaacttaaaaaaattttttaaaggaatatttctagagggaggatatctttcatagattatatatttgaaaggtcatacctaggccaggcatggtggctcaaacccgtaatcccagcactttgggaggctgaggtgggcagatcatgaggtcaggagttggagaccagcctgaccaacatgttgaaaccccatctctactaaaaatacaaaaatcagccaggcatggtggcacgcacctgtaatcccagctactagggaggctgaggcaggagaatcgcttgaacccagtaggcagaggtggcagtgagccaagatggtgccactgcactccagcctggccaacagagagagactccgtctcaaaaaaaaaaacaggtcatacttctttataaagtatacttagaatgtgtaaaagtcaaaatgattactaccttttttatttttctgagatagaattttactctgttgttaaggctggagtacagtggcatcatcatggctcattgtagccttgaactcctgggttcaaggaatcctcctgcctcagcctccccagtagctgggactacaggtatgtactatcatgctcagctaaatttaaaatttatcttttgtagagacagggtttcagtatgttgaccaggctggttttgaactgcaggcctcaagtaatcctctcaccttggcctctcaaagtgttgggattgtaggcatgagccaccatgcccaactgattaccactttttgaatatcacagaactgtttttaggctgaatgagataaacactttaaaaacacattaatattctttttcttccaacttttattttagatacagggaatacatgtgcaggtttgttacatgggtacattgcacccaggtagtgagcatagtacccaataggtagtttttgacccattacccctctcccttctcccctctagcagtccacagtgtctgttgctcccatgttcatgtccatgaatgctcaatgtttagctcccacttataagtgagaacatgtggtatttggttttctgtacctacattaattcacttaggattatggcctctagctccatccatgttgctacaaaggacatgatttcattcttttttatggctgcatagtactccatggtatatatgtaccatattttctttatccagttcaccttgatgggcacctaggttgactccatgtctttgctattgtgaatagtgcagcaatgaatgtacgagtgcatggggagaatgatgtattttcctttggcatacccactaatgaatgggactgctgagtcaaattgtagctctgttttaagttctttgagaaatctccaaactcatttccacagtagctgaattaatttacattcccaccaacagtgtataagcatcctcttttctcagcagccttgccagcatctgtgttttttcttttttgactttttaataatagtcattctgactggcatgagatggtatctcactgtggttttgatttgcatttctctgatgatgagtgataatgagcattttttcatatgtttcttggccacttatatatcttcttttgagaaaatgtctgttcatgtcctttgaccatttttaaatggggttatttcgtttttgcttcttaagttccttatagattctggatattagacctttgttggatgcatagtttgtgaatattttttcccattctgtaggttgtctattgatagtttcttttgctgtgcagaagctttttagtttaattaggtcccacttgtcagtttttgtttttgttgcaattgcttttggggacttggccaagaattatttgccaaggctgatgttgagaaggatatttcctaggttttcttctaggatttttatagtttgagatcttacatttaaatctttaatctatcttgaattaatttttgtatatagtgaaaggtaagggtccagtttcattcttctgcatatggctagccagttatcccagcaccatttattaaacagggagtcctttccccagtgcttgtttttgtcagccttgtcaaagataagattgttttaagtgtgtgctttatttttgagttttctgtactttccattggtctatgtttctgtttttgtaccggtaccatgcaaaacgcaatcttcatgaaaggatgtgctagagaaatacatatgccatcacatatttatataatcgtttggattctctttccttttcttctggtttttgggaacattctaagaaaggaagagtaatccttataggcttccatttaagtgaatcttgaactcaagttcatctttcttgaacatagtttttttttttttttttcctttctgttctccagaggctccttggagatcagacagctattcaaatggcctcaccttgggtttctgttaggggaatacttgagattccctagctcttttgctgaactctaaagttcttttcaatgaaatctagattttttatggattggcatttaggttcgttggaaaaagaagctttctgggagtaaagttgttcctttcacccagtcttctaaaggaggatgaagtagagaaaggaattttatttgttctcatgatgtgggctggagcaaatgaggtgggcagggaataaagactgagattgaatagccttgcttgcttttacagaacagacaagtgaactgacaagcctacgggtcaagtttctataccatttaatctgtaccagcactcttgaggctccttgccaagtgaaatatgactcttctgggggtaatgcttcttcctggcttttttcattttactcccctccccatctctgttacaagtcttttccctattacactggttgcttgaaggtaggcatcatttaaatttttttttgaggcagagtctccctctgttgcccaggccggagtgcagtggtgcaatcttggctcactgcaacctccgtctcccgggttcaagagattctcccgcctcagcctcccgagtagctgggattacaggcacccgccaccatacctggctaatttttgtatttttactagagacggggtttcaccgtgttagccaggcttgtcttgaactcctggcctcaagtgatctgcccgccttggcatcccaaagtgttgggattataggtgtgagccatttgtgcccggcctcatttattcttcatctttgcattcctggtacttggcatgatgctttgcatataatagatgttagctaaatatttattgaatcaacagcagtatctatattttaagttattgaatactatctactcttctagattttgttataataaggactactttcttgttttttcctccctttctttttttattttttttatttattattattttttattatactttaagttctagggtatatgtgcacaacatggaggtttgttacatatgtatacatgtgccatgttggtgtgctgcacccattaacttgtcatttacattgggtatatctactaatgctatcccttccccctccccccaccccaagacaggccccagtgtgtgatgtttcccatcctgtgtccaagtgttttcattgttcaatgcccacctatgagtgagaacatgcggtgtttggttttctctccttgtgacagtttgctcagagtgatggtttccagcttcatccatgtccctacaaaggacatgatctcatccttttttatggctgcatagtattccatggtgtatatgtgcccattttcttaacccagtctatcattgatggacatttgggttggttccaagtctttgctatcgtgaatagtgccacaataaacatacatgtgcatgtgtctttatagcagcatgatttataatcctttgggtatatacccagtaatgggatggctgggtcaaatggtatttctagttctagatccttgaggaatcgccacactgtcttccataatggttgaactagtttacagtcccaccaacagtgtaaaaatgttcctatttctccacatcctctccagcacctgttgtttcctgactttttaatgatcaccattctaactggtgtgaaatggtatctcattgtggttttgatttgcgttctctgatggccagtgatgatgagcattttttcatgtgtctgttggctgcataaatgtcttcttttgagaagtatctgttcgtatcctttgcccactttttgatggggttgtttgattttttcttgtaaatttgttgaagttctttgtagattctggatagtagccctttgtcagatgggtagattgcagaaattttctcccattctgtaggttgcctgttcactctgatggtagtttcttttgcagtgcagaagctctttagtttaattataccccatttctcagttttggcttttgttgccattgcttttggtgttttagacgtgaagaagtccttgcccatgcctgtcctgaatggtattgcctaggttttcttttcttttcttttctttttttttttgcctaggttttcttctagggtttttatggttttaggtctgacatttaagtctttaattcatcttgaattaatttttgtataaggtgtaaggaagggatccagtttcagctttctacatatggctagccagttttcccagaaccatttattaaatagggaatcctttccccatttcttgtttttgtcaggtttgtcaaagatcagatggttgtagatgtgtggtattatttctgagggctctgttctgttccattggtctatatctctgttttggtaccagtaccatgctgttttggttactgtagccttgtagtatagtttgaagtcagatagcatgatgtctccagctttgttcttttggcttaggattgtcttggaaatgagggctcttttttggttccatatgtactttaaagtagttttttccagttctgtgaagaaagtcattggtagcttgatggggatggcattgaatctataaattaccttgggcagtatggccattttcacgatattgattcttcccatccatgagcatggaatgttcttccttttgtttgtgtcctcttttatttcgttgagcagtggtttgtaattctccttgaagaggtccttcacatcccttgtaagttggattcctgggtattttattctctttgaagtaattgtgaatgggcgttcactcatgattttgctctcagtttgtctgttattggtgtataggaatgcttgtgatttttgcacattgattttgtatcctgagactttgctgaagttgcttatcagcttaaggagattttgggctgagatgatggggttttctaaatatataatcatgtcatctgcaaagagggacaatttgacttcctcttttcctaattgaataccctttatttccttctcctgcctaattgccctggccagaacttccaacactatgttgaataggagtggtgagagagggcatccctgtcttgtgccagttttcaaagggaatgcttccagcttttgcccattcagtatgatattggctgtgggattgtcataaatagctcattattttgagatacaccccgtcaatacctgatttattgagagtttttagcaggaagggctgttgaattttgtcaaaggccttttctgcatctgttgagataatcatgtggtttttgtctttggttctgtttatatgatggattacatttattgatttgtgtatgttgaaccagtcttgcatcccagggatgaagcccacttgatcatggtggataagctttttgatgtactgctggattcggtttgccagtattttattgaggatttttgcatcgatgttcatcagggatattggtctaaaattctctttttttgttatgtctctgccaggctttggtatcaggatgatgctggcctcataaaatgagttagggaggattccctctttttctattgattggaatagtttcagaaggaatagtaccagctcctctttgtacctctggtagaattcagctgtgaatccatctggtcctggactttttttggttggtaggctattaattattgccttaatttcagagcctgttattggtctactcagggattcaacttcttcctggtttagtcttgggagagtgtatgtgtccaggaatttatccatttcttctagattttctagtttatttgcgtagaggtgtttatagcattctctgatggtagtttgtatttctgtgggatcagtggtaatatcccctttatcattttttattgcgtctatttgattcttctctcttttcttctttattagtcttgctagtggtctatcaattttgttgatcttttcaaaaaaccagctcctggattcattgattttttgaaagtttttttgtgtctctatctccttcagttctgctctgatcttagttatttcttgccttctgctagcttttgaatttgtttgctcttgcttctttagttcttttaattgtgatgttagggtgtcagttttagatctttcctgctttcccttgtgggcatttagtgctatcaatttccctctacacactgctttaaatgtgtcccagagattctggtatgttgtgtctttgttctcattggtttcaaagaacatctttatttctgccttcatttcattatgtacccagtagtcattcaggagcaagttgttcagtttccatgtagttgattggttttgagagagtttcttcatgctgagttctagtttgattgcactgtggtctgagagacagtttgttataatttctggtgttttacatttgctgaggagtgctttactaccaactatgtggtcaattttggaataagtgcgatgtggtgctgagtagaatgtatattctgttgatatggggtggagagttctgtagatgtctactaggtctgcttggtgcagagctgagttcaattcctggatatccttgttaactttctgtctcgttgatctgtcatatgttgacagtggggtgttaaagtctcccattattattgtgtgggagtctaagtctctttgtaggtctctaaggacttgctttatgaatctgggtgctcctgtattgggtgcgtatatatttaggatagttagctcttcttgttgaattgatccctttaccattatgtaatggccttctttgtctcttttgatctttgttggtttaaagtctgtttaatcaaagactaggattgcaacccctgcttttttttgttttccatttgcatggtagatcttcctccatccctttattttgagcctatgtgtgtctctgcatgtgagatgggtctcctgaatatagcacactgatgggtcttgactctttatccaatttgccagtctgtgtcttttaactggagcatttagcccatttacatttaaggttaatattgttttttattttattttatttttttttttgagacggagtttcgctctgtcgcccaggctggagtgcagtggtgcaatctcgactcactgcaagctccgcctcccgggttcacgccattctcctgcctcagcctcccgtctagctgggactacaggcacgcgccaccatgcccggctaatttttgtatttttagtagagacggggtttcaccatgttagccaggatggtctcgatctcctgacctcgtgatccgcccgtctcggtctcccaaagttaaggttaatattgttaatgtgtgaatttgatcctgtcattatgatgttagctgattattttgctctttagttgatgcagtttcttcctagcattgatggtctttacaatttggcatgtttttgcagtggctggtactggtttttcctttccacgtttagtgcttccttcaggggctcgcctggtggtgataaaatctctcagcatttgcttgtctgtaaaggattttatttctccttcacttatgaagcttagtttgactgggtatgaaattctgggttgaaaattcttttctttaagaatgttgaatattggcccccactctcttctggcttgtagagtttctgccaagagatctgctgttagtctgatgggcttccctttgcgggtaacccgacctttccctctggctgtccttaacattttttccttcatttcagctttgatgaatctgacaattttgtgtcttggagttgctcttctcgaggagtatctttgtggtgttctctgtatttcctgaatttgaatgttggctttcctcgctaggttggggaagttctcctggataatatcctgaagagtgttttccaacttggttctgttctccgcattactttcaggtacaccaatcagatgtagatttggtcttttcacatagtcccatatttcttggaggctttgttcgtttctttttactcttttttctctaaacttctcttcttgcttcatttcattcatttgatcttcaatcactcttacccttttttccagttgatcaaatcggctactgaagcttgtgtgtgtgtcacatagttcttgtgccatggttttcagctccatcaggtcatttaaggtcttttctacactggttattctagttagccattcgtctaatcatttttcaaggtttttagcttctttgcgatggattcggacatcctcctttagctcggagaagtttgttattacctatcgtctgaagccttcttctctcaactcgtcaaagtcgttctccgtccagctttcctctgttgctggcgaggatctgcgtttctttggagaaaaggcactctgatttttagaattttcagcttttctgctctggtttctccccatctttgtggttttatctacctttggtctttgatgatggtgacgtacagatggggttttggtgtggatgccctttctgtttgttagttttccttctaacagacaggaccctcagctgcaggtctgttggagtttgttggaggtccactccagaccctgtttgcctgggtatcaccagcggaggctgcagaaccgcaaatattgcagaggagcaaatgtagttgcctgatcgttcctctggaagctttgtctcagaggggcacccagccgtatgaagtgtcagtcggcccctactgggaggtgcttaccagttaggctactcgggggtcagggacccacttgaggaggcagtctttccattctcagatctcaaactccgtgctgggagatccattaccctcttcaaagctccgttggaaatgcggaaatcacccgtcttctgcgtcgctcacgctgggagctgtagactggagctgttcctattcggccatcttggaacctccccttttcctccctttcttgattctttgtggtaaagctctatattgtgccattttagaagctgtatactgtgcgccttgcactccaaaagtgaattccacttgttctgtgtagccaatgctgagctgtagtgaaccaacagtaaggctgactgtaggcagcttttatctaccaacacactgttgaaaaaaaatcgtaagattttctacagtgctgatagaaatgtacttgccaagcaggctgtttcttgtccccagaaagctgaaatttacataatatacgagtgacacatacctgacacttccataagtctatgacaccagattggcttgaggtaaattattctaagaagtgaaaagtaaaccagctccagaaacttttgggttttctttttttttgaagacctgaaaggtgtggatgtatgacagaatgggaaatagtgtaagtataatttggtagacaaggagacctggatgatggaagctcctgagtttactttgtgaatttgatttagttagtgaaaatccttcactttcaggcttcagtttttttgttttgtttttttttgttttttgagatggagtcttgctctgtcgcccaggctggggtgcagtggcgcgatctcggctcaccgcaagctccgcctctcaggttcacgacattctcccgcctcagcctcccgagtatctgggactacaggtgcccgccacatgcccggctaatttttgttttttgtatttttagtagagagggggcttcaccgtgttagccaggatggtctcgatttcctgaccttgtgatccgcctgcctcggccttccaaagtgctgggattacaggtgtgagccaccgcgcctggcctcaggcttcagttttgtattgattaataagagaaacatagtgaagtggaaagagcactaccctagaaggaaaaagagctgcttattcttctaagtcctcactctataaccctgggcaaatttctgaaatatgggcttcagttgcctcatctatgaagtgggtttaataaagccttacatgataataataataatataataattatatattataatatgcagtttttactaaactaataccatgtctcagctactacaattctttgagatgggtactattattattgttatctctgttttatagaggaggaagtggatgctcagaaagattaaaatagcttcttcaagttcacaagctgttaagtgacagactcaggaatcaagcctcatctgcagtattatagagtccactgttctctactgcctccaagccactttactgcttaatgttgctagagggctaaccagatcatatttggaggtttcttctagctataatttctactatttttgaattctcccttatgaactatactttgcaagcttatcacacagccttagctggtgacctcagtttactgccatttaaatgtttaatatggccttttgggggatgcaactagagctgactataaagagcaggaagcatgattttcaaaaatatgttaacggtatccttccatcttacagtttcgagttcacatcttgagactttcatatatttagccgtgggtgatttacctttaaacagtgataaaagtactccttgaaattgtatttggaaggcttctcttctgattttcttctctgggtctgcttgccctctcacctatgctgtctgtcactccttggttgttggtgttttcaaacaagtccatgactgttccagcaaatctggataaactgtaaaacacaagtggctgaacagtactttgtgtatgtctgcaagaccatgagctctgtagatcatattcctctggacactcttgaaagacggatactaaatcccagaggattttcttttatgttgtatgtaacctctacctctgaatgttgtccttcaaccagtggaaggtaaaagaaattaatatttagaggtgctactctaagaataggccaaatgtcagcactgggtcaggacctctgaagaaatacatccaagaaaatgggcgagagtagctctaacttagaaaccacagcagagtgtgaccagattcttgtggtaaagataaaatgagaaatgtggctttttgagacattggaaaataatgatgagagaaaaacaggatgaaatctgagaatttgtatcagaattgggaaccattcttcacaggctaaattgatagttccaacactatggcatcagggagcttgacttccacatactaatatagaaaagaataatattctgtggtcttggttggtgggcccaggagagctcgcttttatgatcaagtgtcttgttttcgttttttaaaggatgattttagttttttggtgaagtttttatgatgactgttttggttgcaagggaaagaagtacacagactacctttggtttattttaaggatacgtgagaatatgcagcattcatttgtgaattattcattcacaaattacttttgggcacctactctgtgcctgtgtgtactatgcaatgggaatagagcagtgagcaagacaaataaggtacctatctttatgaacctagtgttttaatgagggtaataatcaataaacaagcaaactgatggggatgagaatagctaatagttaataagcactgtgtgctaggcactgttctaagcatataatatccattattttatttaatcttcacagttctatataaacagggtattagtattatcctcattttactcataaggaaattcaggctataaaagtaacattctcatggttacatagctggtaactgtaacaagacaaataacaagaaaacagccagagtaaggtaatatatagtatggacagggaagtcctcttggaagagatgacgattgagagctcatcccatcagagagccaataacttagctcagagggtgatgcaccttttctttgtccaccttgattatctaagtaagcttcctgtgtccaaaaatgatcatttgattgattttatttgttgctactgagaatggagtacccttactaggcagtgttcttaggaccccctcatgggtaactggcctccctcatgctctgctcctatttaaccagtgaaagtaaataaaataattcatcatcaaaagtatttgtgttctacactacatagtataaatatggagatggaaatctttgtcagtttttagaaaaggagcattaataatttcattttgatacatgttaatcatcagaattaattttgattcaaataaatccataaaatatgaacttcattaattcatccttggagaaaaaaagagattccaatagtgcatacccgttttttttttcttttttcttttcttttactttaagttctgggatacatgtgtagaacgtgcaggtttgttacataggtaatagtgcatattcctaaataacttaaaacgtaactctaatgaaaacaatccatgattataaaatatgtatcatttcttgttattttttttttcagacaggtgctttaagccctatgaaaagatgacccacttctttcctacataatctataacaatcagggcataaacattcattctaaaggtgacagattttttaaggatcattcaccatctagagtttaaataatgttgtttggggttcttcttgtgtccatggtaacagaggagcaggtgtgaggcaacaagaagcacatcagaacaaaccaagacttcgctgatttccagcttgtagctctgaatgagagatggacttgagacttctttgggccatttctgctcatgttttctctacttatttacgttaaattgagccaaaatgtggtgtggtaaagtaatggtgactaatcctattatagacttcttcaaaaggggtaatgcttccccctttacccaccccctcccctgacttttttccatagttcagttcttagctgttaaacattgtaacagaaaattacccgtttctcattgtcagcatctggtttcccacagactcagataattgtcaggaagagatttgccttcagttaaagcaaccctatccccactgttactaggccaggcacctctgttagaccatcatagaaccaaatctatagaggattctttctggctcttttctgtattactagaggtatgctatagcaaaaagactacagggagccatggtggtgagttaagagtcaaaatctgttttgaaacttaaaaatccagggtcattgaggatgcaagaagttgcctgtttttgtagaatccatctcacttcttcagtccctttgtattatggttacaggaaactatccagcagcacttgacctggtaatggaggaagctatttcacagcccactggtcccttgactcgtttagaagtcagagtcaaaggttacagaagtaataattgggcccagattctccctgtcaggaaagaccttgttccccccaccccaccccctgccttctacaagttaagagaaacttatctgttataaaaccattcaataagaggaaatgaagaaacaccatccttggctgaagtgttctcaagccccaatgatactatttctgttttcatgggagctgcttttgcagctagctagtataaaatttaggtctgattttttacattaaaatatctccccttagataaataacttgatttatttcaatctataaataatatgaaggatctttatttggtccaagccctgatattccttcacaccaccactctgataattccctgaatacttgtctggcaatcaagtacactcacacgagtcttaattaacaagtgttatgccattagcaatgtaaagtcagtcatcaaaagttaagaaactaggccagattataggctcacacctataatcccagcactttgggaagccaaggtgggaaaatcacttgaggccaggagtttgaggccatcctgggcaacacaatgagacccctgtctctacaagaagaataagaagtttaaaaagctttacttcaccagcaacagaacaatttaaaattttcagtgcttttaatttcttccataatttgctcagaactctagcagatcaatctgtggtgccattggcacaggcttggcactggagtaggaaagaatgacacaatttggcacctttaaccagaagatctttaatgagctggcgtgggggtggaggggacagagaggaaggaaggacagttaggattttggcagtaacacaaaggttcttcttccctgagaaaagtgaaatgaaagtcaaatgaagcttcactctgcttttagaatttgctaagatgtttgtctgtctctcagctcccggcccccttgcaggtgcatcattatagtcagtgacttctccaaaaaacaaattgtctctcaggatccttcaggaggggtcatatctaaccaatttcttgtctgaggacataattgtgattcccttcttcaactatcagatgcaatgctaccagcactgcagaaactgtcttatcagaaagtggcacaaatgtgtacatttcttctaggtcacagttctagtattgctgagttctggggctgcaacaatagataatactacaatgagagatgtttgggaaaagcattgtttcctgggtggccgtagaagcagacttgaaatcatccctttgtcattaaataatatcaacaacaaatgtctttgttgatgtcattgtattgtaattttctaggtctagattattgctagggatgataatacctatcttctagggttgttatgcaaatcacatgaaattacacatgcaagatgtctggctatatataattcatcttcattgtgtgttgttctccttaagctccacttttctgggatttttgtatctctgtggatctggatagtcttccttttctctctctttaaatggcatcagagttgaagatcttgaggactttttagtctctcttttgttttttgttgttgttgttgttactggtttgtttttgtttttgtttttttgtttttgttttttttttttgagatagtgtctcactctgtcacccaggctggagttgtagcacaaacatggctcattgcagccttaacctgggctcaagcaatcctcctgcctcagcttcccatgtagccatgaccacaggtgcgtgccaccatacccagctaacttttttttttcttttttatagagacgggtctcattttattgctcaaactggtcttgaactcctgggctcatgttatgctcctgcctcagcctcccaaaatgctagaattacaggtgtgcgccactgtacctggcctctcttactttctataacacttctttcttgccctgtattttgtgtacgtttttggagactaaaacattcaatgattgcctgcatgactcttaaccacttcactcatcatttagttcattcacagaatagcctaagaaagcttttctatctttgttttctttgcatatgccattttctcacttcctgtctttaccccctttcctctagatacagaattttaaaactcaaggtgtagtgggagacttgagtcagtcaactctatccaacttgtgttgttcccactcttagctctagcagtacagtgatgggctcagggtaatgaaaagcagactttctctgctgaggtcattgctcctcatgctggcagcctgctccaggaagctgtttatctatgcttgcagagccaagctccagcctctgaacagttggaatgtattgagaaaccacagagcccaaagagagaacattacacaggcagttccaggcagggagagtatatttacaccagacaaactgcagcttacatgtgtggggataattgttcatctgcacactctcatactttaccttctatgcaatctatataccctctcaagaaggtttaaccaggagaacttgtactgctatgtccaaattaccctgaacatcccctaaaatgtcataaggaaaaagagatactacagaaaattgatgtaaaaactttttaagatagtggtttttttgtttttctgagtcaaattttatgtttagaatcttagaccatgtaagcctgatcactaaagcattcaaaaacactgtttcttgcatggaaatgtttttcttcatccctttacaaaaatattaagtattgttatagagcttcaaatgtgctctatattaataggaatataagatatggtcacttccctgtaagatgtaatctggttaaagaggtaaaactcattgaataacgaacaattacagagcaatacaagaccttatataatggcattaagttatatggcccagtacactgagaattgagagtaaggaaaaataatggctattagttaagtaaaattagttgagtcttatagaggagtttgtcttaattttggaaaggaaggtagagtttggataaacaaaacagaaaggagacatattttgcaacatgaaagcaccataacatagtggttaagaacatggactttggaatcagataggtctatgttagagggcctgccactttctggtatgagatcttgggcagattgcttacctcatctataaaatagggagactcatatataaaatataaaattccatgttacataattgttggaatgattaaatgagttaatgaaagtaaagtgcttggcatttcacttaagatacaataagtgttgaattaattagtagctactgctactactgttgttcactcattcattcaatatatatttattgagtgcctacgtcttagcgttctagatactagggatatagcagtgaaaaaaacagaccagaaatttcaactcttatggagcttccattctgaaattgttttcattttacctttttagaatgtgtgtgaataattttggacttacataaagtttaaaaaaatctatatatggagttcccacatccatttcatacagcttctactaatgttaacatttcctgtatccataatataactgccaaaatcaagaacttaacattaattcaaaactattaactaatctatacgtcttatttacattttcacctcatttttgaagggcagtttttttcctgagataaattctaggttggcagctgttttaccattccattatcttttggtttctactgactttgttgagaagttgctctcagttttattcttgcttctttgaaaataatctttttttaaatctctggatggtttttggatatttctacttggtctttggtttttgatagttttagtgtaatgtgtctagttttgcttttctttatatttaaactattcggtgttcttagtgcttcttgaacctatagcttgatatcatttatcagtcctggaaaactctcaataattagctcttcaaatttacttctgttctactctctctctgtctctgtctcttttttttttttgaggcaggatctctgtctgtcacccaggttggagtgcagtggtgcagtcatggctcactgcagcctctacctcctgggctcaggcaatcctcttgcctcactcagcctcccaagtggctgggaccacagttgcacgccaccacactcagctaatttttttttttttttttttagagatagggtcttgccatcttgcccagactggtctcaaactcctgggctcaagtgatcctcctgcctcgccctcccaaagtgctgggattacagacatgagccaacacgactggcctctaccctctctttactcctattgggattctaattacacaaacattagaccttttcatagtattctctgtctcttatgctcttttttgcattttctatcattttgtgtggttttttttttttttttttttttgagacagagtctcactctgtcacccaggctggagtgcagtagcactatcttggctcactgcaacccaggtttgcctcccaggttcaacccactctgccttcctggttcaagtgattcttctgcctcagcctcctgagtagctgggattacaggcgcccaccaccgtggctggctaatttgtgtttttagtagagatggggtttcaccatgttgggcaggctggtctcaaactcctgacctcaaatgatctgcctgcctcggcctcccaaagtgctggaattacagtcatgagccaccatgcccagcccatcattttgtagtttatgctttattctggatattttcttctgatctattttccaggtcattaattctctcttcatttctgtgtaatttactattaaacccatctactgagttcttaattctaattattgtatttttttagttcaagtatttttattcagtttttgtttgtttccttgctaaatcttgtctttcatttgcttgaacatagtaaataaagcatggttattacaaagtccataatttattgtctggataccctgtgggtctgtttctgttttctgtcctatccattttttttttactccattatcttatcttgtgttatacttttttttttctctagttgagttatgtaaattgtgtatgagttatgtaaattgaaaaactatacagataatgtgaggcccagaatgatgttatctttcttcggaggggatttatatttgcttttggcagatggcctgggcactagcaatcctggattacctcaatcccatgagggtttgaaaggatttgaatatagatttacatctcagggagggctgattttcagtatagctctgaggagtgccaaaagagctttagggtttaccagagtcccagcccccaacgtgggtgggtcctgaactctattttttttttcttttctttttgagactgagtctcactctgtcgcccaggctggagtgcagtggaatgatcttggctcactgcaacctctgcctcccgggttcaagtgattctcctgcctcagcctcccaagtagctgggattacaggcctgcgccaccatgccaggctaattttttgtttttagtagagacggggtttcaccgtgctggccaggctggtctcgaactcctgacctggtgatctgcccgccttggcctctcaaagtgctgggattacaggtgtgagccaccgcgcccagccaactctgattttttatctgcaagccctaacagtcatttgaaaactcaggaacttaacattaattcaaaattattaactgcttagtgtatcagttgaatcttccagaactggcagaggcccctagagctaccagtgatataataataccttatttctgaagtggtgataagtataaatgatattgtgagatatctggtatgacagtaatgttatatgaaaatatctgaggtttctttttttttattttaaagttttttgtaaagatttggtcttgctatattgcccaggctactctcaaactccagtcctcaagtcatcctcctgcctcagcctcctaaagtgctgggattacaggtgtgaaccactgtgcctagccaatatctgagatttctattattgaaagagtcacaggtactgttaattctgctatgcttatattcataatagaaggaaatgccaaattccagttagaggttagtaaaaataaacataaaaatttccctggctcatgcctcccagcactttgggaggctgagcaagcagatcacaaggtcaggagatcgagaccatcctggctaacacggtgaaaccccgtctctactaaaaatacaaaaaaattagctgggcgtagtggcaggctcctgtagtcccagcttctcaggaggctgaggcaggagaatgccaggaacccaggaggtggaacttgcagtgagccaagatcacaccactgcactccagcctgggcaacagagcaagactccatctaaaaaaaaaaaaaaaaatttccctatccaagtgtgtggatctcttgaatttaatccatggacccttctgtttagaaaccctacacattgggaaaagtggcactaaatgctcagctcacctttctcggttttattctctcataacttggccttgtcattcttcatttgccttggtggctctctgatgacttcagacaattgtctttaataatttatccatttttttctcagccagaagagttagtctgaattacctactctacttttattggaggaagaactcttttaaaacttgcattctgatggaacatattaataattagttgaagtagaaaatatcatacactgcaagggatcataaaggaatctaatttgactcatggaggactagtacaaggtaaaaagcaacaaacagaaaatatataatgaggatagggccagtttgtggaaggctcaattatattgaaataagtagaaaggtaaaatggctgagtgtggtggctcatgcctgtaatcccagcactttgggaggccaaggcgggagcatcagctggggtcaggagctcgagaccagtccggccaacatggtgaaaccccatttctactaaaaatagaaaaattaactgggtgtggtggcaggcgcctgtaatcccagccacttgggaggctgaggcagaagaattgcttgaacctgggaggcagaggttgcagggaggttgcagtgacccaagatcgcactactgcactctagcatgggcaacagagtgacagagtaagactctgtctcaaaaagaaaaaaaaaaggaagaggaagaaaggcaaagacagtacctcataaatgctgagaaactcattgtttggtcttctttcaatttttaaaattcagtaactatttattaaatagttatcatatgccaatcactgtgtgtcagatatggtcctcaagaaattcactgtcatgtaaaaattagatagtgacacaaatacaattaaaatagagcattagaagttctggactagtgagtaaactttgacaggaaaagtgattatttatacggtcaggaaagaattcacagaatagtgacattaatttagttttaaagaatgtgtagataattatcagacagagaagagagaatggaactccgggaagcgaagactacttgggaaaggagtggaaataaaaagtagatcccaagtttagtgtgccttggcaaaaagaggaaagtggatgggaatggagatcatgttgagaaatgaaattcctcaaaagagtgggaccagcttttcttcaaagagtctcactttatacaaattccgtagcagtaaatgttcttggccgaagcaacggaatctgtctctggctatcttaagcaaagagactggagtggaaagatgtgtcagttgcagtagctgcttatggatcagactgttgtggtgagacctttgcctagtttcctgatgctcagcctccaaagctcctttgattcctgtctgtttttcaagtctgatggttcagccacctgtggattttgtgagccactaataatacccttccagcagagcccttttttgcttaagatagtgagacttggtttctgttgcttgcaaccaagaaccctattactgttattaatttttttggtacattcttgagtcatttaggaatgtattagttaccagatgaaactgaattctcataaatgttatttggtagtgacttttactttgtagggaaaaagaggtatgattggactgttattcttatttacaggtaatatttagattttgtttgatgttaacactgtccctggtaaatttttttttcttctctcaagcttcagtgtgattccccaggaaaatcttggaaattgccaatagagaagatgtattactaagtatcagaagttttcttggaaggacatctaataagtttcccaagatgtgattctgcctgttcagtagttgcttgagtgctgatgaaattccccccaaacacttcctaatatattattgaaatatttgagataaaggaaagctgaacatattaaaactaatttttaagtggtgagagaagtggaattgaagtctatttgaggaatttgaaacatttatcacccacggtttttccaaaaatatacatttgtgtcagtctgtcaaactttttatcaaaaaaaactgtgaattatccatttaaaatacatttttattacattttcttctgtatctgagaaatatgccagatggtagaaatttcctagaagtctctgacacttacagattgaaagatgaatgacgagaagacaagaatttgggtatccagattaatagatagaactttacaactattgacttcttatttgctcttgttgagttttgaaaaggaattaggcaaggtagatgaaaatagagattcttctcccttcagtacccatgtgatttaacacagccatagaaggctccaagttttggggtgtgggcacaatttcaaagatatatttctattaagcttcttgagagtgatatgaagaagaaacgaagtatagagtctctcagatgcaaaaatcacttagaggtaggccatgtatccatccttatcacacttcactttttccaagaactacgactggcttgtcttttatggctttttaagaatctaacttcattgtgtaatcagcttatttcctctccattattaatgccctaattggcaggttttctgacccattttcttttctgtgatgctcttctagatgtctaaacttttcatatcacaacatggatttaggtagtttttcagtaataaaagttggtgtgaatatgcagtagtatgtggattaattaacatacatttaacaaatgtttattgaaggcctactgcaccctagacatgtaataaataaataaacaaataaattagtaaggtagcttcagatagtgataaattctattaagaaaatcaggagccggacatgatggctcgtgcctataatctcagcgacttgggaggctgaagcgggaggattgattgaggccaggagttcaagaccaacctgggcaacttagcagtacctcgtttaaaaaaaaaaaaaaaattagccaggcttagtggcacacacctatagtcccagctactcagggggctgaggcaagaggattgcttcagcccagtgaactgtgatcatcccactgcactccaacctgggcaacagagtgagactgtgtctccaaaaaaaggaaataaaggagggctttgggatactgaatgactgggagatggaaatctactttcaatagtgtagtcagagaaggcctcactgaggctttctattgccattgctattttagatacttgcttaaagaaagagaggtggtcttttaaaaagtatattcttgattaagataatggagagagaagaggaagaaaaaagggatattacaacctgtagctgtataggggaaaggaagagaaaaaagataggggataggggatagcaaagcaaactttatttgctttgtagatagctgtataggggaaaggaagagaaaaaagaaaaagagaagcttgaactttattatttgctttgtaaataatttgtgaccattgacttccatttcaaggatataataatgataggaattggctggcaggtacgactggattcacgatgggagccctttctttaaattatgccactaggtcttctctgaggtgccttctatataaatcaggattcataatctccctgattttacaggagccaggaactgagtcttcttttctttctatctctcataggaataaaagggggaaatgaacatttttttatactaccgaggtcaggtatccttgggtctaatgttaaacttaaaacagaaatttctgagagagcccttttatcctttgttatttagaaaatacttgaccctcctgtgcccttgctgtattggtgcgagacagaatggttatatatatattttattatataaataataactatatataataatatgttattatataaataataacatatatattttattatataaataacatataatcatatattattatataaataacatatataatcatatagcatatataaccatatgtagttatatataaatggttattatatataacatatataaccatatgtagttatatataaatggttatatatatatatttatttatttattgttgttgttttgttttgttttaagttccagggtacatgtacaggatatgcaggtttgttacatagataaacatgtgtgccatggtgatttgctgcatctctcaacccatcacctaggtattaagcccagcatgcaatagctatttttcctaatattctccctcctgcacccctcctaacagaccccagtgtatgttgttcccatccccatgtccatgttttctcactgttcatctcccacttgtaagtgagaacatgcagtgtttggttttctgtttctgtgttagtttgctgaggataatggcttccagctccatccatgtccctgcaaaggacatgacctcattcctttttatggctgcatagtattctatggtgtatatgtaccacattttctttatgcagtctatcattgatgggcatttgggttgattctatgtctttgctattgtgaatgaacatatgcatgcatgtatctttacaatagaataatttatattcctttgggtgtatacccggtaatgggattgctgagtcaaatggtatttctggttctaggtctttgaggaatcatcacactatcttccacaatggttgaactaatttacattcccaccaacagtgtaaaagtgttcatatttcttcacagccttgccagcatctgttgttttttgactttgtaataatagccaggtgcagtagctcacacccataatcctaacactttgggaggccaaggtgggtggattgtttgagcccaggagtttgagaccagcctgggcaacatgacaaaaccccatctctacaaaaaaatacaacaaaattagccatgcatggcagtgcacacctgtagtcccagctacttggtatggcttgagcccagaaggtcaaggctgcaattagccatgagtatgccattgtactccagcctgagtgacacagtgagacccccatgaaaagaaagagagaaagagaaaaagaaaggaaaaagaaagaaggaaggaaggaagaaaggaaggaaggagagaaagaaagagaaaagaaaggaaggagggaggaagaaagagagaagagaaagaaagagtaaaagagagaaagaaacagaaaagaaagagaaaggaaggaagaaagaaaaaaagaaagaaaaagaaaaaaaaaagagagaaaggaaagaaagaaagcctggcgcggtggctcatgcttgtaatcccagcactttgggagactgaggtgggtggatcaccgatcacctaagttgggaatttgagatcagcctgaccaacgcggaaaaaccccatctctactaaaaatacaaaattagccaggcgtggtggtgcatgactataatcccagctattcgggaggctgaggcaggagaatcacacttggacccgggaggcagaggttgtggtgagcagagatcacaccattgcactccagcctgggcaacgagcgaaactctgtctcaaagaaagagaaagagagagaaagaaagagagagagaaggaaaggaaggaagggagggagggaaggaaggaaggagggagggagggagggaaagagaaagaaattagaaaaagaagagcaatttaaaagttaggggggaaggggatggaaagagtaaagattagagtagaaatcaatgaaatagataccagaaaaacagtagagaaaattagtgaagccaagcaggttctttgagaagataaataaaatcggaaaatcatgagccagactgatcacaacaaaagagagaaaagacacaaattaccaatatcaggaacgagagagatacatcattacagattctataggtattaagagataataaggaaatattatcaattttataccaataaattcaatgacttagaccaaacggacaaagacacaaaggacattcaagaataaatagataacttgaagaaacagaatttgtagttaaaaataatctcacaggctgggcacggtggctcacgcctataatcccagcaatccaaggcagggggatcgcgaggtcaggagactgagaccatcctggccaacatggtgaaaccccgtctctactaaaaaaaaaaaatacaaaaattagccaggcatggtggtgcgcgcctgtaatcccagctactcaggaggctgaggcaggagaatcacttgaactcgggaggaggaggctgcagtgagccaaggtcatgccactgcactccagcctggcaacagagcaagactccgtctcaaaaacaaacaaacaaacaaacaaaaaatatatatatgtatatatgtatatatatcagaaactccaggcccaggtggcttcactggtgaattctaccaagcatattaggaagaaagaacaccagttctacacaaatgcttccagaaaattgaaaagaagtacttctgaactcaatctaggagactagcattattctaatacccaaacaaaacaaagacatttccagaaaagaaaactgcaaaccaatattccttgtcacaaaaattcttaaaattttagtaaattgaatccaacaatatataaaaaccatgtgggatttattccaggaatgcatgtggtggtttcacatttaaaaatcaatgtaaacttaaaaattctggaaaaagaaatgcgtaacccaccatataaaaagaaaaaaaaagatcatttcaataaatagagaaaaagcattttataaaatcgagcattcattcctgattcaaaaaaacaaaaatcaagactgttcatgctgtctctcacctgtaatcccagcactttgggaggctgaagcaggaggattgcttgagccccagaggtggaggttgcagtgagctgagatcatgccactgtactccagcctgggcaatagagccagaccttgcctcaaacaacaacaaagaccacctagcaaagcaggaatagaagggaattttttcaccaagtgaagggcatctacgaaaaacctatcaaacttaatggtgaaagacagaagactttcctgctaaaatcaggaacagggcaacgatttccattctcaccatttttgttcaacattgtcctggaggttctagccagtggataaggcaagaaaacttgaaaaaaaacaagtttgttcacataggacatgattgtctatatagaaaagcctatggaatctacaaaaaacaaaaaacaaaaaacaaaaaaaaaacgctactagaactaataagtgaatttatcaaggctgtatatcaatatataaaaattgtatttttgtattccagcaaagaacaattggaaatttaaattttaaaagcagtgtcatttacaatagcatcaaaaaatacaaaatacttagaaataattctgacaaaaggtttacactgaaaattacaaaacattgctgagaggaattaaagactatagtgactgattaatatatggtaacaaagtatatcagttgtggacaggaggtcacaggcagacaggagggaggaattccaaatagggtcaaaggaaactttgggaggtaatggatatgttcattatcttgattgtggtgatggtttcttgggtatacacatatataaaaacttaccaaattatatgtgtactttttcatttagtactttttttttttttttttttttgagatggagtctcgctctgtcgcccaggctggagtgcagtggcccaatctcggctcactgcaggctccgcctcccaggttcacgccattctcctgcctcagcctcccgagtagctggaactacaggcgcccaccaccacgcctggctaatttttttttttttttgtatttttagtagagatgagttttcaccgtgttagccaggatggtctcgatctcctgatctcatgatctgcccgcctcagcctcttaaagtgctgggattacaggtgtgagccaccatgcccagccactttttcatttaattctatgaatttttttttttttttttttgagatggagtctcactctgttccccaggctggagtgcagtggcgcaatcttggctcactgcaacctccacttcccaggttcaagcggttctcccacctcaatcacccgagtagctgggactacaggtgcatgccaccacgcccagctaatttttgtatttttagtagagatggggtttcaccatattggtcaggctgatcttgaactgctgacctcgtgatcttcccgccttggcctcccaaagtgctgggattacaggcgtgagccacagtgcccgaccagttctatgaatttttaacacatgtatatatacagaacaatttcatcaccacaaaaaactccatactatccctttataatcacaccctcttctgtctcccaacgcaaacccctgacaaccactgatttgttctccatcactatagttttgtcttttcaacaatgtcatatccatggacttatacaatatataaacttttttttttttttttttgagacagagtctcactctgttgcccaggctggggtgcagtggcacgatcttggctcactgaaacctccccttcttgggttcaggcaattctcatgcctcagcctcccaagtagctgggattataagcagacatcaccatgcctggctaatttttgtgttattagtagagatgggatttcaccatgctggccaggctggtctcgaactcctggcctcaagtgatctgcccaccttggcctcccaaagtgttggtattacaggcgtgagccactgtgcccagctttatacagtatataacgttttgagattagcttttttcactctgcataatgctttgagagctttgagattcctccaggttgtggcatgtgtcagtactttgcttctttttattgctgagtagtattgtattgtatatatgtaccacaatttgtttatccattcacccttggaaggatatttgggtttcccccaattggcaattatgaatagagttgctataaatactcatgtactcatttctgtgtgaacatacattttcttttctctgaattgtgtacccaagaataagattgctcactcaatcacatggtatgtttagctttttttttttttttttttttttttgagatggagtcttactctgtcacccaggctggaatgcagtggtgcaatgttggctcactgcaacctctgctgcctgggttcaagtgattctcctgcatcagcctcctgagtacctgggattacaggcacctgccactgcgcctggctaatttttgtagttttagtagttacggggtttcaccatcttggccaggctggtcttgaactcctgacctcgtgatccacctgcctctgcctcccaaagtgctgggattacaggcatgagccactacgcccagccatgtttagctttttaagaaaatgccacagtgttgtccagagtggctgtaccagttagtatttctaccagcaatatatgaatgattgggttgttctatatccttgtcagcacttggcactgtcagtatttttaattttaactattctaataggtatctcattgtggtcttgatttgcatttctcaagtggctaatgatgttgaaaaacttcttatttgccattcacatatcctctttggtgaagtgtctgttcaaacttttgcccatttttaaattgggttgtttgttttcctactattgagttttgagagttgtttatatattctggatacaagtcctttgtaatctgcaaatattttctactagcatttagcttgtattttcattctcttctcagtgttatatacagagcaaaagtttattttttttttttgagacggagttttgctcttgttgcccaagctggaatgcaatggtgcaatctcagctcactacaacctctgcctcccaggttcaagcaattcttgttcctcagcctccctagtagctgggattacaggcgtgagccatcatgcctgcctaatttttttgtatttttagtagagacggggtttcaccatgttggccaggctggtttcaaactcctggcctcatgtaatctgctcgcctcggccttaccaaagtgctaggattatagacatgagccaccgcacctggcctggaatgtcctttaaatttctttcaagaactttttctttgcattcacaacttggctaactgttttgtgtaagaggcctagctttcggcctatcttggcttttgacatgctctcttcactaagcttaataatttctagcttttaatttaaagtaagagactcttcctttcacttgaacacttagaggccattgtagggttattagttgacctaatttcaataccattgtagctcagggaatagagagcaccaaggaaagagagggagaaagaggaatggctggtcggtggaggagtcagaacataacgacatttattgattaagttcaccctcctatatggatgtggtttgtggcaccccaaaataattacaataataacatcaaagatcagtgatcacagaccatgataacagatatacaaataatgaaaaagtttgaaatattgtgagaattaccaaaatgtgaagcagagatatgaagtgagcacatgctgttggcacccatagacttgcttgacacagaattaccaaaatccttcaattttcaaaaaatgcaatatctacaaagtacaataaaatgaagcataataaaacaaggtatgcctgtaaatggtgcactacacatgctattctgtataatgaatttttttctgaatacataggctatatatattttaagattattaaataatatgacatttaaacatagccaatcatataagcaaagttgttcagctgtttctcacacctgaaagtgccccccacaccaaataaaacatttttagattatgtgtcccaatttggacttctgaaagtatggtcaccatatgccaaggcatgaaggcattaactggggaatgagtatggagtttgatgcctttcatctcctttgctcatctgtccctatccacatgatggctgcatttgaaatgaaataaagtctacatactggagaatagtttataaatcaatattttatgaaaacagttatatctaataattttttataaaataatgtatttatttgagtcttaagcttagtgatgtaattaaaagcctatttggttttttcttaggaatccaaatcctctctttaatatttaaaccctttaatttgctaaagataagttttgtgccctgttgaccacctaatggaacaagcaagtgttgaagatctcttgtggttttttttttagttgcaaattctaccaagctaacccatttattgcagtggataggagctggagagctgttcattcggcaataataggcaaagggtggtggagggaagaaaactatctttccaatatttttgcttaggaatttggggattcagaatttagtcataaacaactagattaatgtgtttaaatactttgaatcagttctaaatcattccttgttttgtaacatacaagatcttagagataactaaaacagtggttgaaaaattctgttgtggattgaagatcctccagaagcataattcactaataggcacagtgtttggggtgatgggtaaacaaacatctgtgtcctgtggttgcctctctgcataggaggagatatatagttttcaggcaagagatttctttggagagtccactgtctctgttttgcaagttatttatttatttttaatcccagagataacgaaaccatgtagtggcagtagatggtattattcatcaggagtttaggatgttaccatgttaggccatttaaaataagacagaaaggattactttttgccagctgcatcatttctggcaagagcttactactttgcttattgcggtcattgttgtggttgttgttaacccatcagagaaactaaccactacattggttttagccaaatccttgtcatcattggccttacattcttttggggaccaaagagcacctggtcattctgaaagcttccatccccagtgattgatgctcatctctgcaggctcctgcaggctctctcaagcttgcctcccatttttcctgaagcacctttaagcatttctgcatggctactcactctcttctattatacctcctcctcctgccttactgaatgctgaatttcccagctcacaactctaagaaggagctttatttcagagtagaaaggggcccccatatgtggcctattatatccatatcaacttgcttacccttttcaaacagctattgtcttttaatagggtcctgcctggcagggggagtccttaattcctgccatataagaatgggcagcttgagttacagctagctgcagtttggtgctctgatcaaaaggcctctgttgttttttagggtttttccccctccttctctctctctttctatatcctgtgctaataattcagcacagcaaggtcattacaggctttgaattgggagctgagagtgttaaattactgacctagaataaaagagatctggggggctctcaagaaagataaagtgattccggctagtaaaatgcaagcccagcaacctcacttcttaacaatattattattttttaatcccctctgtctctaaaagtcttttctgggacaaggagagatcccctgccagagaattaggttagaaacccaatgacatcttctgagagttgtggcccaggtgctggcagcttatgggcgcctgtgcagttgtcctttttgtctccctaccttgtcaatatttcactctgttctaccttggtctctcagccacatatatggtttttttttttttttatcacgtaagtcatatatgtttatgacatttcagctgaaaggtaatatcccatgaagggatttcagacatgtggaaagcataccacttagcccccaaaatatcttaaacatgacatcatcttattaaaagccactttcattccatttatgttttgtaaataatattagtctggtcctcccatactttaacaaaaaaaaagtcccattgtaaatgaatttgatgtctccactctattctacattgtatcttctgaagaaagtcatttccatttcttcatactattttctttcatatctttcatatgtccttttttttttttttttttttttttttttggagacagagtcttgccctgtcacccagactggagtacagtggtgtgatctcggttcactgcaacctctgcctcctgggttcaggagattctcctgcctcagcctcccaagtagctgggactacaggcgtgcgccaccacacctggctaatttttggatttttagtagaggcagggtttcaccatgttggccaggctggtctcaaactcctgacctcaggtgatccgcctgccttggcctcccaaagtgctgggattatagatgtgagccactgcacccagccactacagttatctcttaaagccatacactatccatatcctctggaaaatattgattttctaagactaatatttttagaaaagttcctaaaatcaactttcacagattttctgcacagcagagtaataataataagatagtccccgaatgtgccaagcattttacagaatgcattattaacacatttaacctttggcaaccttatgtaataagcattcctgtaatcactagtttacagagaaaaataattgcaatacaaagtcatacagccaggaagatttgtcccagactagtgcttcttgaactttttcatgtttgtgtgaatcacctagggatcttgttaaaatgcagaatcagattttgtaggtctgggttggggcctcagattctgatttttaacaggcttctaagtgatgctagtgctgctgtccttggttcacattttcagtagcaaagccatagtcattttttcttgagaactactcaaaaagtttttggttataacttccagtttttcattccatcaggcaattctatgaatatacatagtggatatttcacacctatatcttactttttaaaaaatatgataaaacatagcacttaacccacaaaatatcttaaatgttagaaaatatttaagatattttgcctcctattggccctgcagaagctggacctcctgaactgtgtgacctacttcagtggtacctcaggttctacatggtgagtatcctggggactggaagagtggagatgatcagggcccataggggacctggttaaaattgactattttaactatttttaagtgtacagttctgtggcattaaatacattcacattgttctgcaaccatcactgtcatccacctccataacttttctatcttcctaaactaaaactctgtactcactaaatactgacttgccaacttcccattccttctgaccccctagctcctggcaatcaccatgctactttctgtatctaggaatttgactactctaggtacctcaagtaagtgaactcatacaatatttgtcttttttgattggtttatttcatttagagtaaggtcttcaaagttcattcatgttgtaccatgtatcagatttccttccttcttaagactgaataatagtccgttgtatgtatgtatcacattttgcttatctgtcattagacactagggtggcttccaccttttgactgttgtgagtaatattgctgtgaacatgggtgtatatatcatatatttgtccaagtccctgctttcatttcttttgactatatacccagaagtggaattactgaattatatggtaattccaccaatatcttactttctaagaaaccagtttatgtttaagttattgtgttccttttttttttttctaagtgagacagggtctcactttgttacccaggctggagtgctggaatgcagtggcatgaacatagctcactggccttgacctcttgggctcaagagatcctcttgcctcagtctcccaagtagctgagaccacaggtgtgtgccatcacacctggcaaatgtttaaagatatttttcatagagacgggacctcaccatgttacccaggctggtctcaaactcctgggctcaagcaatcctcttgccttatagcctcccaaagtgctgggattacaagtgtgagccacttcacccaatcttctctctctctttttttttttttaaacattccttacataaagtaaatctttaaaggtttggcaggaagagtgagttttcagtacagattttcattaaagtctattgtctgtagctactttgtaattttcaatcaatcacaaaagaatattgagaaatgtcctttgatccttagaaggttggtaattggttaaatggcaccaagtagagaattagagagagagtgctcatgttctgaaataaaccaatactaagaaggtttatatcacagagaaagttttatataaatgaatttaagacctcacctgacaaacaggtagtcaaggaacaggtgaaccccttgttaaatttatgctctcctttaaagattttctggaacaactatcccaggatcttcaaaaattttgtggtacctctttctctgtggtctttaataatacattaaattctcgtttgtttataagagtttggtgcaagattctgcctgctacctagaggtctttccttatgtatctttagaaatgaaattctctattggaaataggaaaagaaataaactgatattgaaacctaatgagttaacagaacatttgaagggagttttaaaaaggtatcaggaagaaactgatttttttcctgtggtataatactgaatcattaagatagtaactttaatcatttgtgcctatagtgcccttattttaggagttcctagttactacaatggacttgaacttggaaaggtaaaacaatacaaaatagcttttaactaaagttgggaatatgagtgcttaaaaaatatacatggatttaccagtagctttagaaggtaaatatacatgactactgaaataaactacaattattttctaaaaagtgagaccaactttggagataaaacaaataaaagaatgaacagaaggcgactctggaaataacggtagtaaagttatataggacatgttgagatgataaccatgaagaggagaatcgaatcattatctgcaagtttcatgtggatggctctaaaagaacaaaccctgcatcctaaacccccttcaattttattattttgaattataatcaagtccaaggagacttggcctattattaacaactttgtatgaagtatttttttcaaccaaattcatatcatcttgaataagaacaaaggattatggtttgagaattattatacttgctggactttgaaccaacagagttgatatatttaatacttccacttcttagatgaggtggtactgaggaaggggtttgtaacatctaagggggcccataaaaatagtgtttagttttcagtgaaatctacaggtgatgctaaaatgggaacatttttaaagggatcctagtgagaacaaaaagacaacaaaaaagaacctaaaggctatagctgcaggcagaaaatagaataaaatttaccttaaaatgttgtctagtgcaatgccaagcatagatatacagtggatgagcaaaatcttgtaagaaattagaattgagtttaaaaagttataaaagaaaacagacaagaaattagatgaaactatggtatgtgatctggcagtaaaacagacaaaagctgttttaaggtctggagatagagaggaggggaaggaatggcaggatctgcagatgactgagggaggcctcacctgtgactaaactcagcttcagtagcagaagaaaatagtacagacagggtgaaccagttgacaaaagagatacagaggttggaacatagagctgaagagaaagaaataacagatgacaggtttagaaaccacataaagaatgtgagatgtaatatgtagcagaaggtgagatgtaacagaaatactgtaaagagaaacagtctgtccagaaactcttcctaggggataaggctaggggatatttccccagagaaaccatgaaaacacaattattctggatttcaagtgaaattaggcaagctcctggaagctctgttataaagagctctgcttagaggccttgttgaaagaactgaaggatcttgtaggaacaagacaaattagagatttacggtaattgttgttatttttttttaattgacataacattacacaatatttggaagacaggaagaaatcaataataagccaaaaccctaatccagtgaataaatacaattcatatcttttaaatttttaatcactttccttattcagacctactttaaagtagctaaaattggctgggcacggtggctcatgcctgtaatcccagctctttgggaggccgaggtgggtggatcacttgaggccaggagttcaagaccagcctggccaacctggcgaaaccccatctctactaaaaatacaaaaattagctggccatagtagcatatgcctgtagtcccagctactcgggtggctgaggcatgagaatcacttgaactcaggaggcagaggttgcaataagttgagatcgcagcaccacactccagcctggatgacagaggaagaccctgtctcaaaaaaacaaaacataaataaatgaagtagctaaaattatcatgtacacacaattttgtttccttttttgtttgtttgtttcttcttttattctcagtaccttcctcaggatcctccttaaatataacatatgaatcatgtttttataatttaaatttctaacatgctataaagagtatgtatgtgtgcagtaaccttttcccagtgctcggcgcattgattttccatcctgtatttccctgtttctactggcctggagtaaccagccttataaaaaaagatattccttcatacttaaagctgcaaggggtaagcagatgtgaattaatcatcttatatcagccggtaagaagctgatgtgttagggatggcacctgcgagtttaccatagcatgccaggccttcaggaatgagttttgaagtttgagggcttcaaaggggagtttgaaacattttaaaaccctgacagggttttacctgaattatatgcaaagatccaatggggggaagagtttacttcagagaagcagcaactgaaaaccaggtcctttgcgtagccttcctggaaagaaccgtctttcttccttagcagcagcccccagggtaggaccagtgctctatttcacggctattttaagaaagttctttatggatttgggtaacagaaaagcacttggtgaagtgatcaaggaaagaaactaactctgctactgaggattacttaggcagaaaaaaaatcttgttatgaaacaccaatgtttaagtccttagagtgaactgataagctgatttggggcttttttgctgttgcagaaattataaatcctatccactacaatggcagctcagttctcacagatgggttcacctatccttagacagtaacttaagattgatagtccctgttggatttcttcctaaattgttttttaaagaagccaaagatcttggattctaattctaatggagccactgctgacaagaagaagatgaagaagattgttagtgctcacttgcagtgtggcacatctctattttcttttttttttcttttttttttttttgagacggagtcttgctctgttgcccaggctggagtgcagtggcacgatctcggctcactgcaagctccacctcctgggttcacgccattctcctgcctcagcctcccaagtagctgggactacaggcgcccgccaccatgcctggctaattttttgtatttttagtagagacggggtttcaccatgttagccatgatggtctcgatctcccgaccttgtgatccgcccgcctcggcctcccaaagtgctgggattacaggcgtgagccatcacgcccggccacatctctattttctatagcatttacaattatttctttgtagccaacagaaaagttgcactcaatgaacctatcaattcatgatgcatatccgtggggagaagctcattccgaatacatcatatgttaaatttatccttggattcaggatcatattgttcacttactttttcctgtagtcagcatgttgtaattttgaacaatagaataatagataacaacagcctactagagaattagaaatactgtagttctaagaactgtagtaattagaaatactgtagttctaagaactgtagttcttagaaatactgcattcaacttttgtaaagaaacttttttgtatcactatataagaaagaagctggtgtgtaaggcaacttctgtgcaaatatgttgtctaaactgctttggggttctgtaacatagactagctgacttgcctcactgatttctcttatcaagttagcattgccaaattctatagctgataggcaatgggaagaaaacatttcagggctttaggcttcctctgaatttcacaaggaaacaaagaacaaatccagggattgttaggtcaggagacaaaatcatgccataggaatatatatctttttttttcttctttttttttgagacaaggtctggctgtgtcatccaggctggagtgcagtgatgtaatcttggctcactgtaacctctccctcccgggctcaagccgtcttcccatctcagcctcccaagtagctgggactacaggcgcaggccaccatgcccagctaattttcatattttttttttttggtagagacgggatttcactatgttgcccaagctgatctcaaactcctaggcacaagcaattcatctgcctcgggctcccaaaatgctgggattacaagtgtgagccactgcacccagccacagaaatatatctttagagcctggtgactttgtgcaaaacaaaactgcagttagccaacctgttagtggaaaatatgccccaaaagtcttctcctcccagcttgcccctttccaactcagaatatattttttccttctgtttatagaagcaacacaaggttactttaaatcataattttggccaggcatggtggctcactcctgtaatcccagcactttgggaggctgaggtgggcagatcacctgaggtcaggagtttgagaccagtctagccaacatggtgaaaccccgtctctactaaaaatacaaaaaaattagccgggcatggtggtgggcacctgtagtcccagctacttaagaagctgaggcagcagaatctcttgaacctgagaggtggaagttgcagtgagccaagatacaagattgtgccactgcgctccagcctgggcgacagagtgagactctatctcaaaaaaaaaaaaaaatcataatttcataatttttcccaagatgttttggatctttggtcttatatattctgtggaggccaattcatatgctgtgtttgaatcaccttagtgtggccagtttgtgctgcatagttggatgtgatctgctctcctgttttacttcttggcagatatatttaggattccttgaaaaaaaaaaaggctgggcacagtggctcacacctataatcctagcactttgggaggccaaaacaggaggatcgcttgagcccaggagttcaagaccagcctgggcaacatagtgaggcctcgtctctactggaaaaaaaaaaaaaaagaaagaaaggaagaaagaaagaaaattagccgggcatggtggtgcacacctgtagtcccagctacacaggcggctgaggcaggaggattgcttgaaactaggaatttgaagctgcagtgagctatgatcgtactactgtactccagccttggtaacagaataagaccctgcctcaaaacaaaacaaaacaaaacaaaaaaaacctatcagaagacaagttcaattccaattctaacagaagataatccactctaatgagctggcctggttttagaaagaaaaaaaggagacaggagaatggcctaggaagactcaactgccatcatccagttaaacagtgcaggtcaagattcactggccgttttcagtttgagtgagaacaaggagcacctggaggacatagagtgctgttggagttttgaagttttgcctctttgcacattaagaatgagctggaatattttaatttggtcctcttgcccatgtctttattacttctatatgtggaatgtgaatagctatttatatatagatccagtatggttacagttatttatttatttacttatttatttttaacttttaagttcaggggtacttgtgcaggtttgttacataggtaaacttgtgttgtgggggtttgtggtacagattatttcatcactcaggtattaagcctagtacccattagttgttttccctgatcttttccctcttcccatcctccaccctccaataggccccagtgtgtgttgttcccctctatgcatccgtgtgttctcatcatttagctcccacttataagtgagaacatgcagaatttggctttctcttcctgcattagtttgctaaggataatggcctccagctacatgaatgttcctgcagaggacatgatctcattcttttctatggctgcagactattccatagtgtgtatgtaccacattttcttcatcccgtctatcactgatgggacagtgtgaggaatcctcaaagatctaaagtcagaaataccattcgacccagcaatcccattactgagtatatacccaaaggaatataaatcattctattataaagatgtgtggttacatttatatttaattctttcttggtagtccctgagctattgcccacttcaccagaataatttaaatcaattcttgctttttgctagttaatagccaaaattaagatgtttatgtggaattgacatcatacataaattcttagaatttgtatctagtttttcaggagaaaatagataccacttaatagaattctgtatgactttttctgtgcaaacagcgtttgttactagaagagaacatgaaattgtatcaagaactcccattagcttaacatgtttacaaatgtctgattataaaattattaatttttaacacagctcctgctgtgttttcttaatatattactggagaaaactgccctagagctgggcatggtggctcacgtctgtaatcccaatgctttgagatgctgaggtgggaggattgctttagctcaggagtttgagaccagcctgggcaacataacgagactctgtctttacaaaaaataaaataaacaaaattagccaggcatggtagcgcatgtctgagtcccagctacttgggaggctgaggcagggggatcgcttcagcccaggagtttgaggctacagtgagctatgatcgtgccactgcactccagcctgagcaacagagaaaaaccccatctctttttttttttttttttttaaaagagatctcttaaaaaaaaattgccctgaagttaaatattgtattagggttctctagagggatggaactaatggaatagatttatatatataaaggggagtttactaagtattaactcacacaatcacaaggtcccacaataggccatctgcaagctgaggagcaaggatagccagtaaactgaagaacttggagtccaatgttttagggcaggaagcatccagcatgggagaaagatgtagcctggaagggtaggccagtctctcttttcacatttttctgcctgcattttattctagctggctagactggcagctaattagattgtgctcactcagattaagggtaggtctgcctttcccagcccaccgactcaaagttaatctcctttggcaacaccctcaccgacacacccaggatcaatactttgtatccttcaatcagtttgacactcaatattaacatgacaaatattaagctaataaaataggaaaactatggaatttattttattgtcaaaactaaattaagagagatttgtactcagcccatttcattttttttactttagaattttttaatttccagtgaaaccaaattttactactgttgtgaacacagccttcacatttgatgcaaatgggagggcttaattataatcacttagtgacagtattgtagacaaagccaatagtgtatggcacatagatgattatatcttctggagagagttgactttacaattaatacaaacatatttgactaaagaaaatggaagcatcttcagaccatttcatcttaattatatcttgtaaggttaaaaatatataactcacaaataaattttaatttaaaaaatttttttaactttcatgtcacagccaagtccaaaaaattttaattttgatgtttctggttctcttgtggctagataatccatagagatttcctgaacttcttattcatgatagcttaaaaagaaacattcagatccctgtgaattggacaaaaggatatctattttatgctactttttgtagcataaggaagaagaggaaataaaaacacaatgggcccttgaacaacatgagggttacaggtgccgacctctcctcttcacttagtctaaaatccacatataattttggactcaccaagaacttaactactgatagtctactattgaccttaccaatagcattaaaacagttgattaacacataccttgtatatgtattttatactgtattcctacaacaaagtaagctagagaaaagaaaatgttattaagaaaatcaaaaggaaaatatatttactattcattaagttaaagtggatcatgataaagacctccatctttttcttcttgatgttaagtggctgaggaagagaaagaggaggaggagttggtcttgctgtcttaagcgtggcagggaagaagaggtggagattgtagaaggggaggcaggcacactcggtgtagctttatgaaaacacatggtgatttctgattttttttgccttttcatgtctttaaaaatgtttctatatggtaccaatttttcttccatttgctttagtttcagtgcctgtatcactgaagagttcatgtcataaaagaagtcaaaagcagtcttgaatagttggaactcttctgccagatggtctaatgtcagtttgttttctggccctgcttctgtgtcttcttccccttctattccttcttttctggcactggttcagaagcactcaccttcatcaagttgtcttctgttaattcctctggtgtgatgtctgttagctcttgaatttctccaagatccatatcttgggacccttcccccaccttctttgccatatccacaatctctttcatgatctccttgattggctctgtcgtaaatcctgtgaagtcatgcacaacatctggatgcagttttctccagcaggaatctattgtttggggctcaatggctttttccataacaacagtggcatcttcaatggtgtaatcctcccagactttcttgatgttctatcaggattctcttccatagcgttgacagtcctttccaacagagtactatgtgtaatgggccttaaaggtccttataaccccctgacttaggggctgaattagaaacattgtgtttgggggcaagtattacagaccattttgatacctttggtgttgaactcatgggttctgggtggccagggacattgtccaattcaaaagaactttaaaaggcagtccatgttggtgtgctgcacccattaattcatcatttacgttaggtatatctcctaacatggcacatgtatagatatgtaacaaacctgcacgttgtgcgcatgtaccctagaacttaaagtataataaaaatatatatatataaaaataaaaaaataaaaataaaaggcagtccattaccagcaaggtacatcctgacttcaggaagaatgttgatgaaacccagtccagaaaaaatggttctcattatccagggcttcttgtacaacacccaaaactggcaactggtatttatcttttcccttcaaagctcaggggttaccagctttatagataagggcagtcctaatcataaacctgactgtgtttgcacaaaatagtagagttagcccatcccttcctgccctaaatcctggtgcttgcatctcttccttactaataagtgtcctttgtggcatttttccccttagcatctgcattaaaaaactgctcaggaagatatcctttttcctcaatgatttttaaaagcttctttttttttttttttagagcagggtctcactgtgttgcccaggctggagtccagtggcatgattataattcacaccacctcgaattcctgtgctcgagtgagtttcatgcttcagcctctttagtagctgggactacaggcttgtgccaccacagtcggctaatttttatttttggtagagatggggtttttccatgttgcccaagctggtttcaaactcctgggctcaagcaatcctcccacctcagccttccaaagtgctgggattacaggcatgagccactgcacctggttgcctcaataattttcttaatggcatctggaaacttgtttgctgcctcttggttggcagatgctacttcccctgatatcctgatattttttaagccaaaactttttctaaaattatcaaaccatcctttactggcattaaattctccagctttagacccttcacctttcttctgctttaagttgtcatataatgacttcactttttctcagatcatattagggtcatatgcctttcttatagaaatcctgcactcctataaaagctgtgttttcaagacaagttaaaaaagtatttcaccaaaagtgcaatgtttttatgcctgctgatgtagctgcagcaactgcttcatgaatttcctttgtttataattgtccttaccttagattcatttatcttgaaatgaaggccaaaccacagctgcagatctcaatctatgatgtatgtcaagcaattcaactttatcttgtaacgtcatgaattttctctgtttcttgggagcacttccggcatcactagtgacacttcgtatgggtccgatagtgttatttgaggtttatggttttgtactgaacacgatgaaaaatacatgagaaccatgagagatcactttttactgtgatacacaatttactggagaaatgaactgcccatgcagagatgattagcatcacatggtgttttaagcagatacttgcaacacttgtgctcactgcaatagcaacaggagttggctatgaatgaaattattatagtagtacagtatgagctacagttaattttatacagttatgatttaatactgtatgtttgcttacatttctctccactatgaatggcaccatgtatggtctgtgtgtgtgtcagttttgctaaatgttaactttttataacagatttgtgtatattttaatgtagtaaatgataaaatggactagtgtctacatattttatgcattcaggacatacttttaaaaatttttccaatatgtgtaggatgcacagttggtctgtgagttttttttaaattgctgaaatccctccaaaatttctaatatatttattgaaaaaaaatccatgtataagtagacccacacagttcaaatccatgctgttcaaaggtcaactgtatatacatgtatctgctcatctgagaaaaaaatatgcacacaggaagaataaaccagagatgaatgagattcattatctctaagatgttagtgaaatggagtgaaaagatatatatatatatatatatattatatatatataatatataaattatatatattatattatatattatatattatatataatgtatattataatatacaatataatatataatatattatatataatgcatattataatatataaatatatatttatattatatattatatattatattaatatataatatatataatatattatatttatatattatatattatataatatatatattatatattatatttatatattcaacaagattgggggagactctaaaattgaaaacaaacaagtgaagcaaattgtatttcaaatgaataatataccgtactgcagggggttggagaaactaatctaaggaacataatatttggactatataccctcaggctaaaacaactctaaacaagtattaaactctaattagtaggcttctttttcacagaggaatgggttagctagctcagtacattttaggattaagcaaataagtaaatatgttatagataataggagcctttttctcactttagaaaaaggacatttcagatatggaaagggaagatgatagaatgtaacctgtagtgttgaactggaattgaatcagtgtgagctcatagatttgttttgttttgttttgttttgttttgtttgagacgcagtctcttctctgtcacccaggctggagtgcagtggcacaaccttggctcactgcaacctctgcctcccgggttcaatcaattctcctccctcagcctcccgagtagctgggattacaggcgagtgccaccacgcccagctaattttttttatttttcttagaggggtggagttttgccatgttggccaggctggtctcgaactcctgacctctggtgatccgcccacctcggcctcccaaagtgctgggattacaggagtgagccaccacgcccagcctattctttactaaaaacaactgggcttcttggataaatggctggctccagggtgaagtagggaaagaacaagatgatcctggaacatcttattctatcaaaaaaggaaggaagtgatcagagaattatgtagatgtgtcaaaaggacatagaagtcagcttgaagggcttccatggcaaaatatgggatcatttgaacataaaaatatataatgatagtaaaggattataacctattgaataaagaatccatgagtccacaatgatataaataaataagaagggaaagctcttccttattgtagaaggtcgacttaaaaacgtagatgaaacgacgtagttggaaaaagatcaccatttggcaaaaccttcatattcattgttggttctggcaacaattattattattattattttttttttttaattgatcattcttgggtgtttctcgcagagggggatttggcagggtcacaggacaatagtggagggaaggtcagcagataaacaagtgaacaaaggtctctggttttcctaggcagaggaccctgcggccttctgcagtgtttgtgtccctgggtacttgagattagggagtggtgatgactcttaaggagcatgctgccttcaagcatctgtttaacaaagcacatcttgcaccgcccttaatccattcaaccctgagtggatacagcacatgtttcagagagcacagggttgggggtaaggtcacagatcaacaggatcccaaggcagaagaatttttcttagtgcagaacaaaatgaaaagtctcccacgtctacctctttctacacagacacggcaaccatccgatttctcaatcttttccccacccttcccccctttctattccacaaaaccgccattgtcatcatggccccttctcaatgagctgttgggtacacctcccagatggggtggtggccgggcagaggggctcctcacttcccagtaggggcggccgggcagagggctgaccccccccacctccctcctggacggggcggctggccgggcagaggggctcctcacttcccagtaggggcggccgggcagaggcgcccctcacctcccggatggggcggctggccgggcggggggctgacccccccacctccctcccggatggggcggctggcccgggcggggggcggacccccccacctccctcccagacggggcggctggccgggcagagggactcctcacttcccagtaggggcggccggccagaggcgcccctcacttcccggatggggcggctggccgggcggggggctgacccccccacctccctcccggacggggcggctggccgggcggggggctgaccccccacctccctcctggacggagtggctggccggacagaggggctcctcacttcccagtaggggcggccgggcagaggcgcccctcacctcccggatggggcggctggccgggcggggggctgacccccccacctccctcccggacggggcggccggccaggcagaggggctcctcacttcccagtaggggcggccgggcagaggcgcccctcacctcccggacggggcggctggccgggcggggggctgatccccccacctccctcccggactgggaggctggccgggcgggggtctgacccccccacctctctcccggacggggtggctggccgggcggggggctgacccccccacctccctgccggacgaggtggctcccgggcagagacgctcctcacttcccagacggggtggctgctgggcggaggggctcctcacttctcagatggggcggttgccgggcggaggggctcctcacttctcagacggggcggttgccaggcagagggtctcctcacttctcagacggggcggctgggcagagacgctcctcacatcccggacggggcggcagggcagaggtgctccccacatctcagaggatgggccgccgggcagagacgctcctcacttcccagatgggatggcggccgggaagaggcgctcctcacttcctagatgggatggcggccgggcagagacgctcctcactttccagactgggcagccaggcagagacgctcctcacttcccagacggggtggcggccgggcagaggctgcaatctcggcactttgggaggccaaggcaggctgctgggaggtgaaggttgtagcgagccgaggtcacgccactgcactccagcctgggcaccattgagcacggagtgaatgagactccgtctgcaatcccggcacctcaggatgccgaggctggcggatcactcgcggttaggagctggagaccagcccagccaacacagcgaaaccccgtctccaccaaaaaaatacgaaaaccagtcaggcgtggcggcgcgcgcccaggcagttggcaggctgaggcaggagaatcaggcagcagtaccgtccagcttcagctccgcatcagagggagaccgtggagagagggagagggagaccgtggggagagggagagggagagggagctctggtactttcttatagccacacgaacagataaagactgtacctatctgttggctgggcgcagtggctcacgtctgtaatcccagcacttcgggaggcttagacaagcggatcacgaggtcaggagatcgagaccatcctggctaacatgatgaaaccccgtctctactaaaaatacaaaaaatttagctgggcgcggtggcgggcgcctgtagtcccagctactcaggaggctgaggcacgagaatggcatgaacccgggaggcggagcttgcagtgagccgagatcgtgccactgcagtccgtcctgggcgaaagagcgagactccgtctcaaaaaaacaaacaaacaagaggtccagagtgtgacaacatggccttgcaaccttgtgctcagggaccctggaggcagtccttcataggtctgctggaactcgccaacaattattaatagatactaaaatttgtgaatgaaagtttgaagagtaactatatatttccacagactcaaaatgtcttcccacaggatacttatccattacaaaggctaactttatagtggcaaaacctggcagatgctgctctaactaaagaatcaaagttaacatccccagtaattagactaatcagcaagtgcccccagatgtgatgcactgagaggaactcagcatcacctttgtgataatcctgccaaaggggcataacctgaattgaattatgagggggcatcagacacacccaaattcaagaacattctacaaagtaacctgtacaacaggttttcaaataactttgtttcatttaacatcattttcattgtaactattttgtggtttaagatcattttatgaagagcaagaggcagggagagatggcagggaggacaactagagcacttctacacccaccaggagaatagactccctccctgcttcctgttgtgctggacccctattgacttcagtagggatggcaccatgtttgcgaggctgaaaaagagacatggagccagcaaatgaaacataaggttttttgaggggatttacatacagggcagtccaggggcagcatgctgaacaggagaactgctaccacttataaaaaagcatgcagtttatacagcattttcacttagcccctcgaccccggcaatctccacctggcaaccttcatccaacccaaaacaaagggcctcgaacccctgtatggcctgtgatccatgggatggatcagatggttcagatgttcctcatagataaagaatgaatctctgggttggccattcccaaattccttcactcagaactctgaacacacattcatcttagaccacagggtcattctcagggtatgcttcaattatttatgacaggtgcatctaccatacacctgctccccaagtggctcccttgtactatggcagcggtggtggggagggatttgtgtaaactctgccctggagggtggggaaggtgaaggttggatgtaaaatggcagcagctggggctggcagtggtgctgctgggtgctacagggcttgtagggttccataaagagggctgagaaggtgttgactttgtctgccccctgcacctcatggggaaacagtggcagtttcacagtgcaaaagtctttataagtgttctccgtctggttcagatacttggcctggatcttgtgtcaggcctcacatatctttcaggattttcagggttggggaagagaagctgggtgatgatgatgttgtatgtgtcaatcttgtacttggccagctcctggatcagtcactctgtctcatacagggatagaactcagggatatattcgcagatgatacaggtaatctactcagggcccttgaactgtttgctgacaaagtagatgatggacagtgtctacttcagcatggaggacagcacgtctgtgttcatgtccccaagacctagaacgttgcatgtctgtaagataaaggggctgatctggttcttgatctgctgagtgtcatgtcaaccaccaccactgagaagttcatgcccttcaccagcctcatgacctcagcatagctcatggcctcattgatgccgggaaaggcgctcatggcttcctgcatcaacttcttgctcatgctcagcatgttttccttctcaaagaactcactgggcagctatgctgcaccctggctggggtcaatttccacagtgaagaggttgtcagagcctttgaccttggtaggcacctttgagaacttctggtcaaaaccatctgagatgttgtgggctaggtctgtggagatgatcagaatactttcatgcccttttgatagctggatggccaggctgcaactgcaagtggtctttcccatgccacctttgcgccagcaaggatccacttaacttaaggctgcatttctcaatgatgttgctaaacctaggctccagtggctcttggaggctgactttgggagactgaggtggaaggatcacttgaagccaggagtttgagatcggcctggaagtgagaccccatctctacaaaaaaaaatttttttaaatagacaagcatgattgtgtgtgcttgtagtcccagctactcaggaggctgaggtgggaggatcacttgagctcaggagttcaaggctacagtgagctatgattgcatcactgcattccagcctgggcaacagagcaagtccctgtccaaaaaaataaaaaataaaataaagaaagagaggaaggaaggaaggatggatggatggaagaaagatttcattatttttagggaatatttttaggaattccttatttcctaatttttatttatcttgctcagcactttgacttctgttttttttttttttttgaaatactgtaggagtaaacaagcgtcacgtctataacttactcttaaatagttccaaaaaatgataatatgtatatacatatgtacttatatgtctgtgtgtgtgtgtgagagagagagagagaaaagagagtgagtgagagtaaatgtagcaaaatattcacatttgagtaatccaggtaaaggatattcaggaattctttgtgctattataactttttggtaaatttgaaattacaatatgtcaaaatttttaaaaattaaaatcttcaaggaaaaacttcaacaacttaaagaataaaaaaaattgctcaatgaaatttgaatactcgttttggcaaaatctgtttatggcagacatatggtgtacttctgtatggcctttaagatatttttaggaacttttttgttttactttagaggaaagattaatgtctattaaagaactttgtagtttagtcaaatacaatgaaaaattagtgcaaatatgcatttttaagcttggtaggtcaaatgtttgttttggatttctggtcatgatggcttgcagtgttcatgacttgggcctcttattcatttcatacacatggtaatgatacataaaattttctaagatttttaaggacatagccatgtataaaattaatataaattcatctgactaggaactcactaaaccacaatgcagtaagtgggactgtaaccacatgcctcctgtgctctggattcagaaggcgtaggtaactgaaagctcatttcttgaatggtggagactcaaaatgttatacacacagtgcaggagactggagctagccccttttgcctccaccactttaagaaagactcaaaaaaagttatgactgctacctgagaaatggcttacataaaacctggaggtttagccaggtgcggtggtgcacacctgtagccccagctgtttggaaagctgaggcaggagaatcccttgagccaggagtttgagaccagcctgggcaacatagtgagaccccgtctattaaaaaaacaaaaaccttgaggtgtgggaggaagcagacagccttacagccaggtcttagtggtccaacctccttaggggtacagtgacaatctgtatgatatccctaatatcaggaatggagccataagccatccaatacaagacctggttctggactagggtctgtccacaagagagagtagaaacctcccacttcacatgaacttatacgctgaaattctaaaatacatgaggaacactgatgttgagaaagatagtcaataaacccaataaacataaatttactccagagaaaacaaaaatagttgaacatttaaaactgactttgaggccaggttgaggtggctcacacctgtaatcctggcattttcagaggccaaagtgggtggatcacttgagcccaggagtttgagaccagcctgggcaacatggcgaaaccctgtctctacaatcctgtctctagatataaaaaggcatggtggcatgcgcctgtagattcagctacttgggaggcacttattatctttaaattattcattctctattctgtctggtcagcctgaataatgcaggttctacaatgtatctaccatgtaggtttatttttatttatttatttatttttgagatggagtctcgctctgtcacccaggctggagtgtagtggcgtgatctcggctcactgcaacctctgcctcccaggttcaaccaattctcctgcctcagcctcccaagtagctgggattacaggcatgcaccatcacgcctggctaatttttttgtgtttttagtagagacagggtttcaccatattggccaggctggtcacaaattcctgaccttgtgacccacccgcctcgacctcccaaaatgctgggattacaggtgtgagccaccgctcctggacagtttatttttatttatcttactcagcactttgacttctgttttgttttttgttgttgttgttagttctggaaaattctcagccaatatatatacatgtgtatttcttgagataggatctcacattattgcccaggctggagcgcagtcacgtgaatcttgcagaattgtagaatctgcattacttaggctgaacagacagaatagagaatgaataatttaaaagataataacataaagagataaaaaactatgaagacaggtaagaggcattaaaaagctacaatgtatatctaataggaaacagaagaaaatgatatagggaatggcaaagaagcaatattttaaaaagaattggggggtgcagtgactcacatctataattctagtactttgggaggctgaggcaggaggattgcttgaggaccagcctgagcaacatagcgagctcccatctctacaaaaaaattaagtttagccaggcatggttgtgtgcacctgtagtcccagctactcaggaagctgaggtgggaggatcacttgaacccaggagttcaagcttctagtgagctatggtcatgctactgcactccagcctgggcaacaaagtgagatcctgtctcaaaaaatgtatatgtgggctgagaattttcctgaactgacaaaaaacagaagtcagtttaaagtactgagcaagataaataaaaataaacctacatggtagatacattgtagaatctgcattaatgataaagaaaattgtttatatgaattataagaatgattaactccaaaggaatggcaggagtttgacagcagtttgcttgatatcagtgataggtgcgaggtgacaactgggtggtatctttaaagtgctgagagaagataagtaacaaccagaattctccactgaattaaatttcactccagaaggtaaaataaagatattttgaggtagatgaaaactgagagcatttaccactcacaggcttttgctgaaagaactacaggtttatgtatattaataaatttcacaattcaaaaaaagctttgaaaacctgaagttgtcctttggtaagttttcagcaacctcatttgtggggcaaacttgacctaaactagttcatgggctaattttggtctttgtttatcccacttagtgtgaatacttatatgtttcactgtggagactttaatatgtttgaatccatggggtgctatcccaaccctgctgaaggtgttatatcacatctggtttgtgcaacctttataaaatctcaaaatttgtcacttccaaaccagaaaggtcccaggatttcagataagtgattatggatcttattaaaggattatggatcttatttctttagcaagaaataattgaaccaagagtgaaggagcagaatgtgggaaacagtagtgagcatgaaaattgatttgataaatgtaggtaaacttaattaattattgatttttttaaagtagtcatttttttcttttttctcttttttttctttttgagatggagtctcactctgatgcccaggctggagtgcagtggtgccatctaggctcactgcaacctccgtcccccgggtttaagcaattctcctgcctcagcctcccgagtagctgggattacaggcacctgccaccacacctgggtaatttttgtatttttagtagagacggggtttcaccatgttggccaggctggtcttgtactcctgacttcatgatgcacccgcctcagcctcccaaagtgctgggattacaggcgtgagccaccactcccagcctaaagtggtaatttttacatttaaaaaggtatattgtcctgtaggtatgggggtgaattttttaaaaaaggaaaaaaaaggaaaaggtagatatcaaaagaaataaatgacatccaaattggaaagtaaaaggtaaaactatattcacaggttacatggtcctatgcataaaaagcatcctaaagaatccaccaaaagaaaaaaaaaaaaaaaaaacttctagagcttataaatgaattcagcaaagttgcaggggacaagagcaacacataaaaatcagttgtttctatataccatcaatgaacaatctaaaaaggaaattaagaaaagcaattctgtttaaaagagcatccaaaagatttagtctattaggaataagtctaactgaggaggtgaaagacttgcacactgaaaactataaaacattgctgaatgaaattaaagaagagctaaataaatagaaagacaccctgagtacatggataggatgatgtaacactgttaacatgtcagttctacccaaagcaatctactgattcaacacaattttcttttcttttcttttatcttcttttcttttttttttttttttttttttttgagacagagtctcactctgccacccaggctggagtgcagtggcgtgatctcggctcactgcaacctccacctcccaggttcaagtgattctcctgctcagaatcctgagtagctgggattacaggcatccaccaccatgcccgactaatttttgtatttttagtagagatggggtttcaccatgttggtcaggctggttgattgaacacaatttcttttcttttttttttttttgagatggagtctcactctgtctcccaggctggagtgcagtggctcaatctcagctcactacaacctccacctcccgggttcaagcggttcttctgcctcagcctccagaaaagctgggattacaggtgcccgccaccacacctggctaatttttgtatttttagtagatacagggtttcaccatgttggccaggctggtcttgaactcctgacctcaggtgatctgcccgcgtcaacctcccaaagtgctaggattacagacgtgagccaccgcacctggcgattcaacaaaatttctatcaaaataaataggctttttcactgagagaagaagctaatcctcaaaatcatatggaatagccaggacaatcttgaaaaaagaatataaaattggaaagttcaaacttcccaactataaaactagctatgaagccacagtaattcaagtattatggtcctggcataaggacaaacatatagaccactggaatagattaggaagcccagaaataaatctttacatatatggtcatttgatttcctgcaaaggtgcaattcaatagggaaaggacagtcttttcaaccaatggtgctgggaaaactggatatccacgtgtgaaagaatgaaattggactacaacactcttagaagaaaacaggggacagttttcataacattaaatttagcaattatttcatggatataacaccaaaagcataaggaacaaaaaatatagataaattggacttcatcaaaattaagaacttttgtgcatcaaaggatactatcatgaaagtgaaaggacaacctacacaatagaagaaaatatttgcaaatcatatatccaataaggaattaatatccagaatatgtaaagaactcctgcaactcaacaacaacaaaacaacccaatttaaaaatgggcaaaggacttgaagagacatttctccaaagaagatatccaaatggccaacacatgaaaagatgctcaacatcattagtcattggtaaaatgcaaatcaaaacaacaataagatgccacttcacatcttctaggttggctgttttttaaaaaggaaaatagcatgtgttgctgaggaggtggacaaattggagcccttgtgcattgctagtgagaatgtaaaatagtacagctgctctggaaaacagttcggttgtttctcaaaaggttaaacctataactaccatatgacccagcaattgcacttgtaggtatacatctaaaagaattaaagaaggaactgaaacagatacttgtatacaaatcatagcagcattattcacaatagccaaaaggtggaagtaacccaagggtccatcaacagatcaatggataaacaatagatggtacatacatacaaaggaatattattctgctttaaaaagaaaataaatttatggccctgcagtggcttacacctgtaatcccaacactttgggaaggtacggttgaaggatcatttaaggccaggagttcaaggcttgagaccagcctgggcaacatagggagaccctgtctctattatttaaaaattatgaaggaaggaaagaaggaaggagggaaagaaagaaagaaattttgatacatgctacatgtacggcccttgaagacattattcttagtgaaataggccagaacgacagatattacatgattccacttatatgaggtacttagaataggcaaatatatagagatagaaagtagaatagaggttatgagggtctggggggtgggcagaagggggtgttgttgtttaattgatgtagagtttttgttggggatgatgaaaaagttttgggtattgatagtgttcatggttgcacagcattgtgaatatatttaatgacactgaattgtacagttgcaaatggttaaatgataaatattatgtatagtttaccacattaaaaaagttttccaatttaaaaagagatagattctagtcacattctaaaaaataatatcagaagatgagaagactgcacataagttatagaaagtgtgctttgggctttgtcttgttttatttttatttttgttttgtttgtttatttattttgagacagggtcttgctctgtcacccaggctggagtgcagtggtgcgatcacagctcactgcagccttgacctcctaggctccagcagtcctcccacctcagcctctcaagtagctgggaccaaaggcatgcaccaccatgcccagctaatttttgtaatgtttcataaaatcaaggtttcactatgttgcccaggctggtctcaaactgctgagctcaagcagcccacccacctcagccttccaaagtgctgggattataggcataagccaccatgcctggcccattgtcttgttttggagagttataaagataatgagtattttcagacattttcaaaaatatgtagataggccaggcgcggtggctcatgccagtaatcccaacactttgggaggctgagatgggtggatcacttgaactcaggagtttgagaccagtcagggcaacatggtaagaccccatctctactaaaaatccaaaaaaatagctgagtgtgatgatgcctgcctttggtcccagctaattgggaggctgaggtgggaggatcagtgcttgagcctggagggcagaggttgcagtgagccaagatggggccactgcactccagactgggtgacagtgggagacaatgtctggggaaaaacaatgtagataaatattatgttaatgttttaagatggggtctcaccatattgcccaggctggactcaaactgctgggctcaagcgatcctccatcctcagcctctgagtagaactacaggcatgcaccaccatgcctggctgattatgttaaattttaatactgaaagattatagattttgtctatagcttccaaactaacagggagggtagaaaagaattaaaacaaaactttactaacacaatagaaggtgggaaaagaaggtggggaaagggaaagaagaatggataatgggaaagacaaaataagatatcaggtcagaaattaatcagatacactgaaaagctactcgttaacatatagtgactgtaaggttgggtagagaagcagaatctagccatatgctatttacaagagatatacataaacaaaatgacctagaagggttattaaaggcacagaaacagatacaccaggaaaataccaatcaaaataaagctggtattgcaatattataataaaaatatcagactcaaagcctggaatttagaaaaattagtaagatatagactttcaatatttcctgtgtggctagcttcaaagatacattctacctggcatcacttacctgtctttcttatctttctaaatcaatttccacaaatatttatgagtaactatcagttaggtaatgagtcaggtaatatagtagaggcaaagatgagtacagcctaagtgcttactccatagaactgacagtctaataggagaaagtccagtaactttaaaacaaagtagcaaattgtgagcactgttagagagttttaagtgagatacgatggaaattgggcatgggagataaaatcaggaaaagactttacacaaaattggcatttgagatggtctttaaaagctataccaaagctataatttcactagaccatgacctagacatcagctttttcccccttagaatatgaagcacaatttgggactacttctttgctggacagtttcataaatttaggctacagtattatcatttcagacttcatttgctggaaatgtagcctactgcatttacctataacagctcatttgctgtattttttattttcctttccttaagacaatagcactgcgtggttaggttaacactttcattgcttttgaaagcccctcttctaacctaatcttttgccaggtgatgtccgcatacttcctcagggtgtcttagaagtagatttctatgctagctctccatgaaaggagaagagtatataatttgctttttcatacagtgctgttactattaggaaggaactaactttattctaaatgaaaacacactctatattaaagacaagttagatactttcccatgaagttggtctaggagaagggaaacggaatagatgcctcctgaaattttttcctgttccattcagagtcagatttttccccccctttatatggtcaacaaatgaaaactggcatttggaattaccatcgttccccccattgcttgccatcttcaaatttaatgtctgcctctccacaaagattaacatgtttccactcctgatttacttgtcagggaatttagaagttttctggaacctaaagttcactctggtagggatgattactggataattgcctattcttcggtggaatttccacttttagattacaccaggctctacagcctttatttctttggcaggaaaacccaaaggcaatggagtatatttttttcccttccctggcccagcttaaacaatgactcacttgggccctggggctttgcttcatactctcatttaggggccactttatacccttgtttctattttcctttcttgttctgtttggaccctttatatcctttggcacatgggatttgtctctggggttattgtcagagagatatataaaaccaccccaaactggaacagccactccagttatgtccccatagccatgtcatccttatggcagctggtataggccagggagagtacagaaataatatcttttttcttttttttttttttttttgagactgagtctcactctgttgatcaggctggagtgcagtggcatgatctcggctcactgcaacctccacctcccaggttcaagtgattctcctgcctcagcctcccgagtagctggaatgactggtgcacgccaccatgcccagctaatttttgtatttttagtagagacagggtttcaccatgttggccaggctggtctccaactcctgacctcaagtgatccacccgccttggcctcccaaagtgctgggattacaggcgtgacccactgcgcccagcccagaaataatatctttaaggaaacctaattccaaatgcagtagagggaaaagtattctccaaaaagaaagatatgagtgccagtgtcatccagttagaggctaaaaggctttcctccatatgcgttgctcgaatgactgattcagatgtcctctgtgtgtacctgtggaaggtgggaagcactcagaggaactggcctccaagagttttcggaaaggtatggttatatgaagagacttccccatagaaggactaggtctaatctagagttcagagttttgttggggagaaaaattccccgtttttggcagtggttctctctggtctcaatttttcattctgattccagccttctggattccatctaacaatgacttcttgacttttctctttgcagttttaacagtgtatgccagggaacacacattctctttcgagaattcagcttcgtccaagccaccccccacaatagggtatcatttttacgggccttctggagatgcttccgaactgtgggcaaaaatggcggtaagtcttcccaaattctttttccttccttccttccttccttcctttcttccttccttccttcctctctctctctttctttctctctctcttttcctctctttctctttcaaactttttcttttgttcctataaatattgtttgaatgcatgctattcaaggcatttagaatacctcacttttgaggagttgtctggtttatgtcaaagatattactattaccactaccatcactaatggtacctattaagagccaagtgtagctctttacatgtagtaactcatttatctttacaagggctctctgtggtagataccataatccccattttgtaactaatgaaactgaggatcagagaggttaagtaacttggcaaggttacatagtaaattctgggcccagatttatacccaggcagtctgacttcacagcccttgctcttggcagatattaaaatgccatgcagtaaatacaaggaataatgtgaatatgaagaaagaaactcctgaatgggggtgggatggggatactgttgttagagaagggagagaaaagtggagtagagaaggttctccttagaactgactgtttgatctaagctgggaaggaagagtaggaatcattcacatggataaaggagagaagggcatcctaggtagaacatatgctgaagcacaaaagaacctagaatacttacataacagatcaggatgtctagagtttgtgtggagtttatgaaggaggttaggggagatgagactgtaaaggaataatggagctgctgaaagatcattttttagccataaaaaagaaattgggccaggcacagtggctcagcctgtaatcccagcactttgggatgccaaggcaggtggatcacttgaggtcaggggtttgaaaccagcctgtccaacatggtgaaaccccgtctctactaaaaatacaaaaattagccaggtgtggtggcgcactcctataatcccagctattcaggaggctgaggaacgaaaatcgtttgaaccctgggggacagaggttgccgtgagccgagatcgtgccactgctctccagcctggacgacagagcaagactctgcctcaaaaaaaaaaaaaaagaaaaaagaaaagaaaagaaattggggctggatgtggtggctcacacctgtaatcccagcattttgggagcccaaggtgggaggatcacttgagcccaggagtttgagaccaacctggacaacatactgagacttcgtctctacaaaaaaataaacaaaattagccaggtgtggtggcacatacctgtactcacagctacttgggaggctgaggtgggaggatcacttgagctgagggaggttgaggctacagtgagtcatgattatgccactgactctagcctaggtgacagcgagatcctgcttcaaaaaaacaaacaaacaaacaaaaaagttaaattttattctctgggtattatttgaaggcttttttttttttaaagaccctgttgcagccgggcacggtgactcatgcctgtaatctcagcactttgggaggccgaggcgggcagatcacaaggtcaggagatcgagaccatcctggctaacatggtgaaaccccatctctactaaaaaatacaaaaaaattagccgggtgtggtggcgggtgcctgtagtcccagctacccgggaggctgaggcaggagaatggtgtgaacccaggaggtggagcttgcagtgatccaagatcgcgctactgcactccagcctgggtgacagagcaatactccgtctcaaaaaaaaaaaaaaaaaaaaaaagaccctgttgcccaggctggagtgcagtggcatgatcatatgatcatagttcactataaccttgagcttccaggctcaagtgatcttcctaactcagcctcccaactagctaggactacaggtacatgcctaccatacctagctaattttaaatttttttgtagagacggggttttgctgtgtggcccaggctggtctcaaactcctgggctcaaggcctcagcctcccaaagcactgggattacagatgtgagccaccatgccccatcttatttgaaggcttttagataggagagtggtgtggtgatatctgagctctagaaagatcattcaaaaggcagtgtagaagatggcctagactagagacaaggaacatagaagtctggtagtagttgagtgagagattagacccaacactaaggcagtatggagacagaaggggcactttcagagatagaatccataggatttggtgattggatttggcattaagatgagagagaagaccgtggtaatttccaagtttttggcttgggccactgggtaagaatattttttaaaagccttcaagtaatagccacagaataaatttcaatttttttttttttttttttttttttttttggagacagggttttactctgtcacccaggcaggaatacaatgacacaatctcagctcactgcagcctcgaccttccaagctcaggtgatcctcccacctcaagtagctgggaatatatttgtgcactaccatgtgtggctaatttttctattttttatagagttggggtttcgctatgttatccaggctggtctcaaactcctgggctcaagccactcgtccacctcagcctcccaaagtgctggggttataggcgtgggctaccatgcctggtctcctactttcatattatgtgttttcataaatacctttaagacaatttcttgcttgcttgcttttctttttctttcttctttcttgccttccttccttcgttccttccttccttcccctccctccctcccctcccttccttccttcccctcccctccccactgaggttatagtcagtgaataggtagtctccctgcttttgaatttatgagattccccaccatgctctaatcaatgctactgctacgaaactgtaacttttctaaatagctactaaatatatagctattaaacttttatatgtagttactaaatcttttctaaaacttttccacccaatatcttattagttccactgccctaagaaataggtaaagtgggtattattgtgcccattttgtaaataatgaaattgtgtaacttgcagaaagatttcatggtgaattagtagcaaagctagaaattgaacccagatttactaatatgctgatgtgctatttctactatttttacttcaatcattgcctctttgacatataactctggagatcatgcatctccattacagtattatgaaagaagtacttagtgtactgaggatcgtatcatttcccttacagaataaatgcactaataggcaaaaaccaatgtggactcaattttaagttaagtaattcagaaaaactattccattggtctctatgtaaacaaaactgggaactgtgagtatataggtaaagctcgtgctatgttatcagaggttatctttcccagtccctcactcagtcagcaaatatttgttttagaccacctagtacagtcgtctctcagtctatgcagggattggttccaggacccctgtttataccaaaatccacgcataatcaaggcctacattagtcctgtggaactctcatatgtgaaaagtcaatcttccgtatacagggcttcatatccctagaatagtgtattttcgatccatatttggttgaaaaaaatccacctaaaagtgtggacctgcacagctgaaacctgtgttgttcaagggtcagctgcatgttgaagaatatggctagagctagtttctgtgatagaacatatggagataactatggaaaacagtcttcagatagccttaacttttttcctgatatagaagtggggcctcttcaagaatgtatttactatcacgagggattcatatagcatttggactcttagcagatgtgggtttctttatctttctaatagcagctgccagtgactcatccagctgctaagaataagcagctccaaattcccccagtttctccttgtgccataaacaagacctagattttatgctggctgtttattgttatccttcttaatcagacagcctcagatttcttagactaaatgcaacatctgtgtctaggtgttcctaaaataattggttaagtagctttaatgtattctcagctttttctaggaaactccagaacatctttctaaaccagaatgtgtcaatctccaattttaatccggaattagtgaaaactcttggcggcaaggttctaaaggaaaggatttattaagccccattttatcaattataatgccaggtacctacctactcagtggaactcctactgcattattcttctgcagataacttccttagaatgtcatgtgcatactttagcattatcaagtggaaagtaactcttctgggaggtagcaaaacaagagcataacatatctaaaaatgaagccacctgtagaactctaaggacctggtcccttttgacaaaaaatattttattccagtttttagcaagtacaggatatgatatcttttctgcatgactgagtactgatgctaattatcttgtccaaattttagataatctcatgaagactgtaacaaacctcttggtatctaagcaactttagactcttggaagcaaaagttatattagaattttaaaagcctttaaaattacacttctcactttgctaattttttctgtataggaatattaatctgaattttctaagtctggcaaagattgatattctcttaatgtaaatctttacttctgtttagggatatcggctcaaaagtgccttctccaagtttattttcaattagaatttaattttcaatatatacatatatacacatacatacatatatatatttcatttgataaaataatgataggtacttcctcttctatctgtgaagaagtatctactaagggaattgccctcttgccactaacaatgagaaaatcagcatatctgaaacaacagttttcagacattgggcaataggcagtgggggctgtggattctgagagccagtttccaagcaacagtatagggagagagattgtcaaagagcttagcagtgttattgagttgaggaggcagagactggggtttagggaggctggagcagccagtatttacaggtcagaatccaagagaggaagaagttgttcagtgagctccagaatctttggctacaaattctgcatatgtgtgggctggaaaaagaaccaccagaaaacagtgggccaaacaatttctggagtatacaaggggctaaggataattcaaacttctaccagccatagggaagagacctcaaaacacaccgggcactgggtagagttctcaacagtttaaaagcaaaaaggattaaatcgatccgcaagtaatttaatgctatataagaacaaaattcaataatctttaaaggaatttaacaaaatccagcattcagcaatgcaaaattcacaaagtctgacatccaattcaaaattaccagacaggccaggcatggtggctcatgcctacaatcccaggactttgggaggccaaggcaagtggatcacttgagcccaggagttcatgaccagcttgggcaacagagcaaaaccctgtctctacaaaaaatttaaaaaattagccaggtgtgacacctgtggtcccagctactctaatggctgaggcgggaggattgcttgagcctggaaagttgaggctgcagtgagctgtgatcgcaccactgcactcaagcctgggcaatagagtaagaccctgtctcaaaaacaaaacaaaacaaaataaaattaccagacattaaaagaagcaggaaaatacagcccataaccaggagaaaaattaatcaatagaaacacagatccagaaatgacagagatgatggaattaactaacaaggaccttaaaatagttattttaaatcatataaatatgcttaagtatgtaaagaaaacatgaatatgattaggagattagtggaagatattaaaaagatccaaatggaatttctagacatgaaaaatacaatatagtgaaaatgataataatagcaattaacatttattaagtgcttctatgtagattatctcatttttcttcacaacaaccctatgtgttaggtagatgctattatttcctttgcatagaaaatgaaacagatttagaatgttaaataacttgctgtaggtcacacacccagtcaatgaaaaagccaatgccaggagaagccatgaagtctgactccaggctgtattattgcttcagcgtgttatgcatcaacactgcatgacaggctggaaatacaaatgagtaagtgacaatacttgccctcaaggagctcttattctaggagaagaaacagtagcataggaaccaacccaaatgcccatcaatgatagactggataaagaaaatatggaacatatacaccacagaatactatgcagccataaaaaggaacgagatcgtgtcctttgcagggacatggatgaagctggaagccatcatcctcagcaaactaacacaggaacagaaaaccaaacactgcatgttctcactcataagtgggagttgaacaatgagaacacgatggacacagggaggagaacatcacacaccaggtcctgttggggggctggggggtgaaggaagggaagttagagggcaggtcaatagttgcagcaaaccaccatggtacacgtatacctatgtaacaagcctgcacattctgtacatctatcccgttttttttagaagaaataaaataaactagattcttaattcaaccccaccccctctctgccaaaaaaaacctgagtggtgtagaaatagtctccatagagtacaggtgatttttagagccacacataagattccataatagcacaagggagaaaatagtcaattctatagaagcgggtgaaggctataaaggtgcaaagacagttgggatggatcttggagcagtagaaagctgttaagcaaataaggaatacgttctaaaaacagggaacacgatttctgaaagtatgataacatgaaacaacatggttcctttggaaagtggtaagaagtcattgtggccagtatttaacacataataaggaaacactaccacagtcaataggagataatgcggaatgcttttatgtgccatacactgagcaaaatgtttacatgtattcattcatttaatccacacaataaacatatgagttgatatgattactatcctgttttatatgttaagacacagagtccgctgggcgcggtgactcatgcctgtaatcccagcactttgagagcccgaggcaggtggatccttgaggtcagaagtttgcgaccagcctggccaacatggtgaaatcccttctttactaaaaatacaaaaattagctgggtgtggtggtgcatgcctgtagtcccagctactcaggaggctaaagcaggagaattgcttgagtctgggaggtggaggttgcagtgagccaagatcatgccactgcactccagcctaggcaacagagcgagactctgtctcgaaaaaaaaaaaaaagaaaagaaaaagaatcgaaactgagagtcagaggattaagtaactcacacaaggccacagcgcttataagtagcacagctcatattccaacctacgtcttcacaaagttcacattttcacattctttctcttttcttttcttttttttttttttttttttgtttgagactgagtctcactctgttgcccactcactgcaacctctgcctcccgggcccaagcaatcctcccacctcagcctccctagtagctgggaatacaagcacataccaccacacccagctaatttttgtattttttgtagagatggggtttcaccatgttgcctaggctggtctcaaactcctgggctcaagcagtccacccgcctcagcctcccaaagtgctgattacaggtgtgagccaccactctcaagcccacaaagtccacattcttaacaactctgctgtgcctgctaccccaggttatgaagggctttgtgtgcactaaaaagcataagaatgatacaatggactttggggacccggggaaaggatgggttgggggtgagggataaaggactacaaattgggttcattgttactgcttgggtaatgggtgcaacaaaatctcacaaatcgccactaaagaacctactcatgtaaaccagataccactggttcccccaaaaccctatgaaaataaaaaatttctcctgaagttagtagaatcttctccatttgtgtggtattttcacatgtaacacagacaaaagcatggaaaatgtaaggcaggtaaaagtgaaagcatagacccgttaggagactactacaatataacagaaatgaccatgaaaatgaagagctatttaagaagttggtttgacaggatttgctgattcattgtgtgagggatgtggcagagaaagagtcaagaatgaatgccagaatgtaaagtatggccagttttatccctctcttgcttttttcctttccttttttttctttcatcttttatgtttcactctgaattcacagtggttttgtgttcatatttattcattcgacaaacatttatgtatcagttcttggtgataaagcagtgactgggacagacagaaatttttattcttgtcaactttgctgtatgatcagaaaattgacaaaaatccctgcttttatagagcttacattctaggaatcagggaattgcagtgggtctatctgagtatgtgataaaaatctgttagtttttctaaaatatctattgtttatggtggacaaagtgatgtcaagggaaaatgcagacactttaggctgaaatgaagatgttggtctgacttctttttgtaattgccttgaacttcacttgattttgcttgtcactaatccttatcttcaccagtaaaaatcattcagtgaggattaatagcgctttactacaggagtgggtggctgtctttgaattattaaagagcaattgttgcttctgtaatgttttaaacaaacaagaactgttccatgtggtctcttcagtgatgtgggccccaccagccaattatcttcacctgctccagccagtgcatctcctcttctcattttctcccagaaaccagatgtagacaatcaacaagaatttcagtgcctgtttcctagctcccgttttgtttatttctcctgagttcctaattttccctttgtttttcatgtttatttccttcttcaaaatcttttctccagggagaaaattgacaattgatggcccctcaaatcattcacctctgtacctccaataactttaatctttccccctatttaatgttctcttttttttcaatgttggttatttggggctcttacgcaagcattcctggaatgcttttgtcactatcttctctcccacctgaagctcctcaaccctccatacataatacctgtaggttttagttttaaaggtcaggtccttaaagaagccttctctgtgactcccttccttatctgaattgggtccttccattataatttttcagattatcctctgatttttatcatatcatttattacagtttctgactcagtatttacttgaatgacttttaatgtccatctcccttattaaaattataaactttatgagtacaggaaccttgtttgttttgccagtaattatatccctagcacctaatacaggtgaatgatttttttgttatataatatgaaggcttaccttttcccagtaatgatacagaagatagattattgaatggattatattatcattcattttatcagaggataggttagtttttaaaatctgctttacactaacttttctatattgtataggaacttctgatttaaattaataatagctaccccttattgagcaaatgctatatgccaggtactaaagttcatgtttaaagtgttccactaaaaaccagcctaatcaaagctatactatactaaataacacctaattaaaataatattcagtattccaaaataaggatttgaaagatttagatcatgatctgtaatcaaactttaaacactggtgaatagtacatccgttccttcttttgtattctgggtttttgccttcactccatgaaaggtatcacaaactagtagtcggctaactacacatgccttggcctacagatgtgtcttctttgactttcagtgttaaaaatacttagattcaattagatgccaatgtttcacataaaagtctcaatttcagtttcacttgaagaatggaaaatcctcccagcaccatgcccacattcctgcagggagacagttcaccagggcagagatgcagctgctccctttagacagggcatgtggtctcagatttaccaccaacccaagctgccctgcttcacctgctgacattccctgcgcgtctgtaggcattggagtttgctaccattgctagagcttcttggtccatttataatcactaaaaggtaaagtttcactcttaattcagtcaggagctttttcctcaactattaatagattctctttctcttttctccttgatatctccatgatatcacataaaattttagaattagaagggaccttagaaattatttcatcttgaaactaggtcttaaatatatatatatggtttttcttattattgtggtaaaatatataacaaaatttaccatttaccactttttaatttgagaaatcttttttatggcaataaaacctatataacaaaacttaccactttaaccatttttaagtgtacagttccgtggcattaagtacattcacagtgttgtgcaaccattattaccctccatctccaaaactctttatcttgcaaaaccgaaactcagtagccattaaacaatgactcccatttctctcctcctccagtccctagaaaccaccattctactttctgtatctatgtatttgactattctagatacatcagataagtgtgtacaatatctgtccttttgtgtctcacttatgtaacttagcatgatgttttcaaagtgcatccatgttgtaatatgtatctgaatttcattcctttttatggctgaataatattccattgtgtgtatataccacattttgtttattcattcacctgttgatggccacttgggttgtttctacattttcgctgttgtaagtaatgctgctatgaatgtaagtgtacaaatatctttctagtccctgctttccattactttgggcacataactagaagtgggattactgtaccatacagtaattttatgtttaattttttgaggaactgctgtaaagttttctacagcaggtgtatcattttacattctcaccagcaatgcataagggttccagtttctccacatccccaataatgcttgttgctattttctatttttctgataatagccatcctaaagaatgtgaagtggtatctcatggttttgatttgcatttccttaatgacaaatgatgttgagtgtcttttaatatgcttattagccattttatatcttctctagaggagtatctattcaagccctttgccctttttgaatcaggctgttttgtcgttgagttgtaggagttcttcatgtattctggatattcattccttatcaggtatatgatttgcaaattttttttctgttctgtaggtcatcttttcactttttttttatcatatcctctgatgtacaaaagttcttaatttcaatgaagtccaatttatctgtttttcttttgtcctctgtgtttttggtgttatatctaggaaatcatttacaaatccagtgtcatggagatttcccctatgttttcttctaagaaatttctagttttagctcataaatttaggtatttgatcaattttgagttaatttttatgtaaggtattaggtaagggtccaacttcattcttttgcacgtgcatattcagttttcccaacaccatttattgaaaagactgtcctttctccccttgaatggtaccctttgcacccttgtcaaaagtcaaatgaccatatatatgaggatttttgtttctgggatttacattctcttttgttggtttgcctgtccttatgattactgtggctttgtaataagttggggtttttttgttttgtttgtttgtttgtttggtttgtttgttttgagatagagtctcactctgttgcccaggctggagtgcagtggcacgatctcagctcaccgcaacctccacctcctgggttcaagcgattctcctgcttcagcctcctgtgtagctgggattacaggcacatgctaccacacccgctaatttttgtatttttagtagagacggggtttcatcattttggtcaggctagtcttgaactcctgaccttgtgatccacctgcttcggcctcccaaagtgctgggatgataggcttcagccaccacacccagccttgtaataagttttaaaatcaagaaatgtgagtcatccaactttgttcttcttcaaggttgttttgggtattcttggtccttttaaagatattttatgaatggttttttctattaaaaaataccattggaataccattggaattttgataggattgcagtgaatctatagatcactttcggtggtagtatcaccttgacaatattaagtcatttaatctatgaacataggatgtgtttccatttatttaggtcatcttcagtttctttcagcaattttttttttaagagaaagtgtcttgctctgttgccctggctggagtgcagtggcacaatcatagctaattgtagccttgaactcctgggctcaagcaatcctcccacctctgccatcaagcccagctaattttttatttcttttagagatgaggtctcactctgttgcccagactggtctcaaactcctggcctcaagcaatcttcctgcctctgccttccaaagcagaggggttgcaggcatgagctaccacgcccagcctctttcagcgatgttttgtagttttcaagtatacaagtctgtcacctccttggttaaatttattcctaagtattttattcttttcatgctattgtaaatggaattgtttttcttagtttccttttcatatttttcattgttaatttataaaaatataattgattattattattattatttttttgagacaaagtctcactctgtcgcccaggctagagtgtagtggcgtgatctcggttcactgcaacctccgccacccgggttcgagcaattcacctgcttcagcctcccaaatagctgagattacagggacatgccaccaccccagcatgtaattgatttttgtatcttgattttgtatgctgcatctttgctgaattcatttattaggtctaacagttgtgtgtgtgtgtgtgtgtgtgtgtaaaatctttagggctttctgcatataagatcatatcatctgtgaacagaggttattttatttctttctttctaatttggatgccttgtgggttttttttttttttttttttttttgtttgtttgttttttccttaattgctctggctagaacttcctgtactatgatgaatagaagtagtgaaagcaggcatctttgtctttttcctgatcttaggggaaaagtttttcagtacagcaggtcctcaaataacataattgcattataacattgatgaggaaaaaaaaaattgattcccagctggggccactgtgtgaaatttgcacattctccccatgtctgcatggattttctctgggtactccagttttctaccacagatgtatgtgttgggttcattggtgtgactaaatggtcccagtgtgagtgaatgttggtgtgtgtgtgtgctccccgagatggaatgagatgtcctgtacagggctatccaccttgtgtcccaggcttccaggataggctctggccacctgcaaccctaagctagaataagcaggttggaaaatgaatgaatacaaattattattgaatacaaattattatcaaatacaaatttataaagtagatgataatcatacaactgcacaacaataagcgatgaggtatgaaagcgttcagctagcccaccatatttgtgattgttttttaattcatggtcggaggaggtgctccttaaatttttctatttgcaaatatctattcccttatttaatccaccaccactacaactgtcgtcattcagcgattcaccaaaaattgggtaatcttacttgttgttattaacctttcttaaatgtatgtatagcccacatttatttcaatgtttaatattagaggtgtgtagggtctttatttagaagttgggtgattatttgtgaccagaaacatgccataggaacttaactcttgtttatgtcgattagcctatgatgaaattggttttattataccttgtttcacttaaagtcagtttccaagaacctattgatgaggttgaggacttttatttggttttaaggtaaaagtgtgccaaaaaattgagattcatacagataagtagcttcaaatactaatagatttgtttttaacattttgactgatctttttttagctttactaatgttcagaaagggagtaatagtaaatttgtgtttcaaagctgagttgctcacattcctaattaatgagtaatcactctggagaaatcaacaaattttctcagctagtttaaaaattttattgtttggagaaaaataaatgtatattataacatcatatataagttgttcaatggtattattttttgaaaagatcagatgactcaaaggctagtatgactgaactgtgtctgccccccccaaattcccatgttgaagccatacctccaatgtgactatatttgaagaaattcctcctgtaaggaggaaattaaggttaagagaggtgataagggtagggcttcatcagataggaaggattagtatccttgcaagaagagacaccggaactggtgtccctgtaagaggagataccagagagctgcccatgcccctccacgtgaggacacagtgagaaggcagctgtctgcaaaccaaggagagagcctttaccagacaccaactctgctggcaccttgatctcagacttccagtccccagaactgtgagaaaattaatttctgctgtttaagtcactcagtctatggtatttgttacggcagcccggacagactaacacagaggtcttctttttaactcacagtttcagcacagaaagattcattttattttgcatgttgactccaaaacctgttttgatttatcattaacattttatctgaagttgtgagtatggccgtgttgtgaccctgcgttatcaaattgagccatctaatttatttccacattgataaacttatattcaatggattttagtttaaggtagaaataatggtaattactttttttttttaactgtagtcctcatacctgccttatgtcaatcaggaaactttagtataaaagaataaattttgatacaactgcttatatccctgcaaataactcagaaagatctgcagcttaaagactttgtcctaataaaactgacagcctgtatcaatctgtatgttatccaatgtaatattttttaaaatgtaaatgttaattttgaaaactgcatgtgtaattttggccaggcacagtggcttatgcctgtaatcccagtactttgagaggctgaggtgggcagatcatttgaggccaggagttcaagaccaacctggccaacatggtgaaaccctgtctctattaaaaacacaaaaattagtgaagcacggtggcgcgcgcctgtaattgcagctactcaggaggctgaggtgggagaattgtttgaacctaggaggcagaggttgcagtgagccaagatcatgccactgcactccaatatgggtgacagagcaagactccatctcaaaaaaaagaaaagaaaacttcttgtataattttaactgctagtgcttatctacacaatatttttggctgccttctcttttatgtgatcctctactccttgaatttttttctgccattgcctttccagtcaccgtacaaatatgactaccttatactactttgttagtatcttaacacttaaagacttccattttataattatcaagcattttataaaataataaatttactttgcatttgcttctataccagatcatataagtaaaaggagagcttgacaacatctgtcttctcatccagtataaagattttatgtaatctcagctttcatgccaatatagtcctggattaaaaagaaaataaaaagaccagagcagataataatttcctaatcagtggcacatttacagttgcaaatatatatatatatttgtggagtaggagaaattccacaaatgagttaacctatgagcacaggttgatagtgtgtgtatattaaaatttactgtgtaacatatttagtgtacattttgtttttcttatagactttaaataaaagtatgtttttaataagaattgaaattaaacttttatagaaacttctaagtgcctctgcaaatttctaagcttctgtggaacatggtttgaaaactactgatctacttcaacccttccccattgtgtaaatataaaaatcaaagccaaggtctcctagtcacttggtaggacctgtaaaaccaagactaaattcaggtcttctggttgtcagtcaaatgttctagccattatcatgctctgctgctaaatgaacatatacattttgtgtcatttagtctctgagatgaatgtatgattttgtagcccaaaacgtaattgtagtagttaaggcataagaatgcattgcccatgtgattttatttcttctttcattgttttacagatgaaggtaaagtagctacaagttctttaattttaagttccattttacctatcttcaagagaaaaaatagttactccacctggtttaaaatttaaaaataataattcttattagagagggacgtataatacttgtttattggatatttcatgctttgaaggacataataagcagattttggaagttctttgaaaatacaagagttttattgttgttgttgttgctgtttattttattattattattttttttttgagacagagtctcactctgtagcccaggttggagtgcagtggcacgatctcactcactgctacctcctcctcctgggtcctggttccagcaattctcctgcctcagcctcccaaatagctgggattaccggcatgtgccaccatgcccagctaatttttgtgtttttagtagagacgggggtttcaccatgttggccaggctggtcttgaactcctgacctcatgatccacccgccttggcctcccaaagtgctgggattacaggcatgagccaccgcacccggccgttgttgctttttaattttaaagttaggctgaagtgagactgtaacacacaacgttattaaacgcattctctaaagtagatctaccaagccaggcacagtgcacatgccggtaatctcacttgagcccaggagcccaggagttggagaacataagtgcactatgaatgtgcctgtaaatacccactgatctgcagcctgggcaacagagtgagacaccatctcaaacagggtgggtggatggatggagagagggggagagagagagagagagagagctggaagtatgtaaaagcaaatataaataatgttgaaaatttaatattttccagttttattttgcttggcataacctgctcttgattcccactgataccgcctgaccctaatttagaaacctaattagacaccttggggaggttgtcaaaaagacagattccttgatcccacctcaaacgtactcgaccacagccagcaggcaaggggcctgggaattaattttaacaagcatttcaggtgattcttaggatcactcaagtttgggaaacattaagcggtttcaaccctgcttgcatattaggatcagctagggtgcttttaaaaaatactgttgcctaggtccctccccagaccactttaatcagaatctttttggttgggacccaggcattttaaatgctctgcaggtggttctcatacacactgaagcttgagaactcctgcaagacagttggaaatgtaattctctgaagcacagccctggtcttgtcactgctgctgagaacctcaatggttctgtattgcctactaatgaaatatgaatttatgactatcataaggctactcatgacccaacaccagctttccaaccactactctcctacttatagactatactctggccacacagaaacactttccccaaacactccttgtgctttccccctttcacacctctgtttttgctttcccaccatgtagaactttcccccatgtctgtctgtcacagtcctgcccatcctcaaatagacccagctcaagtagattcccatttcctcctgtccttgccctcccctgcctccattcaaaagcgacctcttagggcatttgtcctatcataccttatatttagttattggcagatacatagtctctttcataaaatgccatgtggaattaagaataagtggatttttatctttcctttttccccatctagattgtaaatttgtaatatcaactatctgtttacttctgtgtgaggcactaaagagaaagactttagagtcaaatggccctaggttcaggtgccttttttattggatatggctgtgtgaccatggtcaggttaatttttccaagccttagttttctcatctataaaatggagaatatactacttcagtgttgtgaaaactagatttgataaccgactggagccttcagtaatcccggtatgtaataactgctctgtcaaagtctgttgcttttatcattgtgataatgatcattgttagctcccttgagggcaaagactgcatattttatctttggatccccattctgaaccttgcttattgtaggtgcttgataaatactgggtgaataaaataatgaatgcctgctgggtcgtgcttacttatatagtccactaccaatcagttcagcctgtcttggaaggagcacttcaaatttcaatttaaccatcagataaagatagaaaataggatttccactacaaactttaaaaactgtattaaaaaggccaaaaccccagttaaactgtaagacagctgctctctttctgctgccaggaaatagagaaaaccctccaaggactatttgctgtttgtttgtgcatcatataataaacatgctgtgacttggggagagcacacacttcccctgcaggcaagcttgggtttgggaagttgcatgtagcagcagtgaggaagaaatcccccactctgtgggagaggttccttcacggactccactaagcccatttgcagttttgctgagttatttactaagatgaagggactgggtgtggctggtctgagattcctcctgggaagtcacttcaagaatctccttaatttcctcacccttcatctttgttctctggctttggtgcaagggtgcagtcagtcgcacccagttggctgctgttcccagcacactgaattatttgaagctggctgtggcagccaaggattccctgttctgttcttttccccttgccctgatttgaaaaacggtctggaaattctcatctggcatgaccagaaggaacttagtaggttgcaagctgtttttctagatgcacaggaccaaacagaacctttaaagctgtaaattaccatttctcaaaaactcaatttgatggattttacatggacaaattatataacgtaggctttaccatcaccactatcgtttaaacaagaggccatccaattgagatgaaaccgatataggaaagtaattatcatcagctttgtcacttgaagaaggaatgtgaggatatattagctaattgaaacctcaggaaagatgtataacaaaacatataaggattaatgagtagtccacaaaagtgtttaccagatgaccaatatcttttaaaatatatagatgtattccagctcttttaattagaaaatatatatatatacacacacacatatatggataaaaaatgaacttataattacaatagatgtgatgacaaaataattcatagtctgaaaaatatataatttcagtgatcagagccttatgtattatgctaattgtccaataatttcttgaaagtatgtttctacttttaaagtaaaattaaattcagaaagcaatgatgagcaaatatgtgataatattctaggcagacactgaacatttatatttattgtgagaacagcatgatggtagagtactatttatataaaattatgtatctttatgtctttatatgtttacatgcatacaaaaatatttggaaggaggtttactgaaatgttgtgaatgattttctcttagtgttgagactacttttttcttcacacatttttatattgtctgagtttttataatgagcatataacatttttataatcatagtaaaaataaagctatttttatagctttcatataggaaaattttgcttgagcatctgctatgtgtccaaagtggtactagaaattatgagatataggaaagaaggctgtggcctggctaccaagatgcttacaatctagctgggaagacaactagggagtgggatcctatagaatgtaatccggtgtcgggatgtatggttcaaaaaggtgctacggagcatcaggaagaggagaggaagctctcaatggaaggaagctttcatcgaaaatgaagattaggctgggtgcagtgactcatgcctgtaatccgagcactttggggggccagggtaggagggttgcttgagcccaggagttcaaaaccaacttgagcaacatagtgagaccctgtatttttttgagaaatattttaaaacttagaaagaaagaaaaggaagcttagattggaccttgaaagatggacaaaaattgaataggagggagagaagaaggcattttaggcagcatgagcgctaaagtgataataataatgctttttgaaaagaaaggaggaaaccagcttgtctagaataaaaagtaaatatgatttgtgatggagaagtttgctttattgctaagtttatttcataagatatctttgatatattacaaactatatttttgtatacttgagcaggtcctagaaaaatattttgtaattattctgaatattgactctaaagtgatgtaaaaactatgactactatgaaaaattcattattttagtgtattgagggtagaagatttcagtacatatgctgtgtaacactgtcatctctgtgcacaagcttgttctcaagtcaaacagtggcttttcatatagtcttttaatttgtggttaatatgttcctacacctttcttcttctattaaaaaaatcaaattagccgaacgtggtggtgcacacctgtaatcccagctacttgggaggctcaggcgggagaatctcttgaactcgggaggcagtggttgcagtgagctgagattgcgccactgcactccagcctgggcaacagtctcaacaacaacaacaacaaatcaaaaagcaccagttgccatggctcatgcctatagtcctagcactttgggaggcaaacatgggaggattgcttgagcccaagaatttgagaccagcctgggcaacacaatgagaccaacatctctacaaaaataagaaaaactcaccaggcatagtggctcacgcctctggcccagctacttgggaggctgaggtgggaagattccttgagctcaggaggttgaggctgcagtgagctgtgatcatgccactgcatttcagcctgggcaacagagcaagatcctgtctcagaaaaaaaaaaaaaaaaaaaacagaaaaaaaaaaatcaaaactaaggttggggaaggggggaaattttcttttaaaaaagacattaagatggagacttttcaaacaatggaatcagaattcacttttagcagttacttagttaacaggactatattctgtttgtagtgtataccctaaatgctgtagccatgtaagtgataattacaatgtatacaagtcttcctgagaaccatatatttgaaattttaagtacaaaatgtcagccataaagttttccttattgaatttgtgtattattaagtgctttcaatgttcaaagctctatgccagatgaaagatatacagggagctccctcattcatcgattcgtttattcaacagtatttttttagtgtgtcctctgtgccaggtattattctaggtgctggtactaaaagaataaggagaatatagttctatttttaaagagttcacagtctcgtctgaaagaaaatggacatgtaaatagttatagaccctctagaaagtgtcaggccaaatacatgtgtttatttgctgtctctgtagagcacactaaaattgtaatacgtcaggtgtggtggcttatgcctgtaatcccaggactttggggaggccaaggcaggaagatcacttgaggtcaggagttcgagaccagcttggccaacatggtgaaaccccatatctactaaaactacaaaaattagccaggtgtgatggcagatgtctgtagtcccagctacttgggacttgaggcaggagaatcggttgaacccaggagacagaggctgcagtgagccgagatcgcagcactgcacttcagcttgggcaacagtgcaagaccttgcctcaaaaaataaataaataaaataaaataaaagtataataaagagggagaaaagatgtaaaggcacaagaacaaaacaaaggaagacatgacaggaaataatagatatccaccaaattttagacggtggacagcagaagcataagtaaaaactgatttggtaaagaaaactgatgtataactacttgcaaaaggaaaaaggtatgtttgtgccatagaggcctaaaagggttcaagaattggaggtgggttcaagaattggaggtgtcggccaggcgtggtggcctcacgcctgtaattccagcactttgggaggcagaggcagacagatcacctgaggtcaggagcttgcgaccagcctggccagggtggttaagccccgtctctacaaaaatacaaaaattagctcagcatgatggcaggtgcctgtaatcccagctactcaggaggctgaggcaggtgaatctcttgaacctgagaggtggaggttgctgggttgctgtgagctgatattgcgccactgtactccaggcctgggtgacagagcgagattcattctcaaaaaaaaaaaaaaaaaaaaaaaaaagaattggaggtgtcaagtactctgaaactgggagtgagaggggagctgaaaataagaggatatattgaaaatcattatgaggagcaattagatccccagatccctcccccaacttcaagcatcaaggtcactacccttcattccatagaagactggagatattaaactagaggagctcttgactcaggagcaccagacacagagcgtaggtgagatgccctagtgaaaaaagattgtcaatgtctatctgctaaatgttgacatttattttccagctcccttcccttgcttagctgtcagaatgctggcttccaaatgaatataccccaggtgggattctggaatattttctggagaaactgaaatagcctcagaggaagtccctacaaatctgacatttaggagttgcacaatgaaatgaccaggtttccgcccattcattctacagtgaagctcaatataaacaagctccaattcattcagataaccagttttttagtacctcgcaccaaataggaatgaacatattcaggtattcaaggatcaccagaaatttgggggaagtctctaatatgatagccagaagccaaaacaaaacaaaatagaggccaggcatggtggctcacacctataatcccagcactttgggaggccgaggagggcagatcacctgaggtcaggagttcaagaccagcctggctaacatggcaaaaccccgtctctactaaaaatataaaaatcagctggccatggtgcctgtaatcccagctactcgggagactgaggcacaagaattgcttgaacccagtaggcagatgttgcagtgagccaagatggtgccactgcactgcagcctgggtgatggagcaagactctgtctccaaaaaaaaaaaaggaacaagaaagagttcttagaaagtaaacattgtaatagctgaaagaaaaattcagtagatgggttgaaagatcaagaaattacccagcaaaggcaaagaagtagaaaacaggaggaaaaaaaaaaaaaaagaaaactgaaggcccagtccaggagtataagacctaaaaatttgaagttctagaaagagaaattggaagaactagaatgccatcaggcttctcaacagcaacatgagaagcttaaaaaaaaaaaaagtgcaatgcttttagaattctaagagaaaattattttcaacctagaattctgtaccaaaccgaactatcaatcaactgtgaggataaagttgtttttttttttttttctttttagacagagtcttgctcttgtcgcccaggctggagttcagtggcccaaactcggctcactgcaacctccgcctcctgggttcaagcgattctcctgcctcagcctcccaagcagctgagattagaggcacccgccaccacacccagctaattttttgtatttttagtagagacgggtttcaccttgttggtcgggctggtctcgaactcctgacctcaggtgatctgcccacctcggcctcccaaagtgctaggattacaggtgtgagccactacacccagccgaggataaagatttttagatgggcagggtttcataaactttaacttttatgcagcctttctcatgaaactactgaagagtatgttttatcaaaaagtgagaataagtttaggaagatgaaattatgagatctagcatcaaggggtgcaacacaggagagaaagaaagagaattcttagaatgataatggaaggtagttgcaggacaacagtttgtgcaagacagctagaaagcaattcagattgaagtagcaggacagaaggctctaggaggaatttctgcaggaaaattaaataatagaattgattatctgttgtgtaaaaaaattgtccaaccttcagttggagaattagggtttaatacttcagttgaagaagcactgattaatacttaaaaacccccacaaaccgagaaagaaataatcattctaagaaaaacaaaaggttgtataagaaagaaaatataataatataccttgtgtttttgctgtgcataatatttacatagtcataaatgagtaaatactgaatattggtaagccaaaattagtatcatgaaaagatggacagatgggaagtatatgtgtgtggtgaaaaagataatttgtcatcttcaactgaaagttaaaagatgtctaacatttaaaaatcaagaaatagcagtataaacatattatttaaagaagcaaagcaaaaaacagaggactcagtgagttttgttaagtatgacaggttagaagaattactacagtagtttggttggggtgaaatgagttataacttccaagagaaccattttagttgagtgacggaagcaacgttgaaggagttactgagtgaatgaatgggtagtaagaaagaggaggtaatgagcatagcatactcctctgagaaatctggctttgaaaacaaagggaggagaaagcggtgttagtgagttgagtctatgaaagattttttagattaagacaccacttagacatgtgtgcatagacagcaaggagttaatggagaaggtaaggtcaacgatgcaagcgtaaaggggatagttggtggagcaaggtcccagaaactgagataacatggactcaagagcatagatggaaagattaattgtaggaagagaagggaaagatttctttctctgaaagaaggaaggaagaggtgcagataagtgaaaatgcagagaaatattaaggtataaaggaaggaaattgagggacttaaaaaggtggcttcagtcttctcaagaaaataagaggttctctgctgagagtttggatttggggcataggattagcttggaaatttgagaatggaaaatatctgaaggcatgtgatgccaagttaaaaggagatgactaaaatgattatccagtagccacgagtgtccagttgaggttagatagcagaaatttgtaataaagccaatcaatatggtttctggacttccctcaagaacgttctatctccaaaagttgtattaatcatcatcttggctaggatggcgtttccttggagtgtcttaagagacattccagggttcaaaaactttagaaaatgcttgctcaaggagagtcagtgctcaagaataccagagagaaggttttcttgtgggacacttcaatctaggtcattcggaggtcttgtgggggatcatgagcaacgaaaaagaaatatacttgagagacttaaatgacacaaaacagtttgatatcaaaaagatctgtagctgcatggacatctggacacaaatctgagggtgagagcgtgttggagaacacctggattcagataaaagaagagcagaagagaagtgacatcattgtgggattagaatatagactacctagccagatggaagaaatagataaagcatttctgatgcagatcgcaaaactggcctgagtcaagagagcttggtgatagggatttcaagcatcagcacataagctcaaagtcaagttcagccaaaagctgcatacttgattaattctttttttcctgtttgtttatgtttttctgatcaaagaaaaacttgctcattgtagaaatgtagtagtacaggaaagtgtaatgaagtagaaaaataatcactcataaatccactcaccattaaaatacttgctaattatttctagtatttttatgcattgttgtctttgcatagtagagattatgctgaatatacatttgtctaaactgttttttaacataaaagacttttctcatatatatttcttatatatctcatatattttcatatatatctgaaattctttttatatgttcatctttcagaaggaagaaatacggccgggcgcggtggctcacgcctgtaatcccagcactttgggaggcggaggcgagtggatcacttgaggtcaggagttcgagaccagcctgaccaacacggtgataccccgtctctattaaaaatacaaaaaaatttagccgggcatggttgcacacacctgtaatcccagctacttgggagggtgaggcaggagaatcacgtgaacccggaggcaaaggttgcagtgagccaaggtcatgccattgtactgcagcctgggaaacatgagtaaaactccatctcaaaaacaaacaaacaaaaaaaaggaagaaatatgagataggagtccaagatatatataattataaaaataatttcagggccgggcgcggtggctcacgcctgtaatcccaacacttggggaggccgaggcaggcggatcatgaggtcaggagatcgagaccatcctggctaacatggtgaaaccctgtctctactaaaaatacaaaaaattagccaggggtggtggcacgcgcctatagtcccagctgctcaggaggctgaggtaggagaattgcttgaacccgggagatggaggttgcagtgagccaagatcgtgccactgcactccagcctgggtgacagagtgaaactccgtctcaaaaaataataatttcactatttactctttgctaacattatttccatttttctgaaaataaccagtcaatgctactgtattaggcaggaaaaagaaataagaggcataaaaattttaaaagagaaggaaaaattacatgattgcaggtgatatgattacttagctggaaagcccaaggtaatcaaattgaaatctattataaacattatgcttcagcaaggtagatggacaaaatatactaaaatcaataatttattttaaaaaataataagggccaggtgcagtggctcacacctgcaatcctagcacgttgggaggccgaggcaggcagattgcttgagcctaggagttcgagaccagcctgggaaacatggtgaaactctgtctctacaaaaaatacaaaaattggccaggcatagtggtgtgtgcctgtagtgctagctactgggaaggctgagatgggaggatcacttgagcctgggagtttaaggatgcagtgagccaagatcagaccactgcactccagcctgggcaatagagcaagaccccatctcaaaaaaaaaaaaaaaagattacatacctaggaagaaatgtaacaagaatatgaagagagctttaaaacactactggaaacaaaaaaaagacttggacatatggaaaggcatggtatgttcttaggaagatttaaaatcataaacctgtcagtgctccttaatttaatctataagttaacatgatctccctaaaaaaaaccaataggactttttgcttatttgcttatttttttgagagaaatgattgtaaagctcatacagaaaaaatatgtagactaaaataaccagaaatatcccgagaaagaaaagaaataatgagataccagcctcgttaatatctataatagatattaaaatctgttataaagctataataattccactataattgctaacaataaacactgtgtgccaggcactgttctaagctctttaaatataacaattcatttaattctcataaaagcccgttgagattaacctactcaaactcacactgccaataagtggcagagctcagatttgaactcaggtgctagctccagaacatgtactctctccatcaccacactcttcatcaccagcacatttgttattgacatattaatagacaggcaatcaatggaccagaatcagaagcttagaaattgactcaaatatagaaataaaattaatctacattggggagagcatttaaattaatgagcacaactggtagccatgttaagaatatgatattggattctttcctcacatcttatatgcaaacaaattctagatggatcaaaaatttcaatataggccagctacagtggctcatacctgtaatcccagcactttgggaggccgaggtgggaggattgcttgaacccaggagttcaagactagcctgggcaatgtaaagaaatctgtctctacaaaaaaaccttttttttttttttttttacagcagggtgtggtggcgcacgcttatattaggttggtgcaaaggtaattgcggcttttgccattcgtagcaatagtctcagctactcgaaaggctgaggtgaggggatcacttgagcccaggagttggaggcttcagtgagccatgatcacaccactgcactcccgcctgggagacggagtgagaccctgtctcaaaaaaaaaaaaaaaaaatacaaaaaacaaaaacacaaacatgaagaaaccacagaaagatgttcttacaatctcacagaagggaagatgtttctaagagagctgataaaaaaaaacctggaagccataaaagaaaagattgatatattttgttgcagaaagaggaaaaatatttgcttgccaacaaatactgtaaacaataacaaaagattaacaacaaacagaaagtatttgcaacttatatcacagatgaagggctaatttccttatatacagagttcctaaaaatcaataataaaaataccaaaaactcagtagaagattgaaggatgaaaatgaacagagtttatagtaaaggattgtataagtggttctttaaaaattatttttaataactagattgagatataatttatataccatacaattcacctatttaaagtgtacaattcagtcgtttttagaatattcagttgtaaaaccatcaccaaaatcagttttagaatattttcatcaagccccctctgccaagaaaaataccccgtacacattagcagtaactcccctttttccccacccacaaactcccagtcctaggcaaccactaacctactttctgtctctgtggatatgcctattctggacatttcatatagattatatatagatagaatcatacaatatatgggcttctgtatttggtttctttcactcaatgttttcttttctttgtttttatttaagttcttggggtacatgtgcaggatgtgcaggtttgttacataggtaaatgtgtgccatagtggtttgctgcacagatcaacccatcacttaggtattaagcccagtatgcattagctattttttctaatgttctccctcccccgacctcaccccccaacaggccccagtatgtgttgttcccctccctgtgtccatgtgttctcattgttcagctcccacttataaatgagaacatgcggtgtttgtttttctgttcctgcgttagtttgctgaggataatggcttccagctccatccttgtccctgcaaaggacatgatctcattcctttttatggctgcatcacttacagttttcaagatttatccatgttgtaacatgtatcagtactttattcctttttgtggccaaataatattccattgtatgattataccacattttgtctatccattcatccattgatagacattggattgtttccactttttggctatcatgaataatgctgctgtggatgtttgtatacacacttttttgtgaacatgttttcagttctcttggatatatacctaggagtggaatattgggtcatatggtaattctgtgtttgaaagaacagccaaactgttttccaaaatgcctgcactctgttacattcccagtaacagtttatgagggttacaatttctccacattcttgccagcatttgatgttacgtgtcttttttattatcgccagcctagaggtgtgaaatggtatctcactatccttttgatttgtattttcctgatgactaatgatgtcgaacatctttttacatgcatattagccatttgtgtatcttttctggagaaatgttcatccacattgtggaatgtatcagcacttcattcctttttactgctatgtagtattccgttgtatgaatatagcacactttgctttttgtttgcttgttaatgtacacttgggttatgtacagtttttgcccattatgaataaatcttctaggaacatttgtctccaggtctttttatggatgtatgttttcatttatcttgggtaaatacctaagggttgaattactgactgctttctaaaacagttgtaccatcttacattcccaccagcaatgtatgagaattccagtttttacaattgcttgttaacatttggtattgtcagtcttttgcattttagccattctagtggttgtgaaatgaaatctcattgtggttttagtttgcatttccctgatgactaatgatgttgaatactttttactgcttgttggtcatttgtatatcttcctttgtgaagtgtctcttcaaatattttgcccaatttttagtgggttgtttgtctttttattatccagtggtaggagttctttacacattctggttacaagttagatatgttcattacaaatattttctccctctgtggcctctttatttatttccttagtgatgtcttttattgagcagaagttttaattttttagcattttttttcttttatggttaatgccttctgggtccagtctaaaaaatctttgcctaccctaaggctgtgacagtgttaccctatatttccttctaaaagcaatagaggtttaacttttatgtttaggcctataattcatcctgaattattttttgttggtagtttaagattgagggtcaaggtttttccccgctcccctcatggatagccagttgagacagtatgatttattgaaaagactttccttctcctacttgttgtggttcctttgttaaaaataaataaataaattgaccatgtattaatatgtgcatatctatctctggattctctattctgttccattgatctaaggtagtgtatgcccttcaactttttctttttcaagattgttttattcattcaaggccctttgcatttccatataaaatttagaataaactggttcatttctacaaaaaaagcctgatgagaattggattgaaattattaagaatcgccgggtgcgatggattacgcctgtaatcccagcactttgggaggccaaggtgggcagatcacctgaggtcaggagtttgagaccagcctgaccaacatgcccctgaccaacatggagaaaccccatctctactaaaaatacaaaaaaaaattagctgggcgtggtggtggacacctgtaatcccagctagtcgggaggctgaggcagaagaattgcttgaacccgagaggcagaggttgcagtgagccaagatcacgccactgcactccagcctggcaacagagcgagactccatctcaaacaaacaaacaaacagtaagacccgaaatattatttttgaaccccaagctcacttttgtatagatatacctactctagaaacaatgacaaaactaggaattgtgacacaatactaaagacaatattaaaaggcttttttaaaaagttacattgggagcaaaaagaacaaggaggcctaggtgggtggtatcatattaatgaatgaaagaaagaaaatagagcattcacctctattttggtttagtcttctctgtcaaagaggatactctttggactggaaaagataaaataaacactggttccagggaatgcagtcaaacgtagttgagattgaaataggtcatgcaactgctttaaatgatttcaagttccttaatcttatatttcaagatactgaggactaggctgggcgcagtggctcatgcatgaaatctcagcactttgggaggctgaggtgggtggatcacctgaggtcaggagttcgagaccagcctggctaacatgacgaaaccccgtctctactaaaaatacaaaaattagctgggtgtggtggcaggcacctgtaatcccaggtactagggaggctaaggctggaaaatcacttgaacccaggaagcagagccaaggtcgcaccattgcactctagtctgggtgacgagtgaaactctgtctcaaaaaaaaaaaagatactgaggactagtggatgagctggctgaagcattgctggcagtctctgagaaagtgtgcatggggagggggaattaggggatgggggtcggggatggatagaaatttcagaagattagagtcaaggaactaatattcaggaggtcacttcagcagacttgacatccatcttaggtaatattcttaaactacttatgaacaagaataagttaagaggcctggcacagtggctcacgcctgaaatcccagcactttgggaggtggagtcgggcggatcacttgaggtcaggagtttgagaccagcctggccaacatgatgaaaccccatctctactaaaaatccaaaaaaaaaaaaaaaaaaaaaaatagctggctgtggtagtacatacctgtaatcccagctacttgagaggctgaggcaggagaatcccttgaacccgggaggcagcggttacagagagccaagattgcgccactgcactccagcctgtgtgatggagtgagactctgtggaaaaaaaattttttaaaaagaataaattaagaaaaggaagttgggatcaccataagcttaccagaatttattgaagatggagacagaaaaggggaggaagtagggggtaaagggggaaaggaagaagggaagagaagataataaaggggaagggaagggacaggaggcgaaggaaaaggaataggaaaagattccaggcttagtgggtaaagaagacttgatttcaaccctggctcttttacttcttagtaaaatgatgttaggcaagttattaattgctataagctagatttccttattggtaaaattgaaataagagaaactacttcatagagtagtcctgatgattaaattaaataatgtgtataaagtgcttatttatcaaaagcagtgataactgtgaagggggtgaatgatggtaatgacaataatactgacggagaaggaacgggagtagacaatgtaaacttactccctttttgaagagattattacattggtaagttgacagaaatctgtacagtatagctatatttagtatagctatatttagtatatttgtttagctaaattggatttctacaagactttgacaacatctccatgacatccttgcgaacaaggagaaggaatataggctggatgatataggctggttgaatagtcatacttaaagtgtgctgattaatgggttcctgtcatgctgaaattctccaggagtgtaaatctggactatgtacttagccaagcttttttaaaaaatcattatttgcataagagcattgatagcaggctaattaaatttgggaacaatagctaataagctgactgaaaaaaacagaacctaaaaagaaatggtataatacagagcaaagaatatggccttaatgtcatggatctatcactactagctgtgtggctttgagtaaattgcttaaccacctgagccttttgttcctcatttgcatggagataatactacatattccatgtggttgtgagaacataaaagataatatatgtgtattatcacacctgtaatcccagcactttgggaggcccagggtgggcagatcacaaggtcaggagatcgaggccatcctgaccaatatggtgaaaccccatctctactaaaaatacaaaaattagctgggcatggtggtgcgggcctgtaatcccagctactcaggaggctgaggcaggagaatcacttgaaccagggagtcggaggttgcagtgagccgagatcgcaccactgcactccagcctggcaacatggcgagactcaaatatatatgtgtatgtcaaatgtatgtgtgtgtgtgtgtgtgtgaattagttatctatttctgtgttataaatctcccccaaaaaacctgggggcctaaaacaatacacatttattatttcacacaggttctaaaggctgggaatccaagagcagcttactggggtggttctggctcagagtctcttctaaggttgaaatcaagattttgattgggactgcagtcatctaaaggcttgaatggatctggagggcctgcttctaagctcagtcatgtgggaggcctcagatctttagcacatgatcctcgtgatatgaggaactggcttccccagagcaagtggtcttagaagaagagagcaagcaggaagccacagtgcctttatcacttggcctctgacatcacattctgtcgcttttgttttattttctccattagaagcgtgttgctaagtttagctcatattcaaggggaaaagaattaggatccacctcttgaagtgggggagtatcatagaattttgtgggcatatcttaaaactgcaacaatctaaaaagtactcagtacagtgcctagcacataagtgctccataaatggcagttgttattctactattaatagtctacacttaatatacatatacaattaatatacatggtccctactatgaaaccggtgtgggtaggacaagataaactcatgatttcttagattcctggaaaacacagaaaaagaagtaccacatatgactacattaattacatctgttttgtacaccaaaatgaatggattatttttgcactgcatgtaatgcactaagaacaggactagtaaaaataaattttagtaatatttatttatttatttattttgagacagcgtctctctcttgcccaggctggagtgcaatggcacgatctcagctcactgcaacctccacctcctgggttcaagcgattctcctgcctcagcctcccaagtagctgggactacacgcatgcaccacaacactggctaatttttgtatttttaatagagatggggtttcaccatattgtccaggctggtctcgaactcctgacctcaagtgatccacctgcctcggcctcccaaagtgctgagattacagatgtgagccactgtgcccggccaaattttagtaatatttaataggcatacataaaatgtatagtctgtaaatatgagtgatatgaaaaattcgaatgacaacctaaaagtgatattatatggttttgttaaagagttttatatgtacatttaaatataagtattgatcatctgagaactcatcaaagcttaactgaataatgtatcaacttgtctttctgagtgtccttttctcatttccatttaaaaatgtgccacagctaagactgacaggccccagtctgcagcaaagatggggaagacttggtagttcacacgcctcccctgagggcaaggagtaattctggggggatgtaaactaacaaacataaaagtattatatcggcaaaggggtcgattaagtaaaagagttgatgttgacagtaaaaatttagaagcaataattaatgtggctgaatcactagataatttcctctttatgtatacatttatatgtgtatatatatatttatatatgggtccataatgcccatcattagcctcaaagattgtctaatgttcattggaaacaaaaacataagaactctcccacccgggtggacagagtaatttactgagccactttggtaagataagaacattagattgaaggtaatgtcacaccttaaacttgttaatttattggtgttttgatttgcattaaacattagacagatcctcaggctagcggctgacatggtagaactctccttagtatctcaccaaaatagcagtcaaacttctaagatgttcaaaacatagttactaatttgaaagtaagtagaaatggttgctgaggagccaggatttacagaggttatatgcatcattgtaggtgaggcaggaagtctcctaagatttcacagggagcctcctgacttataaatgcataaatcacagtattgatcaggtcagcagtgacagataaaaagtagtgacgtgggttttaactgttgctagccttagccacacactgacagttgtgataaatggtaacagaaaagggagttattatagatccaaacagtgaagagaaaatatatatttaaaaaccaacattttaagtaagataggtagtaatttactgtgtagaggacaaataaatggctttatacgtctttttgttctttttttgtttgaacggagtttcgcttttgttgcctaagctggagtgcaatggtgggatctcagctcaccacaacctctgcctcccaggttcaagcgattctcctgcctcagcctccggagtagctgggattacaggcatgtgccaccatgcccagctaattttttgtgtgtttttagtagagacggggtttctccacgttgctcaggctggtctcgaactcccgacctcaggtgatccgcccgccttggcctcccaaagtgctaggattacaggcgtgagccactgcacctggcatgtctttttgttctttaagggtatctactatggtccaagaaaatgagcagtatgcacaatgttgaaacagagttgataaacaaaaggtgactgatgttcactatcatcttttttaggaagtcaagtaagtttgtgatatagtttacagatacttctatcaaatattaaaatgtcttaagatggaaaaaaaaacagttttgacactcaagtaggttttacatattaacatatatagaatgcacatagaagaaagggtcagagaggtccctggaaatgccgtgtactgattcagcatcatgggggctgcacagcctgcactgtgagtaataactataataatagctatcatttaatgagcatttaccatgtgccaggaattaggttaaatctttacatgaattatagtattgagcccttttatccatgccttgagtaggtattattatatctattttaaagataaggaaattgagggccgggcacggaggctcacgcctgtaatcccagcactttgggaggccgaggtgggcggagcacaaggtcaggagatcgagaccatcctggctaacacggtgaaaccccatctctactaaaaatacaaaaaattagccaggcgcggtggcgggcgcctgtggtcccagctactcgggaggctgaggcaggagaatggcatgaacctgggaggcagagtttgcagtgagccgagatcacacaactgcactccagcccgggcaacagagcgagacagcgagactccatctcaaaaaaaaaaaaaaaaaaagataaggaaattgagacatagtggttaaaaatttacctaacattggctgggggcggtggctcacacctgtaatcccagcactttgggaggccaaggcaggcggatcaggaggtcaggagatcgagaccatcctagctaacacggtgaaaccccatctctactaaaaatacaaaaaaattagctgggcacatccagctactcgggaggctgaggcaggagaatcacctgaacccaggaggcagaggttgcagtgagccgaggtcacaccactgcactccagcctgggtgacagagcgagactccatctcaaaaaaaaaaaaaattttacctaacattgttcatgtggttaagtggcagagcccagaatcaaagtgaagtctgagtacctccatccaggtttactatctcagtctacgtgttttatggaaatgaggcatgccctttctgagaaggaatgatgttattatacctccttatatattttcattaagaatgagtgaggatctcctcctttattatttattcatgtgaccctttcttttccctcaccctgtgggaggctgaataatggccctaaagatattcaggccctaatccaggattatccaggtgaaccctaaatgtaatcacaagtgtccttttaagagggagtcagatagagatttgatgacgggagaggaagaagacaatgtgacacaagaagtgggtgtgtttggagcagggaagtgacatgacatggggccacaagccaaggaatgaggataacctctagaaactggaaaaagataggaaactgattctcccctagaacctccaggaggaaccagcctgctgacaccttgattttagtcccataagactcattttggacttctggcatccagaactctaagagaataaatttctgttgttttaagctaccaaattgtagtaatattttatagcaaccataggaattgaatacatatcccatattactggcttcaggacttatttgcattatactttctccttgtatttttcctacattttgtaactgtttattacttccagaatgcaactgtagagtgtgtaaataacatattcgtaaaagcattgtttcagataaagtctaaaaaagaggtattttattttaaaataatatccaatcctatggctatcccatatcccagcctttccaatggctgtaaaagggaaaattatgggacgaatgttgtcaagtatataatgaaaggaaatcttttcaatatgaatgatcaataaacttgtagaaaaatgtccaccataacgagagtcacaccagttaatcataacccacatctctgactaggaatgcagtaggtttcccccattcccaccactctttatttggagatttgttgaaacctataagagaattatgagaatagtatgaaggcacttgtctgcccttcaccaaatgctaactaatatgtcaccatatttgtgaacaacagatagataacttgaaactaagttatgggaatcatgacatcttacccctcacatccctcatctcctaagagtaaggactttctcctcttctcctgcataactccaatgtcatttgagaaaataacactaattttataacatcacctaacatccagtccagtgcaaattacaatttccccaattgttcctaaacattattaatagctgtttgttttctgacccagcatccagtcagggtttacacattgcacttggtaatgtctctttagtttcttttaatctggaacagaccccttacaattttgttttcatgatactgacttctttgtgttttcctgaccctcccacactagaatgtacattttacaggggcagggattttcgtctctgttaattgccatgtccttagcattgagaatgctgcctagcactttgtaaatatttgtttaataactagatgaatgaataagtaatacaagtacaatgagtgtcatgaaaggtgatttagaggatgccaagggtcctgagaatctaatctgttgttgtttgtgtgtaactcttacctctgcattacacgtattgtgttacacatatacgtgtttcaggcttgagcaaagggctcattttacaaatcagtggggagatataagtgtaataaatataaataagaattgagttttaaaaaatacctaagttggtcaagattaaaaggcatgatagcaggcactttaacagcaaaactgcaagagacttaagctgagtttgggcaactgtgatgtgactggcaagatgctaaattagctttagacttaatacaataagaacagaggctataatgaagaaggtgattgtcttgctctatttattcattctttcattcaacaaatatttattgagtaccttgtgtgccaggcactgttttggtgctggatatttagaattgagcaccacaaagtcttcggccacatggagcttacattccatgatgaacaaacaatacttaagtaagttttttgagggtaggggctctgtgctttcacaagagaggcaacatagcgtaatggtcaagagcagtggtttttgagccaccagacataggtttgagtcccagtttgtatacttttttgctgcttggtcttgggtaagttccttaagctctcagagcctgagtttccccagtagtaaggtcatggcaaataacagtacagcctcataggttgggaagggacttaagcgagataatgcatgagaattgtctcacatggtgcctggcacttaatagcttcttgataaatgttagttgttgttttcatcattattaacattgactaactaaaacatgtcttactagaaaagggatttgaaaccaaatgatgaagaacagttgaaggaaccagggatgttaaactcatagaaaagtaaatggaatacatgcttactggtttcaaatacttgatgatgtagcatgtgacctgagcttacttattctgtgtggtcccagaaaacagaattaggtccagccggtggaagttaccaggaagacaattttcacaatgtaagaagaaatgttcttaacaattagaattatctataaatagaaagagctgcttgggaggaaatggattttctgtcattagagataataaagcaggtactagacatgtgctctccaatatgtagccactagcctcctatggctatttaaatttaaagtaattaaaattaaatacagttataaaggcagaggataggatggtggtttccagggattggggaagggagaaactgggtattgttgttcaattggtgtaaagttacagttatgcaagatgaatcaattctaaagacctgctctatagcataatgcttataactaacaaaattaggaacctaacaatttattaagagggtagatctcatgtcaatcattcttaccacacacagagagagagagagagagagagaaacttttgaggatgtggatatgcctgttatcttgatggtagcggtgatttcaccattttatgcatatatccaagctcatcaaattgtacatattaaatatgtatagttttttgtatgtcagttaaacctcaataaagctaatttttaagaaattaaatacaaatacaattcagttatttagtcacattagtcacgtttcaaagtgctcacaagccacatatggctagtggctgctgccatattagtgcagaataacaaacattgccatcatcacagaaagttctgttgtatagtgctgttctggacaatgaacaaagatgtttaagaagaaatggaggcacaagatgagaaagaagagctgaattaattaggtaacttgtaaagtccattctaagcctcagttttatagattatgaaaggtcatcttttaaccatttcattttggaataaaggaagagttattctcacagaaataaaactgttgtgttatttggagatatttttattttactgatttgacttaaaaattgcttcttttcagctcatcactctagttagagaaataaatttctgaggggaaatggcctagcaatggcatggcccaggagaagtacagtaatcattgcatctttttcctgaaagaactttccatgattttttagttcagcctgaagagccatttgtgacgcttaaaaatcaatgaaggggaaaaatgggactgagctgggccagttttcaaaggacatgaggggtgagtcttgtttcagttgctagtattagacaggatttcatttatgaactttgttctcttgtccaactccagttcctacaggtttcctttttcctttgctctccagtcaaaaggaaaaatactcacatgattattagaaatactggagcaataaattgtttgagggacttgaaacaccctttttttctttcccttcaaagccttaaatgatagttgcttcattgaagcttacagatcattaaaagcagtcctgccagggtgttgtaatatatgttttagcttccaattgaaggaaaatctctaccaaactaacctttgagtcatacagaattttttattttctatttttgatgtcttgggtgttccagcactttttcatcacctgccatatacaaaattcccatatcttatttgagccaaaaatgaagcctggtatcacctctaacaagtacaaattcctagcgcttttcaactatgttattatttgcctattttatttattgcagaacagttcccaaggagtaatgtcctggagaaacagaaataacactgtagaagagcagtagtgttatggacattgagagtaccattgcaaaacctgattttttttgcattttcatggcttcagtttcgagtaattgtagatggacagaggccaagctgttttcaatttgacccttggttaagctaaaaaactacataacaactaagggtaccctatctcctgttacagagatagatacataaaagggccagactaacaagaaaccaaatagccagtctggggtatggccagagaatctgtaactctaataagcacaccaagggattctggtgaacagactaatttggggaactgcttaggtccacattattttgtaaaggaatgattgaagaacctttttctgaatttttaaaaataagacaccaatttttttattgtagtaaaatatatgtaatatagaacttaccattttcaccatttttaaatatacaattcaatggtattaagtacaaccatcaccacgcatttccagaactttttcatcatcctaaactgaaaccgtacccattaaacaataactcctcattccctgctcctttccctcccaggccctggtaacctctataacactttctgtccctctgaatttgcctgttctaggtccctcatataagtgaagagataattgatttttaacaaaagcttaattgctttcttgcctggaggcatgggtcggagtgaaggggagcaaacattaattggtgtcttgacctgacaagtcaaggtcacattcggatttactggatttatctcaagcaatagaaaactgtgtttttaaactttggttccatggaatcatacagactccttttattctaattgtttttatcatgacctgtgtgttcacctatgaaattattcatttgaaattgttactgactagttggtgatattcaatctgattttctcatgaaaattaataagtatgtttctgaaaatctcctctcaattatgtcattctaaacaatttctgcaatgttaaggcccagcagaaaaaaaaaaaaaaaagttactatcaaaatgtttccaaagttcaaaagcagaagaattagcactttttagtttctttttataaaatgcatctacttcaagccatagcaaatttgaagtttcagatcctctgtccacaagattgagtacttaacgatagcccttttggctccttccagatctcctaataaagcagggagctcctctcagcccggccagccaccccgtccgggagggagatggggggtcagcccccccacccggccagccgccccgtccgggagggaggtaggggggtcagccccccgcctggccagccgccccgtccgggagggaggtgggggtgtcagccctccgcccggccagccgccccgtctgggaggtgaggggcgcctctgcccagccgcccctactgggaagtgaggagcccctctgcccggccagccgccccgtccgggagggaggtgggggggtcagccccccgcccagccagccgccccgtccgggagggaggtgggggggtcagccctccgcccggccagccgccccgtctgggaggtgaggggcgcctctgcccggccgcccctactgggaagtgaggagcccctctgcccggccagccgccccgtccgggagggaggtgggggggggtcggcccccctgcccggccagccgccccgtccgggaggtgaggggcgcctctgcccggccgcccctactgggaagtgaggagcccctctgcccggccagccgccccgtccgggagggaggtgggggggtcagccctccgcccggccagccgccccgtccgggagggaggtgggggggtcggccccccgcccggccagccgccccgtccgggagggaggtgggggggggtcggcccccctgcctggccagccgccccgtccgggaggtgaggggcgcctctgcccggccgcccctactgggaagtgaggagcccctctgcccggccaccaccccgtctgggaggtgtacccaacagctcattgagaacgggccaggatgacaatggcggctttgtggaatagaaaggcgggaaaggtggggaaaagattgagaaatcggatggttgccgtgtctgtgtagaaagaagtagacatgggagacttttcattttgttctgcactaagaaaaattcctctgccttgggatcctgttgatctgtgaccttacccccaaccctgtgctctctgaaacatgtgctgtgtccactcagggttaaatggattaagggcggtgcaagatgtgctttgttaaacagatgcttgaaggcagcatgctcgttaagagtcatcaccaatccctaatctcaagtaatcagggacacaaacactgcggaaggccgcagggtcctctgcctaggaaaaccagagacctttgttcacttgtttatctgctgaccttccctccactattgtcccatgaccctgccaaatccccctctgtgagaaacacccaagaattatcaataaaaaaataaatttaaaaaaaaaataaataaataaaaaataaaaaaaaataaagcagggagctccttcagtgtccagcatactactctggggagaaggcctcttcatcttgtctagagcagggcttcagatatctgtgccagaggcttaggaaagacctaccacttggaatgtagaacaaaagaaatgattgttttcttttttctttttttttttttttggagatggagtttcgctctgttgcccagggtggagtgcagtggcgggatctcggcacactgcagcctctgcctcttgggttcaagtgattctcctgcctcagcctcctgcgtagctgggattacaggtgtctgctaccacagctaatttttgtatttttagtagagatgaggtttcaccatattggccaggctggtctctaactcctgacctcaggtgctctgcccgcctcagcttgttttgttcattttaaacaattttccataaatttataaagccattctccatgacatgcttaccactttcacggtctgtgtaaatctgatccatcagtaatatagtatggcagcacctaattatgtgttttgtgaaaagctatggaacaaaaagtaccacctgttacttaactccctaattgtaaaattgtgttttatttctgtgccctgaggttggaccacagtattgtgataaaccatgggactgacgggtcttgctacccattcctgttctccattaaaaaaaaaagtaatcagatttcttctaactctcaaacctctaaaagcgcttctgaaaacttagatctaactgtttaaagttgacccctggattctataaccctctctgtcacaaatctgctttgtaactttgagcgaattatttatcttaaacacttaactttccatacaactattcattgagcataaaacctaaataatgatactacctctggaaaaaaggattcatgactcagtgggtctgtttccctacttaaatctggaagggaaaatgccttcttactcttccttctgaattttcccatttagtccctggcacaaatgaagactcgctcttcttggcagcatccatggctgctaagagaaactttgccccactgcctttgatgtggtgaaacaaagcctttaccagagtggttggaggatctgtcaccctggagactcctagggacccccacccacaacctctttgggaagttcttttcctaaagttgtattcagatttataccaatatgcagaggagacgtctttcttataaaaagcttgcttttcctctcaaagctgtgaagaagctagtgaaggggaagttgaactgggtataatattgacaaatgttttgagcacttcagataaaaatgtttgataagtgcagtcctgtttgtattgccttattacactgctcattggagaaagtgttttctttggtcacctgccaatgaaaaagattagccttttcctgtatttaggattgtttctttgactagttatgttggtagaacaagatagacaaatgctgctgaaattagcaaatcagtattggaacacagtgatactcatttctcctcactgccctttccaattcattgacagttgccgcaagcagtatgaatgggttttttataggactctctttctctccttacctattccaatttgtattttcactttagttcccttgctctgatgttcaagactttaaaggatttgccactgcccaccacaccatgctttcctattttataggatccaataagaaacattttttcatttaaatgcctcttctataacatgagtcaccttttagatttctataccttgtatcttctagtttctattttagtacagaaaaattatagtttcatcttctttgaggcaagatatgaagatttttttttgccctccctcaaatttattccctgtttacagcaaaggaagccactggctgcttttctaacatttctctatcagaagctagttgagctaaatgtatatacttttatattccccttaatatgtttagattgatctggggtacatcttttggatctggacattatgaaacaaagttaagccctttaacccatcatcagcctacatctgtctcttcagacaaaaaggaaatgaacttccattgctgtaggaaaaatttatgtcacacataagggcaaatttgttagcaataatgttattcaagccaggtgtggtggcgcatgcctgtaatcctagcactttgggaggccgaggcagtggattgcttgagaccaggagttcaagaccagcctgaccaacgtggcaaaaccctatttctactaaaaatacaaaaattagcctggcatggtggcatatgcctgtagtcccagctccttgggaggctgaggcacaagaatcgcttaaacccagaggcagatgttgcagtgagccgacattgtgccactgtactccagcatgggcgacagagggagaccctgtctcaaaaaacaaacaaaagagatagtgttattcagtactgggttcctaagcagtattacagtataaccttctctgaaattctttgcttttgtttttaatagaatagattttcataaggaatggattaggtgcagaccttcttgacagcatgagataacaagttatttcttgaagtcactctttagaataaataagtcgtattttattctgagggaatttttttttttttttagacagagtcttgctctgtcacccaggtaggagtgcagtggtataatcttggctcgctgcaacttccaccttctgggttcaagcaattcttctacctcagccttctgaatagctgggattacaggtgcctgccaccacaccggctaatttttttttttttttttttttttttattttatttttagtagagatggggtttcaccatgttggtcaggctggtcttgaactcctgaactcaggtgatccgcccacctcagcctctattccaagggaattttaacattgatttaattgagagaatcaaaagagcctgagggtagtttacagagaagagcccttttaggtagtattttttatttgacttgccaacctctaattctcactgacttatggtgagtttcaagtatggatagttttaagatgtggttagttcccatgactacaaaataaaatatgaatttcccatgttacttgaagactgtttgtgggaggtcttcatttaggtctttgcatcttctcaggagcatatcataatttaatagcctgtcatcggaaccctgcaaagatagtgatattcatcttagaaaaaaaaaaaacttgcatacctcctatacagcattctttgctgccacctaaagccatttgctcatgaaacagtaacctttagaacaatagcccgagttctcttcctatcagtcaattcttagagactctattagcaccttcctttgcttttgtcctgtcagatggagagacggggttggcagaagcaaaacagcctttataaatttttcttagaggtccgtgatcctagattaaagtaggaatcagaagacatcaggtctagaaatcctcagagtgaccttttttgacagagaagatatttatatgaagaaacatcagtgccaatgacctaaatttagctatctaacctctcaatatgatcatttctctgcttgtaaaaggggaatagtgacaccaatcactaccgtcctctggagtttgagagatacttaatgaaataatgaacgtaattctcctcttgcaagggaatatattgttgacttttaggagaatgatttgggggtccctaaggggcttaacaatctattacctctctggcactcaaataggattattgtaaaaagctaatctactgccaaaaagtaagccatttattctgtggatagatcaggtccagtgtgaaaaaaaggattttgatctcttttttggaataactattactaactagataggcacaaagatgtcttttttttctttctttctttaaaaaaaaaattagaacagaagtgtaattgtgtttgatggttcactttgggagaatgttaggttcaatcctgaacacagtaaatcagatgatatacttcttttaaaaagcctctagaatatgccttctcaattgaggcaatattgcctccaagggggcaaaaattggttctttgggaggcaaaaaaaaaaattagatattataatggtttgtgacccttaaaaaatatatagatagataatatgttcatgatatcaaaatttcatggggagtggacaaatagaaaaaaggtctaaaaagctagggggtgataatgaaaaaaagactgagaaacttttctcaagtctagaatgtgcatataactgtcaattactctttcagctgtgtttgtccctaagcatgggcaagctgcacattgtcaggtcgaaacagcttgctattgattattccttcagtctgagaggaactgagttcatagaaaacttgaacgaaatgaaatgtataccctaaggggtaatgatttcagacaaacaaacgtaacaaacatctacttgttagaaccaatactttgcactttaaaatgtggttaagcctttaaggtaagaggtttcttttttctcttgcctctttagccttacagaaaggcacatcaagggtaggaatgatcttcaaagtgcctcacagaaaaaaaaaaaaaaaaaagccagattgggagaaagtgtggccccaaaggcatactttggagagagtgtggccccaaaggcaggaagggaataattgactaaatagtaatgtaaagtgtacagcatcggcagggtgtggtggcttatgcctataatcccagcactttgggaggccaaggtgggaggatcgcttgagccctggagttcaagaccagcctgggcaacatagtgagacctcatctctacaaaaaatacaaaaaaattatcctggtgtggtggcacatacctgtagttccagctactctggaggctgaggtgggaggattgcttgagcctgggaggtgggggttgcagtgagctgagatcatgccactgcactctggcctgggcaacaaagcaagaccctgtctcaaaaaaaaaaaaaaatgtacagaatcaaagtcaagaaaattgatgggaattgacactgaagtacttaagaaattttaagtttgctcttgctgctggtattaataaactttcatatatccaacatattcttccttccacctttctcatatgtcttattagttctttcaaacactcagaatggatggaatgatccaaaattgacttgctacatactggggaatttggaagggacctgtgttttgcttagcagccctgaaacaatagaatggccttttttttttttttttttttttttgagacagggtctcactcttgcctaggctggagtaaagtggtgctatctcagctcactgtaacctctgcctcctgagttcatgcgattcttgtgcttcagcctcctgagtagctgggaccacaggtatgtgttaccacgccctgctaattttttttttaattaatggggtctcactatgttgcccaggatctcaaactgctgagctcaagtgatcctccctccttggcctcccaaagtgctgggattacaggcatgagcgactgtgcctgataatggccatatttaaagatatattttttcctcagtctctgactcttccttgcttaatcatcctattctttaatatacaaacctataactttgaggaaagagaatcagagattatttctccctacttacccatttcatggtgcgacaatgagcactcttctccaagccaagcatttgataagcattcattgctatgggtattttactgccttaaagaaatccaccccaattccctgccgattgatttcttaagatcacagaagaaagtggaatgaatcctagagaggccttcaagctccctgacacccatggggcccactcatctccacccccaatactccaatttcaaaatctaacacattgtccttttcttagttcctcagttccccgcccttcagcttctctttgttagccactgggtgggtgtaaccaaacctcagtcacactgtggccccagcagctgggcttctctctcccccattacattgcagacattcttttcacatcattttgtcctctctgctgcattccctacatttggcttcattccctctgtgcaaacttctgtttcaagggacagcagtttgccaaggagatgctggcagagagggtccagttctttcctttctatctgaagagcccagtgtcattcattagcatatgagaagaatggttgtaaataaacatcaaatgaggttaacgagctgcagctcatcaatattaatgaagtccacctcacagccttggtatgaggtaccaatggctctaatcacaagaagcagtttcataaggccccagttacagggcaggaagggttagatccagcgtgttgaaatgtttgtcattttatgaccccaggaatgctgcagggtaaggcagtctgataccagatctgtgcttgcaaacccctcttgtgttcagtttacatctgtttgtctcaacaggtggaagcctaggaaaaggctatatctgctaagccagaatctggggtgggaattctccaggtcaacctgcagttcccaaatcaaaatgaagttccagagtaccagggtttgatctctcattgcccttccatcagttaccccagataacccaaacacttgtttccagtgtagtgaaggatggtttgaggatctaagcccagcttggtaaggaatgaagaaactcccatttcatgtagctcatgtgcctgccagccaccagttaagtccctgtgcctattatttagaggattcaaagagtaacaagggccaggcatggtggctcatgcctgtaatccctacactttgggaagcagatgtgaggggatcacttaaagtgaggggttccagactagcctgggcaatatagggagacctctctcaaaaacaataaataaataaaaattttaaaagtagttgggcgtggtagcctgtattcccagctactcaggaggctgaggtgggaggatcacgtgagcctaggagtttgaggccacggtgagccatgatcatacaactgtactccagcatgggcaacagacagagactctgtctctgaaaaaaaaatttttttttaattaaaagaaacagtaagtacagctatcatttattgaacacttactgtgtcctaggcatggtactaaacatttttgttatataatcctcacaataatcccatgaaggtattcccattttacagatgaggaagttgaaactcactgatttgatgtcatgggtctaagatcacacatcagcaagtggcagaagaggagctcagatttcgatctgtctaactgcagagcccatgctcttacttcctaccctctgtggtatcatctcagagccaagcacataaaatgcaagcttttgtgctgctccttttcgtcaaagatgtgtgtcctccagtttcaagggactaaacacaaagtagttccctggaagtagaatcagaaggctttagaattaatttttttaagtcaaagtgcctctttgaaattatttttagaaaggaaactttcattaaatatgttttccttgatatataaatttggggtcagagggattaggctttgagaatatgtgtgtgtatgcatgacccagtctgtgttgatagccatgatactgatttatccaccttgtcacactagttccttttatgattaagcacacaccttgcatgaggtcagtgaccatggaacacagggaaaccgctcccatggctgatttgagcctatgatcttagcctcaattacattgtttcaacaactgaacgcctggtttattacttaaagtactatcattgtactttgtcttaggggtgggaaggagaaccgatcaaattgttgttatcacaaaagctacacctgattgtttgtaaagaaggacttctagtgaaaggatgaaagtgaaacagctatttctctttcttctatttttctccttgaaaattcagggacctaggccaagacaggcggatcacttgaggccaggagttcaagacctgcctggctaacatggcaaaaccccgtctctactaaaaatacaaaaattagccaggcgtggtgacacgcacctgtagtcccaggtacacgggaagctgagacacaaaaattgcttgaacccaggagggagaggttgcagtgagccaagatcacaccactgcactccagcctgggtgatagagcaagaccctatctcaaaaaaaaaaaagaaaagaaaagaacatgaaagaaagaaagaaaactcagggaccttacttggtaatttttacctaggcaaaatgcccaggaatgtttccacagaatggtacccaaagcccacccatgcaggagcccttcctgccaccaaggtaaccaagactaggaagcaattgaaactgggccttcctttcccaggcctgtggctgtcaacttggctcagaaagaggcagactgatgactttgtctccttacccactcacactaccacacagttctcatttgagcctggtcacatggctgtgccttcttatggccaaacaaggatacgctgtttcccgttctttgcaccctgggtttggcctgagcatccttagatgaaaccatcaggacccccaaaccttgaagcttttccaggggcaaattgcatgcaggggaaggaggggctgagctgtgtagtggagcagcggatggtgtgcagtcgggatgtttgcaagagccaaggggttagttcattgctgctttgtatactcaggcacaccagaaaactcagattaataggctgtttattcttcagcatgttccttgaatcaaaggctctggatggtattattaaagagtgtttgtgagagcgccctggaacactcctcctgggctccgctcactgaagaggaacgattgagtcctttcatttcctgggcagcatccctctcactcattgctcactgtagtataaaggtctgtagaacctttgttagaaacaggatcttttgttctgtccttatgaggtcccattacctacagcaccttgatctgttggagtctaattatttaatgttcttgtcttttgagctacctgaacctaatgaatgcagtccactctatctcagggagttgttttgctttggttttttgcctctatttggcaccagtttcctgtttggacagtattgccttttattttcatggttttttttcaaggagtttgtccaggagagaaggagacatccacctgaaacctactctgtgaagcaaatgaatatgttttttctattagaagattctcctaaaatgttctgaagtttgttcatatctgggaattgaagcacattgaattaagaaagaattacttcctccacctccacccctgcaatagagatttatactggacaaggtggcaaaaaaaaattagggggaaactgctcggtacaattcccccccagttcccttggggcagcagcgtgctgcacatgaggaatcactgtaccttgttcccctggcagtgatacttctctgtggccaggcaaatacagtagtccaggccttccacaacttctgcatgtgcgcatgtgcgcacacacacacagacgctcaaaaccatacccctcctgggcatccccttaatagaggcatccagtatattgcaaaggtactcatcactatacacagtgcaaatactcagcactcgtttatagcaaacccagtatgaataattagcaatagtttgggatctggcacaacccttaattaccacaactagaggccagaaaatgaaatcagggtcatatatctgaggttagaactctagaatctgtctggcatcctatagcccaaagcaccacagggaggtacaccttggagcaatgggagcactgtcatccaggagacactgtcccctcactttcctccaaaaccagcacagctgtttgcacgagggctatctgccgtatatacagtgagactaagatatatatacacaccctggcgcttcgcctgatttcttctgtgaagtccatctgtttatccagttccagatcccaaaaggcagtcaccaaaaactaaatagtgagaagggacaggcttttttttttcttttttgataaacatgttacagtgaacaaaacagattttgcaaacacattccatctagtaaatcttacctcacagctgtgtgagaagagcttggaggagagaaggatggggagcaggagggtctcaggacttgattggagaattagaaagttcagaaacccacaagggtgggacagttcagtactatctacttttttttttttttttttttgagatggagtctcactgcgtcgcccaggctggagtacagtggcacaatctcagctcactgcaacctcggcctcttgggttcaagcgattctcttacctcagcctcctgagtaactgggattacaggcgccggccaccatgcctgactaatttttgtatttttagtagagacagggtttcaccatgttggtcaggcttgtcttgaactcctgacctcaagtgattcgcccacctcaccctcccaaagtgctgggattacaggcgtgagccaccgcccctagcctatctacttcttatagggtgataattggccttttcccttcattctagcccctcatcctaaacctggaatctgtgatgggctcaccaaaaatgaagatctggctgcagactttggcttctttcactgaaaagctgatctagccagactttatcttcaaaagacaggccctgcacttctgatgttccctgagcctctcccactgagcctactctcgtccactgtagccatgatgctctctggattcagacaatggtgtgttgtcccagaacactgtatctggcctgtctgtgcttcacatctacccctttggctaggaaaatgagggacagagctcacatcagtaacttggattctgaggaccgaggacaagcagaagaaattgaccttttgcctcagaggtggctggatgtttgtgtgtctctcttcgatgtcaaattggctcactgaaccactcaagagttgttttttaaaaatgttctgctcactcctcatttgcgggtcagatgctttggataatccagtggaattctctctgcttcactgctggttgctgccagacacagagtgctaaatcctgtcagtcggtgacttgaaatgatgatgtgtgaaacagtgctgcgatttggacatcctgcactcatttgcatggactcctttgccagttaaccacagtagtgaaatggggcagcctggggcagcttccacagcccttgccttatctttcctcagtgtccccaccctcccccatggcagtatgtagctccagtaattggtaaggcttggaattctgtttcatttaatattattcccttcctaggcatcatagagcaatttctttaacatgctagattgcaacatgccagagacagagaaatagcatttgtgtgcagaatggagaggcgggaagcaaaacactcttgttgctgattcccatctcccggtctttgcccttccttctttccctagattgcatggctggctgattctcatctggtgagttctcagctcaaatggtacgttctcaaagatgagcctggcacagccatctcatgtggtcccaccctcagtcactgtgtatcacaccaccctgcctgatttatgtcattgctctcctcacttcctaaaagtatttctttctttgttactttttattctctgtctccccaaccactgcctccacacatacacactagaatgtaagtaccatgaaaatagggatttttatctgtcttatcccttgctgtttccccagaatctagcacagtccctggcatacctttgacacttagtatattgactaaataagtagctaagaatgtagcaattaagaacttctaaagcaaatatccatggttactatcaggaaatagtaaaggcagacagacagagagtttgaggaatggaatgagaagacatgatttcttatactgattttaataatggtcttaattacaaattgaatacgttaagtcaaagatcacaatatcgagtcgctcttcatttcttctgactcagactaaactgccccttattgagtaggttaggtcagggtcatagagaccaagtactacaaacttcctggccaaactggcataattgatgccacaaagtatgcccacttccagatttccactgggtggtgcctggctttgctttccttagggcagttgccagaagaaactggcacaatttaaagcagtttaaagcccagcctgggtatcttcatctagcctttattatattcttgcctgcctccagttcccaaaaagactgcattcctgtctgcaactccagggccctgaagccccttcagtcatgaaagccatggaggtgggttagccctgatccacccagcgtgagacagtatgaccaagagaacacatctttttttttttttttttgagacagagtctagctctgccgcccaggctggagtgcagtggcgcaatcacggctcactgcaagctccgcctcccgggttcacgccattctcctgcctcagcctcccgagtagctgggactacaggcgcccgtcaccactcctggctaatttttttgtatttttttagtagagacggggttttactgtgttagccaggatggtctcgatctcctgacctcgtgatctgtccgcctcggcctgagaacacatctttagtccagcagatacatggcactcatctcctcaagagtccttcacccaaacgagaattattagcttctcagaagttatcctttgtcttgttggggcaagatctgtgcctagtgtcaagagagagatgttaaagattaaagagcctccaccaggaaagggaatggttttgcctgaatctcttaatttgtttttccccgctacgagtgcattcatgttgctgggctccctggcttactccccggtggtttgtagtcattttcatcatgactttgcggttgcattgatatcagaatgagtttcgactgctgtacgtgatgcttccatgctccattgctttctctcttatgttgctaacgactctcctgttggcttcagcccttagccaagcccaccccactccacaccccactccttccctgtcttttattgatgctatgttgactttgcatgcctcagttagttcagttttctgagcacctgcagagaattaaccatctctgcttgctgctgcggatcacctaggcctttgatctgtttgatttctgtacttctaaaaatgttgaaggactctctaaccccaccaaagtacataaatggtgctacagttcctgtagcctgacctcctccagactagctctgcttagggaacagaagatcttcatgtaaatacagatgtagataccatttattaaatgttttctatgtacgattttactgttctaagcacttaatgtgaatatttcatttaatctttgcttatagagctaaaaggccatatacatgaactggcccattatttctctaacctcatctcttcttcctttccctcttattcttttggctcctgccatgttggtttccatgctgttcctcttacccaataggcacactccctccttaagactgtaatggctattccctctgcctggaatgctcttccctcagatgtctgtatcagttactccttaaccccttcaaatcttcacttgagtgttaccttctccattaaacctacctagaccactctagagagaattgaaccaccagtaccacctcatattccctatctctgacttgctgtattctctttttttccattatatttatcactgaatctcttaatttgcctcagttaactttctatatagcttatttgtttgtttgtttgtttgttttttgagactgagtcttgatctgtcacccaggctggagtccagtggcacaatctcagctcactgcagcctctgcctcctgggttcaagcgattctcctgcctcagcctcctgagtagctgggattacaggcatgcaccaccatgcccggctaatttttgtattttttgtagagacgggttttcaccatgttggccaggctggtctcaaattcttgacctcaagtgatccgcctgccttggcctcccaaactgtcaggactacaggcgtgagctgctgcgcccagcctatttgtttattttctttatcattcattatctgtcttccccactgcaagataagctccatgaaggcaaagagcttgtctatttcttctctaatgtatcctaagcacctaaaaagtaacatgtgacacataatagatgctacataatatctattaagtcagtgaactttgtcccctaaaaacccatgctgtaggttcttctgttatccccattttgtttatttatttatttttattatattttaagttctagggtacatgtgcacaatctgcaggtttggtacataggtgtacatgtgccatgttggtttgctgcacccgtcaactcatcatttacattaggcaaatctcctaatactatctctccccactcccccaaccccacgacaggacccggtgtgtgatgttccccgccctgtgtccaagtgatctcattgttcaattcccacctatgagtgagaacatgtggtgtttggttttctgtccttgtgacagttttctgagaatgatggtttctagcttcatctatgtccctgcaaaggacatgaactcatccttttttatggctgcatagtattccatggtgtatatgtgccacattttcttaatccagtctatcattgttggacatttgggttggttccaagtctttgctattgtgaatagtgccacaataaacatacgtatgcatgtgtctttatagcagcatgatttataatcctttgagtatatacctagtaatgggatggctgggatggctgggtcaaatggtatttctagttctagatccctgaggaatcaccacactgacttccacaatggttgaattagtttacagtcccaccaacagtgtaaaagtgttcctattcctccacctcctctccagcatctattgtttcctgactttttaatgactgtcattctaactggcgtgagatggtatttcattatggttttgatttgcatttctctgatgaccagtgatgatgagcattttttcacatgtctgttggctgcatagatgtcttcttttgagaagtgtctgttcatatcctttgcccactttttgatggggttgttttttttcttgtaaatttgtttgagttctttgtagattctggatattagccctttgtcagatgggtagattgcaaaaattttctcccattctttaggttgcctgttcactctgatggtagtttcttttgccatgcatcagctctttagtttaattcgatcccatttgtctattttggcttttgttgccattgcttttggtgttttagtcatgaagtccttgcccatgcctatgtcctgaatagtattgcctaggttttcttctaaggtttttatggttttaggtcgaacatttaagtctttaatccatcttgaattaatttttgtataagatgtaaggaagggatccaatttcagctttctacatatggctagccagttttcccagcaccatttattaaatagggaatcctttccccatttcttgattttgtcaggtttgtcaaagatcagatggttgtagatgtgtggcattatttctgaggcctctgttctgttccattggtcaatatatctgttttggtaccagtaccaggctgttttggttattgtagccttgtagtatagtttgaagtcaggtagcatgaagcctccagctttgtcctttttgcttaggattgttttggcaatgcgggctcttttttggttccatatgaactttaaagtaattttttctaattctgtgaagaaagtcattggtagcttgatggggatggcagtgaatctacaaattactttgggcagtatcaccattttctatccatgagcatggaatattcttccatttgtttgtgtcctcttttatttcgttgagcagtggtttgtagttctccttgaagaggtccttcacatcccttgtaagttggattcctaggtattttattctctttgtagcaattgtgaatgggagttcactcatgatttggctctctgtttgtctgttattggtgtataagaatgcttgtgatttttgcacattgattttgtatcctgagactttgctgcagttgctgatcagcttaaagagattttgggctgcgacaatgggttttctaaatatacaatcatgtcatctgcaaacagggacaatttgacttccttatatcctaattgaataccctttatttctttctcttgcctgattgccctggccagaacttccaacagtatgttgaataggagtggtgagagagggcatccttgtcttgtgccggttttcaaagggaatgcttccagcttttgcccattcagtgtgatattggctgtgggtttgtcataagtagctcttattattttgagatacgttccatcaatacctagtttattgagagtttttagcatgaagggctgttgaattttgtcaaggccttttctgcatctattgagataatcaagtggtttttgtctttggttctgtttatatgatggattacatttattgatttgcgtatgttgagccagccttgcatcccagggatgaaactaacttgatcgtggtggataaggtttttgatgtgctgctggatttggtttgccagtattttattgaggatttttgcattgaagttcatcagggatattggtctaaaattctctttttttgttgtgtctctgccaggctttggtatcaggatgatgctggcctcataaaatgagttagggaggattccctctttttctattgattggaatagtttcagaaggaatggtaccagctcctctttgtacctctggtagaatccatctggtcctggacttcttttggttggtaggctattaattatttccttaatttcagagcctgtctattcagacattcaacttcttcctggtttagtcttgggagagtgtatatgtccaggaatttatccatttcttctagattttctagtttatttgcgtaaatgtgtttatagtattctctgatggtagtttgtatttctgtgggatcggtgatgatatcccctttaacattttttattgcatctatttgattcttctctcttttcttctttattcatcttgctagcggtctatcaattttgttgatctttaaaaaaaaaaaaaccagctcctggattcattgatttttttgtagggttttttgtgtctctatctctttcagttctgctctgatcttagttatttcttgccttctgctagcttttgaatttgtttgctcttgcttctctagttcttttaattgtgatgttagggtgtcgattttagatctttcctgctttctcttgtgggcatttaatgctataaatttccctctacacactgctttaaatgtgtcagagattctggtacgttgtgtctttgttctcactggtttcaaagaacatctttatttctgccttcatttagttattaacccagtagtcattcaggagcaagttgttcagtttccatgtagttgtgcagttttgcgtgaatttcttaatcctgagttctaatttgatggcattgtggtctgagagacagtttgttgtgatttctgttcttttacatttgctgaggagtgctttacttccaattatgtggtcaattttagaataagcgtgatgtgatgctgagaagaatgtatattctgttgatttggggtggaaagttctgtagatgtctattaggtctgcttgttgcagagctgagttcaggtcctggatatccttgttaaccttatgtcttgttgaactgtctaatattgacagtggggtgttaaagtctcccattattattgtgtgggagtctaagtctctttgtaggtctctaaggacttgctatatgaatctgggtggtcatgtattgggggtgcatatatatttaggatagttagctcttcttgttgaattgatccctttaccattatgtaatggccttctttgtctcttttgatctttgttggtttaaagcctgttttatcagagactaggattgcaatccctgcttttttttgctttccatttgcttggtaggttttttttttttttttttttttgagacggagtcttgctctgtcacgcaggctggagtgcactggtgccatctcagctcactgcaagctccgcctcccgggttcacgccattctcctgcctcagcctcccgagtagctgggactacaggcgcctgccaccacgcctggctaattttctttgtatttttagtagagacggggtttcaccatgttagctaggatggcctcgatctcctgacctcgtgatctgcccacctcagcctcccaaagtgctgggattataggcgtgagccaccgcacctggcctgtttggtagatctttctccatccctttattttcagcctatgtgtgtctttgcacgtgagatgggtctcctgaatacagtacactgataggtcttgcctctttttccaatttgccagtctgtgtcttttaattggggcatttagcccatttacatttaaggttaatatttttgtgtgtgaatttgatcctgtcattaagatgttcgctggttattttgcctgttaattgatgcagtttcttcaaagcatcgatggtctttacaatttggcatgtttttgcagtggctggtaccagttgtttctttccatgtttagtgcttccttcaggaactcttgtaaggcaggcctggtggtgacaaaatctctcagcatttgcttgtctgtaaaggattttatttctccttcatttatgaagtttagtttggctggatatgaaattctgggttgaaaattctttaagaatgttgaatattggcccccactctcttctggcttgtagggtttctgccgagagatccactgttagtctgatgggcttccctttgtgggtaactcaacctttctctctggcttcccttaacactttttccttcatttcaaccttggggaatctgataattatgtgtcttggggttgctcttctcaaagagtatctttgtggtggtgtctgtatttcctgaatttgaatgttggcctgccttgctaggttggggaagttctcctggataacatcctgcagagtgttttccaactttgttctattctccccatcactttcaggtccaccaatcaaacatagatttggtcttttcacatagtcccatatttcttggaggcttagttcatttctttttagtcttttttctctaaccttgtcttctcgctgtatttcttttcttttttttttttttttttttttgagacagtctcactgtgtcgcccaggctagagtgcaatggcacgatcttggctcactgcaacctccgcctcccaggttcaagcaattctcctgcctcagcctcttgagtagctgggattacaggtgcctgccaccacgcccagctaatttttgtatttttagtagagacggggtttcaccatgttggtcaagctggtctcaaacccccgacctcgtgatccacctgcctcggcctcccaaagtgctgggattacaggtgtgagccaccgcgcctggcctcttgctgtatttcattaatttgatcttcaatcactgacaccctttcttccacttgatcgaatcagctattgaagcttgtgcatgcgtcacgaagttcttgtgccatggttttcagctccatcaggtcatttaaggtcttctctacactgtttattctagttagccatttgactaatcttttttcaaggtttttagcttccttgcgatgggttcgaaaattcttctttagctcggagaagtttgttattaccaaccttctgacgcctacttctgtcaactcttcaaagtcattctctgtccagctttgctctgttgctggtgaggagctgcgatcctttggaggagaagaggtgctctgatttttagaattttcagcttttctgctctggtttctccccatctttgtggttttatctacctttggtctttgatgttcatgacctacagatggggttttggtgtagatgaccttttggttgatgttgatgctattcctttctgtttgttagttttccttctaacagtcaggtccctcagctgcaggtctgttggagtttgctggagttccactacagaccctgtttgcctgggtatcaccagcggaggctgcagaacagcaaatattgctgcctgatccttcctctggaagcttcgtcccagagggcagccacctatatatgaggtgtctgtcggcccctactgggaggtgtctcccaattaggcttcatgggagtcagggatccacttgaggaggcagtctgtcctttctcagagctcaaacgctgtgctgggagaaccactgctctcctcagagctgtcagacagggacgtttaagtctgcagaagttgtctgctgccttttgttcagctatgccctgcccacagaggtggagttagaggcagtaggccttgtagagctgcggtgggctccgcccagtttgagcttcccagccgctctgtttacctactcaagcctcaccaaaggcagatgcccctcccccagccaggctgccgcctcgcagatcaatctcagactgctgcgctagcagtgagcaaggttctgtgggcgtgggacctgccaagcttggcacaggagagaatcaccttgtctgccagttgctaagaccttgggaaaagcacagtatttgggcggagagtgtcccgtttttccaggtagtctgtcacggctccccttggctaggaaagggaactccccgaccccttgtgcttcctgggtgaggcgacgccccaccctgcttcagctcgccctccatgggctgcacccactgtccaatgagtcccagtgagatgaaccaggtacctcagttggaaatgcagaaatcacccatcttcggcataggtcatgctgggagctacagaacggagctgttcctattcagccatcttggaacactgcccacttcttttttttttttttttttttttttttgagatggagtttcactcttgttgcccaggctggagtgcaatggtgcgagctcggctcaccacaacctccacctcccgggttcaagcaattctcctgcctcagcctcccgagtagctgggattacaggcatgcaccaccacgcccagctaattttgtatttttagtagagacagggtttctccacgttggtcaggctggtctcgaactcctgacctcagatgatctgcccaccttggcttcccaaagtgctgggattacaggcgtgagccaccatgcccggccttatccccatcttaatgatgatggaattgaagctcaaaaaatttaagtaactaacttgccccagatcatttgtctagtaaccagtggagctgagctatgaacccagaacccaggattgactaactccaaaaaatgtgctttcaaccatgaggacaatcctaagagtcacctgagctatttaattaaatgtggattctcactctcttgaccccagggattctgattttgcttctgtgggtttagggtacaggtgattcatgatcatatgttgagatgcattgagatatactacattgcttttagggtttcacatctgtatagggaggcatagggataaaattcattgaacgtttttttaactgtgtactgtgtgccagtccccttgatatgtataagcaagtgagatggagtccctaccctcaagacttggtctaatgggaccttggaaccctgccttgactctgtcagactacctcacttgagcaagccacttactctttaagccttagtttctctatctgtaaaatggagatagtcaattacttacttcagagcaaaaggcctgatctatgatcctgtgattcccaaggctcttttaagttgtgaagtcacagggtggactaacttccaatgctgagaacaatgatggggtggtgatgggtcagatagacaaataaatcaataattcaaccaccaataaatagtggaatatgtaaaagcatgcgctttggaatctggcagatccatgattcaaagctcgaatgtgcttgcctcttgctagttacgtaactgggcaaattacttcactgccctgtgtctgcaagtaaaatgaggacagtacttaccctataggactgctgcgagacattcaatgagagtaatgatgcacagcactcagtacagcagcttaaaaacaggtaacaccatgaagcactacagaagcagtgatcaataaatggtttagagacagtaaacatccaaagacgcagaagagttttacagttttacagcctactattttatagtttaaatttggttacattttttgttgtttttaatataacttacatggaaatctttttaaaatgtatatgatacgtatacagtggccttccctgccatcttatgtaatttaactcctctaggcatctaagcatcatctttgtcatcataaattattttactctgctggaaaagatcattgccttcaggacccactgaaatgtaccctaaatgtatccagattatatttaaaatatatttttctgcctctctgttaggtcatgtagttaatgcctaattatagttctttttcctctccttgtttaccctgtctaatctgtattgggcttagaaactagtggccaagcttgttaaaactgcgagtataatcagagtatgtcttggaaccctgtaagttagccacacgagcttttgtatgtggacttcatgaaatcttcttgcctacttggagacttattgacatttagatatttggcattgcctattagttaagttttaaattgactagatattactgtgtaaggtacagatacctgaaaaaaaattccattattctcagctttggaagttgatccaatctatgacttcacaacttaaaagagccttgggaatcatgggctcataggtctggccttttactctcaagtaaatagcaattgattattatctcttttttacagacaaagaaattgatccctaagtgtaagtagcttgttcaagtgaggtagtctggcaaagtcaaggcagagtttcaagtctcccaagcctgcccttccgctctgccacactgttcccaggaggaaacaatcatcttaggctgtagaaaggaaggaaaactatcaataaatatggttaaagattagaaaaatggcccagcacgatggctaatgcctataatcccaacactttgggaggattgcatgagcccaggagtttgaaaccagcctgggcaacatagtaaacacagtgacatccctacaaaaaaaaaattgctgagcatagtgatatgtgcttgtactctcagctactctggagactgaagcagaaggatcacttcagcccaggaattcgagggtgcaataagctatgatcacaccactgtactctagcctgacaacagagcaagaccctgtctcaaaaaaaaaaaaaaaaaaaaaaatatatatatatatatatatatatatattagaaaaatgagatctatggaggatattgtaactattcagttctatgcccttattttgatagatgtttttcctgtcactcctgccctcatttgaaggggtttataaccttagtatgccatcagtgagcctgaacatctctataagggaggaccaaggggcattataataagatccaaaaacatagaattataaaagatgatgatcttttcatcatggatgaaacaaggtgtagggaaggaactaaatggcattcaggtgacttagagggggaagaaagagccactgagaacgagggacatggaaacaggtttctgaaggaagatacatacttgaccatctctgtggatggtttcctgcctgccggcctgccatccttccttccacagctttgttaagatacaatttatataccataaatcaaaatggctttttaaaaaataaatcttcttaaataattcttttttattttttattttttttgaggcagagtcttgctctgtcacccaggctggagtgcagtggcatgatctcagctcactgcaacctccgcctcccaggttcaagcagttctgcctcagcctccctaatagctgggattacaggtgtgcaccactgtgcctggctaatttttgtatttttagtagaaacgtggtttgccatgtcggccaggctggtctcgaactcctgacctcaagtgatccaccggcctcggcctcccaaagtgctgggattacaggcatgagccactgcagccaaccaaaaaataaatcttattcttctgattgcaagaaagcacatatcatccacggtccccaaacactgagttaactactatttttaactctgttgatgtatcccattcttttccctatgcaaatttttattcttttttttgttgttattttaaagcaaacatggaaccatactctatatgacaatttttattttgctctttcctcttaatatcatgaggtcatgtactttgttttcatcttaaactcatttcatcagatgaattaaatctttattgtaaaagcttccaaagagaaattcctcatctggggttgaaaattcagatgccaacactggccaggcaggtcatataagaagcatacgtgttattcggtggtaaactggcaacagcatcctcttccccagctccagctgattgtggtcatgcaggaatgctggcccatcattaccaggtcttctgatttttttctaaaaaagagagctatctgaaatctagattgtgttgtgggaaatatcttaatgttttgcctcaaaatttaaaaagtacacttcaagccaaacaaaacctggctgccagctatattctctgtcccagacagtgagtgctaagagtttcacaagcattatctcatgtattcttcacagcagtcttgctcctctaatggttatttattaggaaccaacaatgaataaaaaatcaaaatccttgctctcttggagcttctgttggggagacagttactgctctggagaaaaaataaagcaggaaaacaagatgggggtagagggagagttcacagcattcccactctgctagcaagttatgtgctagatggtcagattatgactgggcaccgtggctcacgcccgtaatcccaacactttgagaggccgaggtgggtggatcacctgaggtcaggaattcaagaccagcctggccaatgtggtgaaatcccacctctactaaaaatacaaaaattagccagtgtggtggcttgaacccgggaggcggacgttgcagtgagccgagatcatgccattgcacttcagcctgggtgacaagagtgactctgtctcaaaaaacaaacaaacaaattatgcgctacccagtctttgtgctacttcctcaaccacagagaatgacaatgaaagaatcctagaatgttaaacccaaaagcaaccgtcacaattattgagattaaaaggtttgtacattttcaaatagttcttaatggtcttactttttttttttttttttttttttttttgagacagaggctcgttccgtcacccaggctggagtgcagtggtgcgatctcggctcactgcaacctccacctcccaggttcaagcaattcttctgcctcagcctcctgagtagctgggattacaggcacgtgccaccacgcctggctagtttttgtatatttagtagagacggggtttcaccatgttggtcaggctggtctcgaactcctgacctcgtgatctgcccacctcagactcccaaagtgctggggcataagccaccgcacccggccttaatggtcttacttttaaaaaatcctttgatgtcttctcattgctcatacttttgtttactttcttaattttaaaaataggttatacatgaaaatgacaaaattcaaaagggtatacaatcttatatactttaaaatatactttacttagtctatcctatatactttaaaatgtattttacttagtctaatcagccgtgatcatttatttatacgtgaggcatgacaggaagaaattgaggcacagagttggtatccaatggaaggccacccattgatggagaaaccaaaccccagtgagtaaaaccagactttgtctttcagaattcttgtgcataaatgaagttgggtagattcatcctgatgccactggatatttttcattttttttctttactttttgtatgcctgccagtctcagtgaaagataaggatcagggttcagaaagcctaactattgtgtcgtttcccaggatggagagcactatcatttggttcacatttttattaaaataagatgagtgattcactcacattacaggcaaaggatcctttaccaggaaaccatactttgaaaaacaaagctgatggctttaaggaacagtaactactaacatcaatttcctttcccatcaagtcccaaaagagtcagacactcttctttctctagctgcctcattctcttcccgatacatatccatataattatagatagggtacattacatatacccataaaagacaaaacagcaggaaagacaaaggtagattcatctgaagagatgtgtgtgtttatctatatccagtcttctttctggttcttgctgtttctgttccttacgtctgtttttttagttgataggtagccgtaaatccatcatcattggtggaagctagtggattctgacgagaaaacaggctgtggtcttcataagcacgcctacatgctggccaccaccctcccctgctcgcacacccatcaagaactggagaacttagattgttgcttttttatttttagtctgtcttggttccactcaccctcagtgagtaaccccgttagccactgcttctgtttatatttatttagaaaagaaggaaaatgcattttaagaaaatcaaatgcataatctgttccacttcttatttattctgtggctgctttggacagtggaaagctcagaggaagtataataacttttattcatttttgttttctgtggcttgctctcttaagttctcatcagacagctttgctaataacataaaatttcatcctaatgataagcctgattttaaattgcaaagaaaaaggtagtggggccaggagcagtggctcacgcctgtaatcccagcactttgggaggccaaggctggcagatcacttgaggtcaagagttcaagaccagcctggctaagatggcaaaaccccgtctctactaaaaatacaaaaattagccgggcacggtggcacgtgcctgtaatcccagctacatgggaggctgaggcatgagaattgcttgaacccaggaggcagaggttgtagtgagctaagattgtaccgctgtattccatcccgggtgacagagcaagactctgtctcaaaaaaaaaaaaaagtgggaagtattttttatatatataaatgaaatatacttttctcttcctaatctgtgtctagtcctgttaaaattgcagatacaggcttataatggctttaactgtttattacttttgttgtctcttctctattttcttataggcatcagtagcaagtcacttaaaatagaaagggcctgtcagtttgaggggaagcaagttacaagccagacagactacatctgaccctggagccaccctaggacaaaaagtgatagaaagagatggaatagctagtgggagatttaaatgttcacagtaatagtcactggccaggtgcggtagctcacacctataatcccaatacttcgggaggccaaggcagaaggatcatttgaggccaggatttccagagcaacctgggcaacatatcaagactctgtctctagaaaaaataaaaatgaaaaaattagccaggcatgatggtgcatgcctgtagtctaactacttcccgcctaggctaaggcaggaagagctcttgaacccaaggaattccaggctgcagcgagctatgatcataccactgcactccagcctgggtaacagagcgagaccctatctctaaaaaaattaaaataatggccagcacggtggcttatgcctgtaatcccagcactttgggagaccgaggcaggtggattacttgagctcaggagtttgagaccagcctgagcaatatggcgaaaccttgtctctacaaaatatacaaaaattagccaggcgtggtggtgtgtgactgtggtcacagctatttggggagctgaggtgggggggattgcttgagcccaggaggtggaggttgcagtgagccaacatgacgccaccgcactccagcctgggcaacagagcaagatcctatctcaaaaaaaaaaaagaataaaattaaataataaacaaaataataatagccagttgcagctaacatttactgggttctcactgtgggaattcactgtgccaggtgtttttcatccatagacgaaggaaaagcaggttgggttcccagagacttacagcaaaaagaaaaggacatcatagggagccagtctgtgtagcagagaaaggccagcctttgaatgagaaggcttgatctgatccaggaactaccacttatgcggcaattttgtcccttgcttgagcctcattttccatgtctataaaaatgggaattaataccattttcttttccctgccccacaaaattcttatggggatcaaaagtgataatgcatatgaaaatggtttgcataattctacactgtctgcaaatatgagccatcagcactattaaaagtgaggcaatagaggattggcagtgcactgacagtctgggaaagtggcgcacctgccttcaggcaggaactctgttattcattcatcaataaagaacaaaggcttgacaaaataatcatgagataagaaataagatcgtttcagccacccactggctggagctgaaggagaactgtgataaattgtgccttttgttatgcaggtgccatcccacctgtgtctgtgtgccttaaatgaaggaaagtaataaaagtaataacaagagcaggtactgttgattggatgcttatctatgccatgtaccagcaccttaatttaccatctcttcctttaaaaaaaaaaagattttttaatcctctcaaaaattcatgattagcattatcattattcataccattattactattattcactgtcattttcaattggctcgcctaatgtcacatggctagttagcagaagaaccaggatttggacccagatcggctgattcaggagccttgattattattattattttttttttgagatggagtctcgctgtgtcatgttgcccagactggagtgcagtggtgtgatcttggctcactgcaacctccacctcccaggttcaagcagttctcctgcttcagcctcctaagtagctgggattacaggcatgcgccaccaggcccagctactttttgtatttttagtatagacgaggtttcaccatgttggccaggctggtcttgaactcctgaccaagtgatctgcccgcctctggctcccaaagtgctgggattacaggtgtgagccaccatgcccagccttagcctgtactcttaaccattgcactatgtaagacccacttaggttttagggcctaactgccctttgtagagctctagagttttaaggtagcacctcaggccttctttcctcgacttctcgtctgggtgagagctgttgaagagaaagttggctaaaaaaggctttgtttttataaatattaaatattgagattccttacaagattttcatttgttatctctttgagacagggtctcactcagtcacccaggctggggcgcagtggtgcaatcatggctcattgcagccttaacatcctaggttcaagccatcctcccatctcagtctcttgagtagctgggactacaggcgtgtgccaccatgcacagctaattttttcatttttattttttgtggagatgaggtctcactatgttgcccaggctggtcttgaactcctgggttcaagcgattctcccgtcttggcctcccaaagtgccgggattacaagcatgagccattgcgccagacctagatttctattttttaaaatgtatatatattaaaacatttttttcaggccgggagcagtggctcacaacatccttattttacaggtgagaaaactgaggcctagaaaaattgtgcccagataggtataatcctttgccgaagtcagaccaagttcttttctctatcatgatgtgtctctgtagtaaacttttgcccccctaaaacaacataaaaaccttcattctggctttaaacaccccccagaaataaatttaaaattctgcctctttttcaaaggttgagtgaggtatatcaccattgggagggtgtgatgttttctcttgcctttagtcaccattaggagggattaaggtttattctccagtttagctcttgtgcctgtttaaccatttctgttcaattaagaacaggaatgggttgcaggagtttgtaacaacacctgcttcttggaggagaattataacttggccctgagttgtccgtttcaaagggcccaccctgtcctcctgtttccaaagaaaaactggaagtggtaacacctggtggagctgcatgagcacgtgagtggtggtgcaaattctaggctggagtcacttctttgatgggctgccggagcctttgagagcttatggtgccaagatcctgctctacattctagtgtccaaaactgccttccatttcctcaataatgggtaggaaactgtgtccatgccagagtagctagccccgttgctactagagaggctttcttttctcctagcactggtgcctccttccacaatgcatacggctgcccaccctcgccatatgcagcctgtgtttcatatcctcacactttctaagacaggacctcccccagaacaaagccttgccttggtcctccaatccctaatggccccatcgtgatgaacagacccccaagggttcgacacagtataggggattcttatcagaccaggcctgtggtttaagccaccagtggtggttcaggatggccatggttagcctaaaaacctgatcagattgccatggtatgtcctacatgaccctgggtagaatgttgagatcctggttagaaatgcctgcatttctttaaatctttacctgctgtatataaacagttcctggagagttgtttttgttcattttaaacgttgccataaaattgttactgtgtctgatttaatactttgcctagaacaaagatactgccaaatagaaatagactaaatacatttctagcttggtgtctggcttagtcataataaaatataaaactaaaggggcagccgggtgcggtggctcacgcctataatcccagcactttgggaggccgaggcgggcggaccacgaggtcaagagatggagaccatcctggccaacatggtgaaaccccatctctactaaaagtacaaaaattagccaggcatggtggcagacacctgtagtcccaggtactcgggaggctgaggtaggagactcgcttgaactcgggaggcagcgtttgcagtgagccgagatagcgccactgctcttcagcctggcgacagagcaagactctgtctcaaaaaaaaaaaaaccaaaaaaaaactaaaggggctttctgcccccattggaacacactgaagatgctctggggagtaatgagctggcaaagggtagtgttcataatggcccaaatactttaccccacaggtgtcattcgaggccattgcctcttattccttttgtaaggtcatttcccattcagtcaactaattatcatttccctccatttataatataaaacaacagtgctgccagaggagataaaattgaataacacagccttctcttcttctggggctttgcttgacaggaacatggccctagtagggtagcaatctttctgtgacatgtgataccaactgctacatggggagtgaagtcgtcagatgtcttgcctccttcttcccttcccccacactgtccctcactcccttccccctcctcacagagtagcactgagaagtatttactcagctgtggcctggtaacaaagccttggtgccccagggattggaaggggtggtgtggtcatgccccgaactatccatgtccttccgagcatctcttggcagagcagcctggctgaggatgagtgtcatttagagtgagccttcacaacccctgcataaaagaacataaaaacaattgcagctgaaaattggagagtccacacatgggctgtggtattctctggcctctgtggtagtactattgagatcatgcagccaacaaactagaggctgttcagtcctctgggactcccatggcttgtagcatttcattatctttagctcttgtccagcactagctcactcaaccaacatataggcactcacacaaatgaatttagactgagccccatttcatcccccataaatttagagctaaaagtctttgacttcaggctttagggaaggttttctctgaaggaatgaatatatggccccacttccttccatctggcactcctccatgggtattctttagtgacaccactgtgatcctggcaaaggtaccatttcccaggaagaggagaggtatccgatctacagctatattccaccacagttctgagcaaatgtggacacgcatggtggtctgcaaggaggatgtagaaatgactaagctgctcccacagagcttcagaagcaggacttgccacagcaagaaggcagaccagatgtcaaaaagacatccttttcctacaaatgagaatgagttagcccttgaatatattgggaatcaataatttctgactaattttcttagctaaagtaaattcatctaacactctctaggattagagtggatataaccaacagaagaatattttgagtcagggcagtgcttatcttgaaagcagtagtattcatgctagagttgtaacagcaataaagtgaatttctgtgaagtgaaccctaggcttcctttggttttcatggaaaaatcagtgacatggcctggcgcagtagctcatgcctgtaatcccagcactttgggaggctgaggcgggtggatcacctgaggtcaggagttcgagaccagcctggccaacatggtgaaacctcacctctactaaaaatacaaaaattagcctggcgtagtgatgcatgtctgtaatcccagctactcgggaggctgaggcaggagaatcgcttgaacccagtaagcagaggttgccatgagccgagattgtgccactgcactccagcctgggtgacagagtgagactctgttaaaaaaaaaaaaggaaaatcagtgatacattcttatgaaaagaaatattcaagctgattgaactgagcacttggtgcaaaggccaacaagcccatgaagtgtagtacactggtcatggtttatcatgtttactgacagttatagtacctagcacgtaggggattttccttttttcacactttacaactcctggtttctcctcatacccctgtaattttgcagaaatgcctcctgtgcctggagaccccctatctttgtgttcacacagtaaccagaactttttccctatgaatttttatttgggtcactgtgtgaggcatgtttttatttattcattccttcaacaggtgtttactgcaatgcaccaggcattgtgctgattgctttagctaagttcaaagattccttaatttcaggacttcaagttttaatcagttaataattataaaataatgctaccacttattgagcactttgctaacttttttcagaaaagtgtatatgttacctcttttgatcttttacaacaattccattaggtaggtactgtagttcttacacttttaagacaaggaaaccaaggttcagggaagttgtacagcttgtctaagtcatgctggtggcaagtagtggagccaggtttttgaagccaggtcatctgattgcaaagtcagagttctgcactaatacaactgccctgcccaactaccctgtgctgtttaaagtggcctgcctgaagggtacctgtatgtttaacttagatagaaaatctgtcagtcacctggtgtgaataatcctaacatcagaagtccttcacaaaccagctggatcccacctgctagggtggaacttgcaggaccttcagagcctgtgctaggcctaggtctgaatctcagccctcttcctagctgtttccttgagaaaatgattacacctcactgagccctagtttctttatttctaaaataataatagcaagtactaacagatggcccttacgatgggtcagacactgttctaagcactttacattaactcataacaactctgcaatgttcatactgtcatttcatagatggggaaactgaggcatggagagcttaaaagtcaagtaacttgaagtcagtggcaaagctaggatttggacccgaacaatctaactccaaagtccatgctattaaccacaatgctatgctgtgctgcctctggagaagataggatcaagggtgtaaaacacctctggtctggagccagccacataattggtgagactagtgcaaggcttagaagaagaaagtttagcagtctgaccacccacaaaaggagacacacaaatttgtggagagtgttctgattttgatcttacaccaaagccttattatgtctttgcctttgaacttgcaggacctactggctgacactcttctaattgtggggggatctagagaaggtgtctactgatacacaatacttacctcccctgcacctgccaggtagaagagtggctggcaggtgggtggggatgagagaccacggtgtggccaccagcacagtggtcccccagcccatgccctctggcctgaggctgctgtgctggagcctcagtcttccctgttgacagtaattagaacttttcagactcggtttcttacatggaaaatctcaattcacttgaattgtctccttgatccagttcaactggagctatttagttcctgcagttagtttggaggggaaaacaagctcttaagcctcacacattatagctgataagatcaaggtgctgacagtgttagctgggtaggctttggagccagactgcctgggtttgaattccagttctacctcttaagtgtgcacaatctgagtttttgtgtctgtgaaatgaggataatagtcgtgaagattagtgaggtgacatatgtaaaccccttagaacagtgcctccccaagaccaagtgctcaataaatgttagctgtgttattgttaagcccctcctgccatcagcctcccttctctccctcccaccctgagatcttgctcagggaagacaggtccccttcctctcccctaccctggaccctcctctctttccttgctcaccagcttatttcatccctctaaactttctcatcctcatctgtgaaatgggactggaaataatggagtctacttcataaggtagtatgctgtgaaggctaagtgagttaatttttttttattttttatttttttgaggggggaaggagtctcactctgtcacccaggctggagtgcagtggcatgacctcagctcactgcaacctctgccttctaggttcaagagattctcctgccccccaagtagctggattacaggcacctgccaccatgcttggataatttttgtatttttagtaaagatgggtttttgccacgttggccaggctggtctcgaactcctgacctcaggtgaactcttgccttggcctcgcaaagtgctgggattacaggcgtgagccactgcgcctggcctaagtgagttaattcaagagctgagcacagatctccatggctactcactctctttacagttattgctggagcacaaagggctgtgagaagggcctttgagatcttggacagttctaagagccaaagggcccaaaatagacaggagcattagggtgaactggtgcccaaatgcaggctgcagaagctagggggactgctaccttgttcatcataatggggagcctggaacagagcaggcacatgggaataggaagtgagtggccactgcaggagagtgttcaaaacggatttggctcaggcaacccaacagagaactttcaaggcagaaaacttttaggtgtttaagtgtccaaactcagcaacagccaggctcatgcctgtaatcccaacactttgggaagctgaggcgggaagttcaagactagcctgggtgacggcacgagaccccgtctctacaaaaattttttaaatgcgcagggtgtggtggcatatgcttgtagtcccagctacttgggaggctgagatgggaggatcacttgagctcaggagttcgagactgcagtgagctatgccactgcactccagcctgggtaacagagtgaggcccccatctcaaaactaattaattaattaattaattaaaatttaaaataaaaaaaactcagcaacaaataccttcctcctctcttcttctcacctccagaatttgaaaacagaaccaaaacaaactcccattgtttgatgttactaagttctagacattctgctaagcactttatagacatcatctctcttacacttgactttaaccctgagaagtgtcagtgtcacttgcattttacagatgagaaactgagacttagagagattaagcaatttgcccaagattacatacctggtgaatcgcagagccaaaatttgaatcctagcctatggagcagaaagggaacaagctcccatatgcctatcagtgttctgattttgaaataagtcttaccacttatagttctctcaatacccactgtacaacagctgaggagtgtctcgaagtagcagaaatcatctgcccttgacattatctggtcactacttcagtagaattagaactcctctctccacatcccaacacagagtctgcatggaagaataataataacaactaatagaactactctctccacaattaaaagttgtttatttgcttgcattttcattaatctctttatctgactactgtcctcacttaacatttagaagagtcaagttccagaagtggtgagcaggatgtattctgtttttcatatttttaagagcttttgttgtgttagagaagcacgcagtgatttttgtaaatcattcttctgtccttggaagcaagtacttgaagtacatgagttagaataatatcaaaaacctgaagagggcctagggtctagaaaccaggaagctaatgttgactcctagcattgtctttcttaattaagtaactctctctctctctctctctcattttttcattttccttcattctgttatcttcccaaggatattttgtaggtaatttgggggataaatgtaagttcctatgaaacactctgactctccctaagaatgctatcagatatatccaccaaagtttagcctagaaaagcacgatgattcaaagatagaactttcctttatttactccctgccctgccagaaatcactcttctcttttctctacatggggagttctggagtgagaataaagtgggaacacattagactcagtggattttctcccttcccttcgcctttttcctcaccccaagcctgagaccacgagtggcaatgactccctcccttgaagaacaagacctcctgccaggctgtgcccgaggtcaggcaagtgggaagaggagagtgccacaaaaccatcttgatcctttgacctatattgacgctgagtctgttcctttggtgtttctgactttggcagtgtggttagtcaaactctctgtccccaccttgaattaagctttgatgaaaaagtactaggaacccaggcctttccctggagatttggggtttttgtcttggaaaagcatcaaccaaactaacgggggcaggagatctggattcctgtggcttgggctaacttaggtccaaagaaaccaagtgcctgtgatcatcatcttcattccccaaatgtagccatgccctctggattccctcctctcactcatcctcctcccaattaggcaggcttccgggtggattgctctcactttagcattaccaggcccttccatattcgaaatgctttgatatatgataatacttacacattcttactccttggctgatctaaaatcttttgccttcagtacatgcagcaacaaaataacttaagcatcagtgtatttcttctccctcaggatcctataaatttctctgagattcacctctctgggttctctgctggaccacagagcctcatcctggctcacctctcccaaagcacaaagcattgcttctgtatatcaggaatcatttggttgccttgactgtatatcttggacctttgtcttggcttcctataataggatgaccagatttgtgttcagccattcaaaagaagccagcctgctgcagtactggatgacagagtaatgaggtctgtgggtttctatgctgtactcttctccctacacagcaagactgtttgcgttagtactgcttccagatattctgtggatggtctttgggcatgtggtgggaaacgttaccatgccagagaatttcagcaaatttaaccggctttgaaatgacttgttcttccagatttttatatacaaggaaaaccaaactaaagaagactgatgaaggtgcctctcttgtttgctctcttcacccgaccaattttcataccagtgaagctcctttggtcaaaatggtgtaactggatgcctcccaccctggaaaagctttgtagaaatactgatcttaaaatctcacacctggaggttagagactagcatacccttcacactgacttgcttttaaaagaacagctctaccaagaccaggtctgaaactcatgaaatgaacaaaaagagggcagtgacttgaaatgcagagacctaatgtgttcctctccatttccacttcagatttgctgaccatgaaagaatatcactgtttgctgcaattactgtgtcctgatttcccgctggagctcactcagaaagcagccaggtacgtctcctggactcttgaaaccaactcagctctctgtgggccactgcttcctagagaaacctggagtgtatacaaatgaaaaaaaggagcatttagggaagaaactggcagtgggagaggggtctatttgggatgtgccccaaaacataatacattctgcatttccaaagggaagcgaaatgatcctttgtggtttctgtggggagcctcagggtctgaagatagagttggagggtggtgagatgaagaggcagaaaaagcccagacccctccaatacccccacacacacacaccctagaggatattctgagaaaagaggggctgcatttgtgtgttttcacgctactgtaaagatactacccaagactgggtaatttatgaagaaaagaggattaattgactcacagttccgcgtggcctcaggaaacttacaatcgtggtggaaggcaaaggggaagcaaggacctttttcacatggtggtaggagagagaagtacagacaggggaaatgtcagacgcttataaaaccatcaaatgtcttcagaactcactcactatcacaagaacagcatgggggaaactgcccatgtgatccaatcaccttccaccaggtctccctctcaacacctggggattacaattcgggttgagatttaggtgggaacacaaagcctaaccatatcagggggcaagggttggcagtgacttgtgatgaagagagttgaggttggggactggaagggcataaaggtgataaagccccagttgaaggaaaggcacattatattatttatgccagaagaaggttttcaagatcagtccagaaccaggacttggcagaaatagttagaagcccctaatttctgtgttgggtttcaccatcattcacaatttttaaccacatgaggtaattggactatgcctcagttaacttttacttacttaactcaaaacctgagctaggccagacacggtggctcacgcctgtaatcccagcagtttgggaggccaaggcaggcagatcccctgaagccaggtattcaagaccagcctggcctacatggcgaaactccatctctactaaaaatacaaaaaattaaccaggcacggttgcgcttgcctgtagtcccagctattcgggaggtggaggcaagagaattcgcttgaacctgggaggcggaggttgcagtgagcagagatcgtgccattgcactccagcctgggcgacagagcaagactccgtctcaaaaaaaaaaaaaaaaaaaaaaaaaaaaaaaaacctgagctagggttgcaaatggacgtacagcaaaaatcatgtttatcgaagaatgcctaccttccctatatcatactgaatgcatttaccttcattgttctatttaaatttgtttaccttaactatctcacctaatccttgtaaaaactgttacttccctttaaaatgatcctttgtggtttctgtggggagcctccggctctgaagacagagttggagggtggtgagagtattaggcaaacaacaaaacacacacacaaatacatacccacactcccacacacacccctagaggatattctgagaaaagaggaggcaagggttggcagtgacttgtgatgaagagggttgcggttggagaccagaagggcctgaaagcagctgggcgtggtagctcatgcctgtaatcccagcactttgggaggccgaggtggatggatcacctgaggtcaggagttcgagaccaacctgaccaacatggtgaaaccctgtctctgctaaaaatacaacaattagcctggcgtggtggcaggcacctgtaatcccagctacttgggaggctgaggcaggagaatcacttgaacctgggaggcagaggttgcagtgagccgattgtgccactgcactccagcatgggggacagagtgagactgaacgtcaaaaaaaaaaaaaaagggagcatgaaagtgatgaaccccagttgagggaagggtactgttactgctcacttcactgaagtgggaactgaggctcagacgggtgacaatgttgtgcgaatatactgatagcttgtaagtagcagtggcagaactggaaccgcagtcagcctgaatccagagatgggggatcgggagcacaaggagtctcttcatgctcccacctccctgtgtcatggcatcatttctgctttgtggtttgacccactgaaaacaaagctgcattggctgcactgcaccaagaatcacctcgctccttttgaaatgtgccaaccagctcctctattgacttggaagatgggaactccattgctcccagtgacagacaccagcctcacggtggggcacggtgttttgcagctaacagctcatgacctacttttgctggtcatgtgcaaaacctgtttagtgatcacacatgcaaaattttgtaggtttttttctccctcattattcagtggataattttctttcctgatggcaactggccactggtaaaagccgcagttcaggttttataattttaatttatctgctatccaaaggagatttggatattttttttcttcactgaaaaaaaaaaagtatgggagattatctcttgtaatttaaaagcagccaaatggagttagctttaaatttccatgatcgttcccctttgggcagaaatcattttattaaaaacatttttgtttgtttgtttgttttctttgagacagaatctcactctgtagcccaggctggagggcagtggtgcaatcttggctgactgcagccttcaccccgcctctccctgggttcaagtgattctcctgcctcagcctcctgagtagctgggattataggtgtgcacaccatgcccggctaattttttttttttttgtatttttggtagagacggggtttcaccatgttgcccaggctggtctcaaattcctgacctcaaaagatctgcccacctaggccttctaaagtgcctgggattacaggcatgagccaccacagccagcctgggcccagattgttttaaggaatattcagccccaaaatctggggagataaactcagcatccttaaagaccgaacttaaggccgggcacggtggctcacgcctgtaatcccagcactttgggaggccaaggcaggcggatcacgaggtcaggagatggagaccatcctggctatcatggtgaaaccccatctctactaaaaatacaaaaaaattagccgggcgtgttggcgggtgcctgtagtaccagctactcaggaggctgaggcaggagaatggtgtgaacctgcaacaactatatcctatattcatttgttcatttgtttattcatcaaatgtttctttttaacagctttttgggatacaattcacataccatacacttcactcatttaaagtataaaattcaattgcttttaatatatttccagagttgtgcatccattaccacagtccattgtagaatgttttcattaccctaaaaagaaatcctacaccccttagccattactcttcagtccccactccaccgtcttccccaaccctaggcaacccctaatctactttctggctctgtagatttatccactgggcatttcaaataagtagaattgaggccaggcacagtggctcatgcctgtaatcccaacacttggggaggctaagtggggaggattgctcaacatggtgaaaccccatctctaacaaaaatacaaaaacttagccaggcgtggtggtgtgcgtctgtggtcccaattacttgggaggctgaggtgggagaattgcttgagcctggggggcagaggttgtagtaagctgagattgtgccactgcactccagcctgggcaactgagtgagactctgtctttaaaaaaaaaaaaaatcaaataagtagaattgtatatgtggtcttggccaggcatagtggctcacgcctgtaatcccagcactttggaaggctgaagcaggaggatcatttgaggtcaggagttcaaacccagcctggccaacatggtgaaacctgtctctactaaaaatacaaaacttagctgggcatggtggtgcacatctataatcccagctactcaggaggctaaggcaggagaatcacttgaacccgggaggtggaggttgcagtgagccgagatcatgctgctgcactccagcctgggcaacagagctagactctgtctcaaaaaaaaaaaaaaaaaaaaaaaaaaccacgaccaggtgcagtggcttacgcctgtaatcccagcagtttgggaggccaaggtgggtggatcacgaggtcaagagatcgagaccatcctggtcaacatggtgaaaccccatctctactaaaaatacaaaaattagctgggcgtggtgatgcacgccagtagtcccagctacttgggagcctgaggcaggaaaatcgcttgaacccaggaggcagaggttgcagtgagccgagatcgcgccactgcactccaggctggtgacagagtgagactccatctcaaaaaaaaaaaaaaaagtgttttttttgtgactagtttcatgttttaggttggtgtaaaagtaattgtggttttgccattattttcaatggcaaagactgcaattacttttgcaccaacctaatagcacaatgttttcatggttcatccatcttgctgtatgtatcagtacttcatttcgccaaatgtttcttgagtgcatattttgtgccgggagctattctgcaaatggggatacagtcatgaataagatatagttcctgcccctcaaagaacttgatatagaaggggactgcttaggtactggtcattggctgccaccactctgtgacgtatgaccttggttttgatcaatcactccagaatactgacctcttttccctttcccatgatgtgagggagcttatgagagtgaggcttcaaaatgcatcttagccccccgcagccacagctttgcatttgccccagctgtctcctcagacccttccaaacaatctgatacatgaaagcaccacaagatttgagtgtaggtggtagaatcctgtaagaaccaaaaattctcgataccaaggtagaattgtacagttattgataccaaggggcttctggaatggtattcctctatttgcggctggaaacttacccactcctcacctagaggcctgctgtttgacagacacctcagacctttctgtctgagcaggaggaagcatcgtagccagtccatatcaatagcagtctgagggaattatgggaatggcagtaacaacagaagggccaagggtaacccacatggcactggctgcagttagagatgaattcagaattaggataagtttgttttctccccgagtatgagcatcaagcttctgtgtcaacttctcctcccaatgccatgctttccccactgtactgcagctggtgcatatgtagaaaaattgtatgtatcccagaaagcatcccctgattttgtaaactattctcattttgtcctgaagatcagggtcccagcttccccacacacatacctatgcatctgatcagaactgcaaatggaggtggtagagacttcaaggcagttactattgctagaagaggaactgccctctcccatttcactgccaggcttactttattcaggacactgaagtctggggacaggctgcagaagcaggctccagtctgtgatgatgtgtgcgtaaaagaatgtaatccacatgcagctggaagccggagcctgttcaggggcatggtgtctccacatgcgcctgccttatgtgctacaagcatcatggccaggccctggggcagcaggtgtgagctggaaaaacaggaaaagaaaaagcaaacagactccatgacagcagccaagccagagatcccctccacctcacatattcctgcagcaactggagtagttcttttatccccagatgatcaccacagcatctcccactccccatcctccatggactggaagctttctggatggttaagagcatgcagttggaaccagacttcttgagttcaaatcctggttccacaatatactagctgtgcccttgagaaaggtatttaatttgagcctgtttcctcacttgtaaaatgggaataataatagttgtaatgattgaaggagaagtatatgatgtgcttaaaatggtggctggcacagagtaaacttgtcataatcgttagaaatggtaatattaaccttgacctagaagaacacaggccccatggcattagaaagatctactgtacatcccacctgtgccccattaactggatgaccttgaggatatctcttaacttctctgagccctgtttttatatctgtaaaatggggatgataataataatagtaactaactcatagggtgtttgtaagatttcagtaacaccaacaaaaccatgaacactgcttaccacattgtagacattaaatcagtaataattttttttttagatgaagtcttgctctgttgcccaggctggagtgcagtggcgtgatcttagctcgctgcaacctccgcctcctgggttcaagtgattcttgtgcctcagcctcccaagtagctaggattatagatgcccgccaccacgccttgctaattttttgtatttgtagtagagacggggtttcaccatgttggccaggctggtctcgaactcctgacctcaagcgatctgcctacctcagcctcccaaaatactgggattacaggcatgagccaccacgcctggccagtagtaatttcttgctgttacaattatgttggtattattaatagtaccagattaaaagaaaaatgagatgttcctgggtttccaaaggcaatgcttcctggcctttttgcacttcacagcaatcagaaaataatatataacaaaaatctccagtaaagacaagacttcttgtgattggcctgcaggctctggcctcctcccagctgggccaaggggaccatcacatctgtaagtcatttgaggccgaagtgacaaagggttgggaagctctgctccaagggtgaagatttaaagcactggttctcaaacttgagcatgcatcagagtcacctgcagggcttgttaaaccacacatggccggaccacatccccagagttcagtaggtttagggcggggctcaataatttatatttctaaaaaattcccaggtgatactgatggtctgggaaacacacgttgagaaccactgatttaaagtattgcctgccattttttttttttttttttttttttttgagatagagtcttgctctgtcaccaggctggagtgcagtggcatgatctgagctcactgcaacctccgcctcccaggttcaagcgattctctcgcctcagcctcccaagtagctaggactacaggcacgcaccaccatgcctggctaatttttgtattcttagtagagactgggtttcacactgttggccaggatggtcccaatctcttgaccttatgatctgcctgcctcggcctcccaaaatgctggcattacaggcgtgggccaccgcacccggctgtattgcctgcattcttattctggctgggcatggtggcacacgcctgtaatcccagcactttgggaggcaaaggcaggtggatcacttgaggtcaggagttcgagaccagcctggccaacatggtgaaaccccgtctctactaaaaagaaaccccatctctactaaatacaaaaattagtcgggtggggtggcacgcacctatggaatcccagctactcaggaggctgaggcaggagaactgcttgaacccgggaggcagaggttgcagtgagctgagatcgcaccattgcactccagcctgggtgacatagcaagactctgtccctcccaaaaaaaattatttaaaaaatgttattattttttgaaatgaggtcttgttctgtcacacaggctggagtgcagtggtgcattcatagctcactacagcctcaaactcctgtgctcaagtgattttcccacctcagcctcctgagtagctaggaccataggcacgttctacaaagcccagctaattttttattttgtagagatgggggcagtgatcttgctgtgttgctcaggctggtctcgaactcctggcctcaggcattcctcctgcctcagctttccgtaaattattttattttattttattttattttattttaagatggggtcttgctgtgttgctggggctagactcaagctcccaggctcaggcagttttcctgcctcagcctcccaagtagctgggactacaggtgcacaccaccacacccagctaagaactttttaataaagaattcctacaaattggctgggcacagtggctcacgcctgtaatcccagcactttgggaggccgaggcgggtggatcacctgaagtcaggagttcaagaccagcctggtcaacatagtgaaacctcctctctactaaaaatacaaaaaaattagccgggcatggtggcgggcgcctgtaattccagctacttgggaggttgaggcaggagaatcacttgaacccgggaggtggagattgcagtgagccgaaaccgtgccactgcactccagcctgggcaacaagaatgaaactctgtctcaaaaaaaaaaaaaaaaaaaagaattcctacaaatcaataagaaaaagattaaggatctcagtagaaaaatagtccaaagatataaacaggcaatgcacagaagaacattagtaataaacctttgggcatattttcatgcccacactcactagtaatcaggaaactcccaactaaattgagataccacttcatacctatcaaattggcaaaaattttaaagtctcataatacaaatattggtgaggatgtgaaatagtgggaactctcataaactgtgtgtgggagtgtaaattgttacaattactttcagacaatttaggcaaatttttaaagttcaagagctactcctgggaataaggaaacatgcagtattgtttgtaatggccgccattggaacaatctgcacgtccctctgctgaaggaaagaataaagtgtggcatattcataccatagttgtggaattctttccagcagctaaaatgaatagctatatatgcatcaatcctgatgaatctcaaaatatcaaagttacagaatgacacagagtttgagaaaaagcaaaacaaagctatataatgttttaagaacacagacatttgcatgagttaattatagtataaagacatgcagaggaatgctagactcccaagttttagtaaatcatggtgatccccccaggaagaaaggtagaggataggatgagggaggggtgcacaggtggctgaaatggtatctgtaatgctgcattttacaaagcttttaaaaactgaagcaaagatagtaagacgttatggtctgataaaattggctagtggggacacaagtgtttgttatgttattctctgtagttttctgaggttctaaacatttcctttaaataaaaaatgatggggggattaggtagagagcaatgagagcaaaaagcatttcagggaaagtaagcagcatggaaaagaagctaggctctcaccaatgatggcctggaggaaccaagagaagccagtaggtctggaatttgaggcatttgagggcagagggagggaaagtggggctttacaggccatacattgggtttgggtctttattctaaggtctgtggaccagttcacccctagctctcaggcttcttgggaagttccagagtaatgacaccttcaggctgtctacagggaagcagcagcacccaggccaaatcttccagtccttctgcgggcagctgctctaacaaacactcaggctgggagaagggaaaggggcagcaggaaggcttcattaccacgagacagcacagagtccactctttcttaccagaagtggctgcaggtggtctcggaactgtgactagcgtcagagaggcctgtatttgaattatagcttttttgctcctagtttgtaacctgagtcaggtttcttaattcctctgaatgtctgcgttctccataaagatactcactgaactgacctcataggattaatacgagcagaaaatgaacttatgggtgtgtagtgctgacagagtaagcccttggtgaatattcactattattatcatcatcatcatattgtttcccacaccctctggatcaagcgtcttaggcatttcagggcaagtagggtttgggataccctggaggtgcgggctggagctagggcagagcaatgacctggacaccccacgccacttcaaggccctaggctagaggcagcttgtgcagcacgagtgtgcctccaacacagtccagaagaggagcaaccctcaggaaatggcccaggacaccttcatagcggcctttttcctcccacctggagaaggtaaccagacatcgtgtcatcgctgcttctctcatggccctgacattcaaacaaaaaccctagaggtgcactgtgagcccaaacagacatggggacacccttcagccaccccatgactgccaccttgacctggggacacccttcagccaccccatgactgacaccttgacctgaggacaccctccagccaccccatgactgacaccttgacttgcggacacccttcagccaccccatgactgacaccttgatttggggacaccctccagccaccacatgactgacactagtcatgtgacctcctcaaagaagtccagtcatggaaagtggctcttctttctggccgtggctgagggctggcttcccccaaaagtaaactggaaactagatcgctggcttctgcctgagacctctgcctggtggatgctggcagcacgcatttcctctgggctctatttttatttgctcttttgggctctcccagcactttaaaccagatagaatatacttactgattacagccggcgctcattctgagcacctgttagacactagcatatataacatcatcatgctgactctccacaagaatcctgggaaacaggaactatgattatatcctcttcacagatgaggaaactgaggctcagagggaaattgtcacttggccagtgagtagtggaactaggacttaatcctggggtcaactaatccagaacttcaggaaaaccggtgcagcccgtgccactagaccagggaaactgaccctaattaggggtgaataggaagttggcaagtcagtaggttcaggctggaagctgttgcttccttggcacccttagaactcccagccagactgcctatcccagctgctggaagtcagcaggggagggagaaagtggccagtctctcagaccagccacgtgctctttctccactccagttgcctgtcctaggctccaccccacacatggttctgctcagcacagcctgaaccaaagtgcctctacttctccccaagagtccctctctctagcccggaggcatggtccgcaagggtccctccatgatccaatagatttgtgcagactctcactggcagcagctccctgttggctccacttcaaagcaggggcggccgggcacctccaggtgtcagaagcagctggcacgttagcagaaggcctctggcaggaaggggtgttgagccaactgccagcaactggaaaacagcacatggggatgacctcgtctccaagaagattctttcccgagccctctgggagtggcaatgagcttgagttcagaaggaaggagctgtctgtggggatagaagggttgcaggcaaaggcaaagaggcaaagacagaccaggagcttcctgcttgccttttcccatagttctgctgagattccaaagcaagatgcagatgcccacagccagaaagatcccataggtgggttaaagacacagatgcctagaactttcatggtctcagcattcatttggagacagacagcacagcatatgatgtgattaaaagcacctttcagtaagtcttctgcagccatagacctctgaacatcaaactgtccccccactagatttaacactaacaggaggagctgttagttctgtccacccttgggacaacactgtcagagctggaagaagccctttgggaagtatgagccttcaaacttctgcttgaacatttctggcaatacacatctcattcctttacaaatcagccacaatcctagaactaagcagcttgaaaatgtctctagagccaaactctagatccccgtggcatctccccaagaggcagtcctttgagagttgggtctcagccttcacttcctccctagtcttcacttctaagcaaaagatctaaatgcagccatttatccagtatcctggtttttagactgtccatcagcctgaccctcttctccaggactctagtttactccccttaaacggactgtccagacctgaaggtagtagtatttgaatgacagctcttttgctcctagcttgtaaccttcgccaagtttcttaatccctctgaatgtctgcattctccataaagattgtaagtatctttatgagagggattaagaaactgctccaggtgccacctggccagaggaaaaggggaccgtggcttctctcactcatttgttcatgcatttcttcattcaacagacgttgactgagtgcctactatgtgccagacaccataccagagtcaagccacaagcagggagacagaggtgtcacttggtagatcttatgttcccaggacaaagacaacagtgtgaggaggtttccgagaactgcagaagccagtagcaggggggcctattctaggctgggttagaaaaggtgctttcctctttcatcttccccaagagatgctgtggaggcttcagcctgaagaatatggagatatccggtaggtgaggaggaggcatggagggcagggagcatcatgggtagaagggacagggagcattatggctagagggacagacttgtctggagggcatgagtaaggacagcttcagggaggatggaaggactagtgtggccagaatgcagtgggggagtcgagggaggcagggggcagatggagcgggctcacaggccagatccaaatgggggaacgtgtcctaagggcaatgggaagactgtgaaggtttttttttttttttttttttgacatggagtcttgctctgtcatccaggctggagtgcagtggcacaagcttggctcactgacatggccacctcccaggttcaagcgattctccagcctcagcctcttgagtagctgggattacaggcatgagccactgtgcccggcctctgtgaagggtttccaacacaatggtaaaatggtcacattcacattttaggaaaatctttctgcccacaggatggatactcaattagaagaaggctcacgcctgtaatcccaacactttgggaggcctaggtgggcagctcatgaggtcaagagatcaagaccatcctggccaacatggtgaaaccccgtctctactaaaatacaaaaattagctggacatgctggcgcacgcctgtagtcccagtactactcgggaggctgaggcaggagaatcgcttgaacctagggggcggaggttgcagtgagccactgcacttcagcctggtgacagagtgagactccatctcaaaaaaaaaaaagcaagaggagtagttgcagggaaactgggtaggaggtcatgccatcatcaagaaaagagaggtgaaggctgggggtaggatggtggctgtggacgtggaaagaagtagatggattcaagagaaatttcagcaatagcattgataggacttggtgactggttgattggcttggagcagagggtggcggggggaagtttccaggatgtctagtatgcccagcgtttctggttgaggagagtcatagccggtgttgctgttaacacaagctcggatccatttggctttttaaaaggtagccagtcttacttcttgcagttgaaaaaaaaccctcagtcctttatacatgtgctgctgggatccagccacatgtcccccagaaagaaagccctcgcctctgtctgcacccgcttcactcgccccctactccctcctgctcggcatatgtttcagctccccagtctctgagactcagactcttcacctgtagaatggaaataacaataagacccacccgtaggactgttgtagaataaaatttaattaatgtagtcaaatgccttaatagcctgccatgaggtagggtactcaggaaagatacctgcctctataggcggatcacttgaggtcaagagttcgagaccagcctggccaacatggtgaaaccctgtctctactaaaaatacaaaaattagccgggcatggtgacaggcacctgtaatcccagctgctagggaggctgaggcaggagaatcacctgaacctaggaggcggaggttgcagtgagccgatctgcaccactgcactccagcctgggcaacagagcaagactcaaaaaaaaaaaaaatgcctctattgttacccgtattaagggcacctgcagggctgccctgctctgacggacactcctaccctcccacggtgtgcgccccctcttctgcaacggcccatctccaaagggactgctgatgtttgaggtcaagatggcccctagcagaaagctgcagaccacttctgaggctggaagggtgtgccctgtttatagcttctagtcccatctgtggctgaaagaggaagatgctagtggcactcagcattaaggcttccgcgaggctgcgaggcaggggtagccctttgggaagtacgagctcaagcttctgctccgaggcaggctctggaatgggcctattggtgagaattgcaaatggaggtaacttctgtaattagacagtggtgatggtggcgctactttgtgaatatactaaaaaactgaattgtacgcttttaaagggtgacttttatggtgtgtcattatatcacaatgtaaataaatagcaagtggaagttgctgctatgggagtgctgtgttccaactgatgatcaacagaagccatggaacacggggaaagccttgggctccctggtggtttcctgcttggggatattcacagcccagtgctgttctgtcgtaattcactttagactattggggctccagctgtcctgagaacagggcagtaaaggaaagtcagtggcttctcatgtccagagcctttgcctgccctgctgagcctgccaaggaaaagctttgaggtgctggtggcccttgctccctgagcgctcccgggggagctcactcttcctctgcagtttggaggtctttgctaaccccagtcctctctagctgcccgctctctgctgtctccctgctccctcaatccagatgtcaaaacagattctgccatctgggtggggagggagctgttctgctgcctgggttttccttgggttatgagatggggtaaccacttggcctttggcactgcacttagtcctgtgaactactgacagagggaccagggcaccctcttgtggccctcagcggcactgcttcttcccgccctccagccttgaatttcttccagctggaattctagtgttgaactctggtggtggaggcagctgtcgttctccccaggagatgcctaacatatcagtaacaagaaagaaaataaatcagccacagaaactaggaggtaaaatgttagtgtttttgctctgcagctttattttcaaagaggcagtgtgctctcatggaagatgtgtggcctgtggagtccagcaagctccccagctgtgtgtgtgactttggcaggctgacctctgagcctcagactcttcacgtgtagaatggaaataataagacccacctgtaggattgttgtgggataaaatttaacgaatgcagttaaatacctcaatagcctgccacgcagtagggcactcaggaaatggcacctgcttctattgttatctgtattacaataaagactaggcaggaaccactgtctctcttcaggaagatcgcagcaaagggagtggcaccacaatatcgtagtctctgtgaagccctttccccagcagtgagcaatcctggctttctctggggctgatccagttgccagtctgggaaacctctgactcagggaagtggagagagatttagaaaaatatgagagagcaaaagaaaactttttttgttttttttttgacagggtctctctctgtctcacgggctggagtgcagtggtgtgatctccgctcactgcaacctccgcctcccaggttcaagcgcttctcctgcttcagcctcctgagtagctgggactacaggtgcccaccatgcccagctaatttttctatttttagtagaagtggggtttcaccatgttggccaggctggtctcgaactcctgacctcaaatgattcacccatctcggcctcccaaagtgctgggattacaggcatgagccaccgcgcctggccaaaaacaactgaaaaaagaaaaaaagaaagataaagccagaaggacctgatcagaaacagattgggggcccgccccaccccatctgatagcttggcgcctgcctggcatgtgatggagcccagcaaacgctcgtttccttctcttcttgtcctggctcagatgaggtgctgagcagaggatgaacatagccttggtcggatccctttatgagtcagacggttttcttcctgtgaggtgggtcctcagtgggagggactagagacaggaaaaccgttgggtgggcaacctgtgaacatggatgcaaggaggagcagggcggcagcacaagatgagtgtgggttttgaccctcacaagtgcagattccccaatagctctttgccctctccccttgtctgccatctgtgccccagggtggcggtgtctgtcgctgttctggccctttggtagcttattaaatctcagtaccacttgccaagaccctttaaaccccttagctgttctttttgccttttctgatcagctgtatttattctgaactaaatggtcctcacggcagaatgaaaggatttactgcttaagtatatgaaaagaaaccttggctgcattacagttgcaccctctcctcgccaccccctgcccatgctccatccgctagctggtgccactgagactgaaccgggagcccgctctgggtacagtgtggtcagttcagtttggtggcagagtccaattgatggagcagtgaggtgactgggaggagcttgcttttgggagccctctcctaaatgtcctgctgccccaggggagactggcggcccaggaacagctctctctctccctctcccccgcacttttcccttcctccctctccctctctccctcccctccttaaacctctcccccattctctctctcagattctctctttccccttcaggattgtgctcatggacgatgccatggactgcttgatgtctttttcagatttcctctttgccttccagatccagttttactactcaggtgagtgttccggggctccatctggctccgcacaggaccctgtctccctgtcctgccctgctgccctgcccatctgtgtgcctggcacacacgtttctcttccccacttcctttgggggtgtgcttcactgcgggtcgctaacaggatgtctagtgttcagtggtggtcacaagattcagtctgcagagccgacttcctcagcctcctgaagacactgaacaccgcagtgttttcagtcagcaacgcaacaaatcagtttaagtgataatgacaataacaacatccatagcatccacagcattcactgcttactgaaaacttactatgtcccaggcacagcactgactttaatcttgacaacagccttgagagagagtcctttcagagacaagctcacagaagtagtagccagtcatgcagctcataagtggtggagaccagacctgaaggctgactccaaagccagcgttcccaacctcgctgctattttactgccttcaagggtctctcccttggcaactgatcgtgcgtttgggtgcacattctcctccaccccacagctttaaaaaagcatacaccagtcctttgtcacactcccactctgctccccaattcacacagctgcacccttaagtctctctggaatcagatggaataaatatagacaaataaatataaatatacaccagctcacgcacagagacatcaaatggagtgccgggtttacaaattgctgactgtgttcataaacaaacttgcttaaaacaggctcttccagtaaatagaaggctgtccttagatcctagaggtggccttcctgccaactggtgtccccagccagccctggcctcatttgggcgccacattctgtttacttgatggcagcccaagggctgtacagttaggggctggagcctggggtctcgccacctgctcttagcagcaccagtcatttcccatttctctgaagctcttgggccctagagaaggagcagccatgtctgggagaacatttttccctcactgtctccccagccctcttctcacagcacccccagagggatgggacagccaccacattgggctgggagcattactgacactgcccagcggtgtgtgtagagacgagatgggccataagtcagcagttctaacaatggctcaactacgaaatttgaaaaccatttcaaatgactgactcatcagcagctttcaggctttctctgttcctcgctggtattccaacacgctttcttgaggtagagaggcaggtggccacacaccatggggcttaccagtgggagcatactcatgttcactcctccaaaaaatatttatggccttaatatgtgccaagcacagtgctaggcaggagaggccaacaaggcatgaccccgcctttgtgcattccagcaaggagacagattagacaattaatgacacagaaagctcctcactggctaagtgccagaaaaaaaaaagcctatggtgctatgaaagtgtgcaatggcaggtctcacctggtccaggaacaactgagccaaggatgggacatttgagcaaaaacacagattagtgtcatctctcatcaatgtgttgtcaaacaaggttgagaacttctgctctcaggacaccatgccctgagcactgaggctggtgtggaactgggctgacagagaagggaagacatagtgaacagacaaaacatgtcctccctgcctgagccgtccacacccacacccccacccccacggttccagaattcctggacagtgtggctgccatctatgaggacctgctgtcaggcaagaaccccaacacagtgattgtgccgacgtcgtccagtgggcagcaccgccaacgacctgccttgggcggggccggcacgctggagggcgtggaggcgtcgctgttctaccagtgtctggaaaacctgtgtgatcggcacaagtacaggtgaggaacgggcatgcagcccccagccccccagccccagggggtcggactgctggctgcggaacagagctccgcaggatgttctgcgcggcccaggcattctagggcccttgctggtcataatgtaacagtgccatttgcccccaaaccagttgttgactgaaaggctctcaattagctcacttcaaaaggactgctttcactcaggcaagaccactgtagttgaccaatttactgggtgacagactggccttaacattttagagagaaggaaagagtactccttgtataaaacttttctacacaaagagaggggtaagctgtcctgtgtggcacaagtacccttagggactgagcaacaggtttggtttcccgtagccatttcccacccccactccccaccccggtgaaagcaccagttagtgaacatgccagcccctcctgaccatagtgaaggcctgatcccccagggccttggggctcccaaggcaggtccctggcttggctgtgggtatcctcatgaacctgaaagtatggatgcagaggtggccctgaggctggctaggctctgaatgtggcatctctccttcttagctgcccacccccagcacttgtcaaagaggccctcagcaatgttcagagactgaccttctatggattcctcatggctctctcaaagcaccgtggaatcaaccaagccctcggtaagtcagagctaagcagccgtcagcctctcctgccgcacaacacagggagcagctggcctctgttagcaacacggctccagaggggaaggggcatcaccatctctgccttgacttcccagggccggactcaatcccagggagcaggaatatggcgacaaaacatggctcttacacattcccatggtaggggacagccctccctgcctgcagccctgccccaacatgaaaccacctccccatagcagaagcgcccagcccctcctcagagaaccccagctctgctttggggagcagcctgcaggtcgggcagacacaggactatttactcagtgacgctagagattatatatcaaagagacctgaatcccatttataaacaaggcacaggtgtgtctgcggagaccttttttccaagctgaaaaaaaaaatctgattaatctgaaagggagaaaaacaaaagtaggggaagtctgcagtggcccagtttttcctgcctgctgttttttttcactgagccttctccacccaccccactgttcctcctcccacagccactgctctcctaagagaagagccagtaagcctccattctactacagtttaaggttttttgttttttgttttattttgggacagagtctcgctctgttgcccaggctggagtgctgtgtacaatctcagctcactgcagcctcgacctcccgggctcaagtgatgctctcacctcagcctccctagtagctgggactacaggcatgcgccaccatcctggaaaatttttgtgttttttgtacagactgggtttcaccatgttgcccaggctggtttcaaactcctgggctcaagggatcccctcaccttgctctcccaaagtactgggattacagttgtgagccactacgcccagcaaggagttcttttttgtgtctcgagagatcctcctgctgtgcttgggatcccaggtgcctgagtctcaaggaaaagacacacagcatcccccttccttttgccagttgagggaatgggattaagggaaggaaagttaacattcactaaatgccaaccacagcaggctaagtactgtgctggatgctttatattttttatcttacacaatatacagttagccagggatgctctgggatacacaagcacaaaccccagcaggctgaactgcatgccacccacagcctggttattctgagtcagtgcttggggcatgcacaggtctggggagccctcaactgaagttggtagccaaggttacccactggactaagactagaaaggaggcaattgacaggccaggcgtggtgcctcacgcctgtaatcccagcactttgggaggctgaggcaggtggatcacctaaggtcaggagttcaagaccagcctgaccaacatggtgaaaccccatcactactgaaaatacaaaaattagctgggtatagtggcccgcacctgtaatcccagctactcgggaggctgaggcatgagaatcggttgagcccagaaggcggaggttgcggtgagccgagatcacgccattgcacgccagcctgtgcgacagagcaagacagtctcaaaaaagaaaaaaaaaacaaaaacaggcgagagtcaggaatcaagagtaagggggaggcgggtgggatctgccctggtgttctttcatactcctcgttatgaccactctttcttcccaccagtagcagccactaggaaggagaagccaattagcaactgggtcacagcctgaagtaacctcatcccccttttctaagggcctttaaaaaggacactggctgggtgtggtggctcacgcctgtaatcccaacactttgggaggccgaggcggcggatcacctgaggtcaggagttcgagaccagcctggccaacatggagaaaccccgtctctactgaaaatacaaaattagccagttgtggtggcacatgcctgtaattcctgctactggggaggctgagacagaagaatcacttgaaccagggaggcggaggttgcagtgagccaagatcgcatcattgcatttcagcctggacaacaagagcgaaactccatcaaataaataaacactaatagccagacatggtggctccacctgtaatcccagcatttggggaggctaaagcaagaggattgcttgagcccaggagttaatgaccagcctgggcaatatagggagaaccccgtctctttagaaaaaaaacaaaaattagctgggtgtggtggcatgtaccattggtctcagctacgcaggaggctgaggtgggaagatcgcttgggcatgggaggtcgaggctgcagtgagccatgatcactgcactccagcctgggtgacaaagcaaaactctgtctcaaaaaaaaaaaaaaaaaaaaagtcactctcattcaaccacttttactgcacactaacattgggtggttggatggaatgggagacagaaagaagcatgtggtctcaggcctcacctgcatctccagcgtatgaaatagaaatccggagatacactggttgacgcgtcacggaggtcagccctgttcccttagtccccagggcaccccacaaatgagagggttctatgagatgtactttgaaaaccactaacttagggcaagaggggccaggaggcatcatctgaaaaagatttggaaaaaggggaaatctgcctgtgccgggttaattctggccctgacccagccttctcctcttgcccctgggatcctccttggagaagcagaggcagcattttttttttaaccatctgtctccaaagtggggtcatcctgatttagggacacaaaattaggtaatgtctgacctttgggcttagcctggaccatatccttttcagcccagtacctgaggcctcaagaaggaactcaactcccagcaccaggtcacaaccaccacctggtgttggaaggggatcaccacactccttggctgtggtgtctgccccaggcagggaaagtaggcagtgggattcaataaatgtatcaagcaacagcgagcaccttcctgctccgtgactgttcttggcccctctagcagtcctcagatctttagatcggccctcgcagggtcagcagaacaggcagccgtgaaggtgaggggcatggaggaatctgttgcctggctgaagggccctcagattaactactgtgcccccaatgatctcctaggagctttgcctgacaagggggatctgatgcacgacccagcaatggatgaagagctggaacggctgtaagtgtcaagtgggaggatactgcccccttgtgggggccagacgggtcggacacggctgtgccccatctggggccaacaccacttgtctgtaacatcccacatctgccagggaagggtctgggggccagtggaggcctgaggtgtccctccctctgagtcctttgggggctgcagcccaggggtttaccctagtgttaagagtgggcatggaggccctgctctctgtacaggaggcctctcgctgccctccaggcttcttcccttcttcaggctggcccaggtcccaggcctggtcaactcggtcacagccagtccagaggccagttgcctgccttcccggacccctccccgggttggctctccctggagacctctccatcattcccgaaaagtggatggagagagtgatggctccactgaagagacagacgagtcggagacttgaggagtccaaagggtcctgcccacagcgccctgtacctgctcccacccagcccttggtgtgcccacccagcctcctctccagcaccttgctgtgctgccctctgctgctgacaaggtgaataacagccccaagaccagccagaggggctctgatgatcagcccagccagtggccccggaaggtgaatggcctgctctccctggccctatcagcctgtgaacttcacttaggccccaagctgacagactgtgctgaggccaccttgtcacgccgtagcctgttagtcctcctaacctcttaagagcagtctcttctgagccagcctctgcgggtcccccaataaggttcatctcctcacagcaactccattaagggggagaacccgaatagccacgcagggccttgcaccatcaagggtgacacctgcgacgcaagtaccaggaggacataaccgctgtggcctgttggagaacagccagtagccttggtaatatgaagggtgggccagaagatgatttcacttgcaaaaactgcttcaagtcttgacccctttgtgtctaatagctaaacaaacatgtgaaacgaataaaaagtccctcatgtctggtaactggtgagtctaaagctcctaggctgaggggagaagggagagggggagtttgggttttcggtgcttttctggtaggactaggaggtaggccagtggcccactcagacctggggacctgcctcagacaacgagcagaggggcctagcttcgcacaagagcaaccttccagaggaaaagtgctcacagctggaacggccttcaggaaacaggttcagagggttcaaggccaggttcccataactttaaagaccgtggccataaagggttaatactgcacagccttccagccagggtttcagtcaacatttgccaagcacctgcttggggttagaacagtgggatgcagctgtgaaagacagacagacacagcctggggcagacacatcccagccaagactggaggcaggtaaggacgagtgtcttcaacttctttggattgagggctgaaggggcggggtcccccagaaagcaaaacccacccagaagcccaagcagaacaggactgcctcctctgaaggtggatgtcaccactactaggcatacacatttccttgggctcatccctacccagaacggatcattacaggaactgcctcccaaacccctgcagagctgaggccaagactaggcattccagccccgaagctgctccaggatgcagtggctcattgcctgtaatcccagcactttgggaggccaaggtgggccaactgcttgagcccaggagttcaggaccaccctgggaaacatagtaggaccctatctctacaaaataaccttagccaggcatggtagcttgcacctgtagtcccagctacttgggagacccgaggtagatcacttgaacccaggaggttgaggctgcagtgagccatgatcgtgccactgcactcccgtctgagtgactgacagaatgagaccatcttaaaaaaaaaaaaaaaaaaaagctcaggctgcgtgatgagctctgtaggcccacaatgatgcacagcccataagagacatggttctcaaatcctggtgtcctcagaatcacaggaaagcctactgacgatgcaaattaccaagctccagagagtctaactctatcaacttgggatggagtccagaaattccagatgatcccaaagctgaatgagtcccaaacctacactctgcaaatccctggcttacagccccctggctccctctgcccatcctttctaatcatccacttcccagaccagtggtctgtaactaccgtgaggactcctaaggtggcacagagatgtttcagaagcccccaagagaaaggggtggccaagctaaggatttacacacaaacacacaccttttcttccctaaatttaaagggtcccattaacgtctaagagtatgtgtgtgtatgtatatatatgtaattttttcttttttgagacagggtctcactttatcacccaagctggggtgcagtggcgcgatctagtctcactgcaacctctgcctcccgggttcaagtgacttctgcttcagcctcctgagtagctaggattacaggcatgcaccacaccgcccccaccccgctaattttgtatttttagtagaaatggggtctcaccatgttggccaggctggtttcaaactcctagcctcaagtgatccacccgcctcagcctcccaaagtgctgggatgacagccatgagccactgtacccggcgttaaatatttcttaaactccactgaaacccatccccagtcaagcctactgccgtgacaaggggcaggactgctgaggttgctcgctcgccctcagccagcgagttaaagggccaactaatgccagctctttcctctgcgtgccacagggtggtgaggtcgaagctgcaccggacctcacggcagcacagagccaaggagccaggggcctttggctttcagagaagagagaagcaggaggccctggagagagtgtcctcagcttcggtaccgacgccctaccattaccggtgggagcccagagagtgaggccaggggccggcactgggcagggaggcaggatccagaggacactgcttcactcagaccaacagggagccaggccctgcaggggctttattttgacaccactttgtttcaatacaaacagtccagaaagaaagtcaagtccctctgggggaggggcaaggggaagagtggtctgtgttgcttgggagcccaacctacaacccaaaggtgggggctgggctgagactgccggtgcggcaggggaagatggcaccaagaatgacagtgcttggctcagctgccagagggtgaggcccacagctctcactggcgggtgctgtccaggccaagcccagaatgatgcagaggaaggagctcagccccaggagcctgcctctgcctctcacatcctctgcttccctggccagcatcaagctcacagcatccagagtcgaatcacagcagacaagaccctccatggccaccaacccggggaagaagggataaagaatgtcacagagggtcctgcattccacagcagatggtacagagggaccctgagacaccctgaaacaatcttccaagtgcttactgtagaaaggggtggtgagacgggagaacccaagggtctccggtctgatcccaaatgaaacctttaggtaccaggtaaagtttccagcccttggtaacgcccagacaaaggtccttcccctctcctggcacccagaagaggccactggcagcagcagcagcagcaagtccgcagcctctttccccatgggacgggtctacagtgaactccttccaggcctccccctggttccagaggatggggacccaaggcctcgaactagaagaaccctagagccagcaaaaaaagccttctaccttccgctttccctacctggggaaagtctggacccagaataagccatcgtgggggaaccccctttcccagtatggcaggataagtgagcagcagctgtgggggcaggacagaaggacaagagtctaacacacggagggtggtgtgagagggaataaagggctcagtccacaggcagaggacaagggctggtactgaccattcccctcacaggagtgagcgcctcaaaggccaccccacacacacaccacacatacgaagtaacaaatcctccccagcttccacaaggcaaagcatccccagcctgggaactgtggagttcttgttgccgtcaccatcgtaagcctgagtcacagagctcggatcagtaggaaccgtagcgatcctgggggcgaggggggagaaaaaaaaaaaaaaagtcagaggctctaagctgcagcagcttcccagcaaacacactgcctgccccagcaccccacagcaagactggggaggcaggggctggacagcccggtgaggcaggagtccacggtgagagctggggcagcggccactcgggcacccgacaacagggaagccctgcctggcctcacagaagctgggaagagaagagaaagagcggtacaggtgacaaggccagggaagatcatggcagacacagaggcatcttggagaggcccggccctggcacggagctgaaaggaaggaagctgccctccaagaaaatgcctctctctagactcttgctttttcgtttgtggttttttttttgagacaagagtttcactcctgtcacccagactggagtgcagtggcatgatctcagctcactacaacctccaggttcaagcgattctcctgcctcagcatcccgagtagcgggattacaggtgcacgccatcatgcccagctaattttgtatttttagtagagacggggttttgccatgttggtcaggctggtctcaaactcctgacctcaagtgatccacccatctcagcctcccagtgctgggattacaggcgtgagccaccacacccggccgaaaatgctcttaaggctcagaggggctgagcagtagcagtgtctctatgtggtggcgaagggcaaacctcccagcactcctcattaggccccacttcagcctcacctgcaaggaattcatcacaccattggccagcacagccattttcccagccacagacttgacaccctgcttaaactgggcaatgtccgctgtaggcagcacgttccccagagatacacttcctgtaaaacaagagcagggtgacccagagcccagcaagaagcccttcccagtcacagcagggccctcccgccctgctcccaggcctcacttggtgcctgccaccccaccagggccctacctgctccgtgagctccatccatgtccccaaagaggtctgaagagctgatggcactgctgcctgagagctgctgcagccgagacctggcctcatactgtggtgaggaaaaggccaggcctggggatcttggggctgatgacccaaggactcacacaggccaggccctcctggtgctaaagcccaaagcagcggcagggagaaagctcatgcttctgcctgctgcctcggacctcagggcagacagccccacttacctctgcatccacctcccgcccaaagaacatgtcagatgagatggctttggctcctgcgaatttctgacgcgcctcactagactcgaggcctgagctccggctctccacttccctccggtttgtggctctgaggggaagatgtggaatatctcggactcctcccattatcatcaggggaggcagagtacagaggccaaacagagcaccagtggccttttggtgatgggttaccaggtcccattctgtctgtggctctgtggctctgggcccctctcccctggtgaggagtcacccttctccacattgaggccaaggcccagagagcttaggaacctgcactaggcagggtggaaatacagcctgcagtggcctaggctcctgcccaaaagcacacagcttcgtcagcattcaggaggccacacaactgctgctaccctaatcctagtgacaacttgcctagtactacaatgagcatatgtgtcggtctgcctggctttatacctactcttgtcataactatgaatagcaaactgccccctttactctcaaaagcatcctggtgtggaaagggagatggttgctctcatctcacgctgagtatgtggacactgggccaggtatttccggagaccctatgaagtagttacgttcccattttatacggggataactcacagatattatgtcaactaaacagatcccagattaagatggagtagggttttaaaaaataagaagggggctggagacataaaacccctgaaaggaggtcaggactgaagcatacaatcaggctcctccggccagagaaatggaccccaagcaaaagaagctgccaggccctctatgatgacaaagcacaactcaaaccgaagcctgactgctgccctgtctaatgaggcaggcaccagccactggtggctatttacgtttatcagaaattaaactacatcagaaattgttgctcagttgcaccaaccacattttaagggctcatagccacatagtagtggctaccatattaaacaacacagagaacattcccatcaacacagaaagttcttctagacagtgctgccttagaattctctaccttcagcttgtttaaaaaaaaaaaagaaagaaaaaagaaaaaacagcccactctacctttctgaaataggccggatgcttgagatggtcacttctggctccttctcctctaccctgtccataccccaggcagcatctgtatcccagcgggagccaaagctttcccctaaggaaaagggattgtccttgtacctagggagacagtagagtggctcagagaagcctgatgaggaacacagcagccaagtttacagctagaaaacagccttactttgggggtccagaggcgaaagtaccaacatcgtcaaacaagtccagctgcgagcgagaggattttgcactcactggggtttcctgctcaatcacctgcatctcagacagcacggagtgggagacagagctgcgcagcaaagcagagccaggcatgagaccaaaggataggcatcagcatcaccgcacaagagacaatgcccagcaactgggttctccttcacggagcgtcacccagagccttctgtccttacccaagcacagggctgggccagaccccaacagaaggctagctgtgtgtggtgacctgtgaagcacacctcagaattctttacacatcagctttgtttattccacgtaggagttccctggccagtgacggtttgcctgttataatttaattttatttatttatttgagacagattctcactctgtcgcccaggctggagtccagtggtgcaatcttggctcactgcaaccaccacctcccaggttcaagcgattcttgtgcctcagcctcccgagcagctgggactacagtgcacgtcaccacacccagctgattttttgtgttttttcagtagagacagggtttcgccacattgcccagcctggtctcaaactcctgagtacagacaatccacccgccttggcctccaaaagtgccaggattataggcgtgagccactgtgcctggctcgtgttgtaattttaatattgtgcaccagatgccagtggtctctgtcctgaacaactccctaccttgtgcactatgaaccccatccttcactgatggggttcacaaagcaaaggaatggatgaagaaatgccccagcaccagggaaatgaacataactgcatcaaagaatgagttcttcatcatcctactctttattaaaaaaaaaaaaagccaggcaccgtggctcacacctgtaattccagcactttgggaggccgaggcgggcagatcacgaggtcaggagatcgagaccatcctggctaacatggtgaaaccccgtctctactaaaaatacaaaaaaattagccgggcatggtggcaggtgcctgtagtcccagctacttgggaggctgaggcaggagaatgacgtgaacttggggggcggagcttgcagtgagccgagatcgcaccactgcactccagtctgggcaacagagcgaggctccgtctcagagagaaaaaaaaaagcacctcaaagcacaaagactggccttatgcactaagacctagaattgctgtctcgtttctcaaagaaaaggggtctagggttggcaggcaatacaatacaactcttgatgcctctcattcctctgtcaggctccacaaggacactttaaggactaatttgatttaaatcaattcattaaaaaatatctatagcttttagctagaagaaccccaaggagtgattattttgcaatagggctgagttgggccgggcatggtggctcacacctgtaatcccagcactttgggaggccgaggcagccggatcacctgaggtcgggagttcgagaccagcctgaccaagacggagaaaccctgtctctactaaaaatacaaaattagccaggtgtggaggctgaggcaagagaatagcttgaaccccggaggcggaggttgtggtgagctgagatcacaccattgcactccagcctaggcaacgagattgaaactctgtctcaaataaataaatagggtgagttgggtttaagtaaacaattgttgcactgctaaaaaactgttcatatgccttaaccccttggtcatcccttaacccagtcatctattaacccagtcattcctatgtgactgaagcagggaaaggagggagacccaatgtcctttcaagttaaaatgttatgctctggctggatgtggctcacgcccgtaatccaagcactgggcgccgtggctcacaccggtaatcccagtactgtgggaggccgaggcgggcagatcatttgaagctagtagttttacaccagcctgggcaacatggtgaaaccccatctctactaaaatacaaaaataagctgggcatggtggcacatgcctgtaatcacagcttctcaggaggctgaggcaggagaattgcttgaatctgggaggcggaggctgcagtgggctgagatcacaccactgaactccagcctgggtgacagagcaagactccatctcaaaaaaaaaaaaaaaaaaaagaaaagaaaagaaaaaagaaagccgggcaccgtggctcatgcctgtaatcccagcactttgggaggctgaggcaggtggatcacttgaggtcaagagttcgacatcagcctggccaacatggtgaaaccccatctctactaaaaatacaaaaaattagccagacacggtggtacacacctgtaatcccagctgcttgggaggctgagacaggagaatcacttgaacccaggaggtagagattgcagtgagccaagatcgtgccattgcactccagcctgggtgacagagtgagactttgtctcaaaaaataaaaataaaaagccatagcagccagacatggtggctcacatctgtaatcccagtactttgtgaagccaaggtacttaaacccaggaattcgagaccaggctggacaacatagcaaaaccctgtctctacaaaaagtaaaaaaattagctgggcatggtggctcccggctgtggtcccagctatttgggaggctgaagtggaaggatcacctgagcccaggaggcagaggttgcagtgagctgagatcacaccattacactccagcctaggcaacagagcaagaatctgtctcaaaagaaaaagaaagaaaaccacagcaaaccgagtggttctgaaacaggaaggattccacccaaactgagggcatttgaaatgtgggggatatgtgagggtattacagggagcacaaatggcatctctagacaggaattaaggatgatactaaatgcaccgcaattctcagggaggtctggaaaaataaactgtcccatgactcaaagtgccatcaagaaaaaccaccctagtctcttgaagatactgaaataacacctgatcctgtgttttgttcacatacctattcagtcattcaacttactgagcacatacctactatgcgccaagcactgtattagggactttagaacaataagccaagtgatctattcagacttggagaaacaataagcctagcatcccaaactgctaggaaggccccgcaatggttcccagaaaacaacggcatttccctgccacacccggagctgagcctcaccttcgggataccaagcccatgcccaacctttctgcctgctctcgcttcttcccttccagattctgtagcttcttttcctctttcttacgatcaatctggagctcctggtaggccagacgcatggaggcgacccttagggggaacaaaggtgtcagtggccaccacccatcctgacctgtccaacatacccacccaccaagccccgcagaagcctgaggccccggcagcaaacacttacatggactcctccgcctgcttcttggcatcggctgcctgctgctcacggagcttctctgccacctgagcctgccgctcaatctcactgaagctctggctgctcaccttctgggcccctaggcctttcttggcacccagctgggaacagaatcatgtaaggggccttcccaatcacactctcctcagatccctcccaggttcaggcactgtagccacacccacaaggaaaaggcccttcttaaaatttagggtaaaaaacaggagcccaaccagcatggccaagacaatagtgctccgctggagctgggcatgggcggctcacacagccccagcagagcccgggcctgaggacggcagttaatgctgacagggccaagtatgtgccaagcactccgccaagcactagatgtgctccatctcaccgactcctcccagcagcccttgaagacaggctttaaatccctttaaatctttaaatccctttcacaggcgaggttcggagaaacacagtacctttgccaaagtcatatagctggtaagtggtaaggtcaaggagtgaacccaggtagcctgcacccagctcctaacccctctaccataccacctctccccacctacccctttcttagctgctgctggcttcttcttgccaatgatggagcttttcagttctgcgtgagaaacgggtaggcatgagctaagacaaaggcagctcagaggcagtagctcagtatacaccatgcagcttcatggcaagagctcctaagaacagcttcaggcaagggaaggcaaagctgccaccaccagctccaaccagcggtgtcaaagccaaagacagacgtggctggggtatttactggcacccagcagagtgagacaggaacctagacctgaagcaccagagacgtccgaagcaccagagacgtccaaattccctgaaccaaaacaaagactgcgaggcagggagcatatggtgagcaccaggctccgcttctaaagcaggaagctgagaacaggggctgggctccccaagcagctgtcagttacctctggcaggaagggcccctttagctgacagatacacggactctggaggagaaacagacttgtggctaacaagaggcccaccccagagcctccacagagctcccaagcccagcggtctctatgaagccctgcttcagaccaagctatgccagccttctcatggatcagtctgacagtcactctgctgggttccagccccaacccccaagagtcaacagaacaaaccgaggtcagcaaatggactgttcgccctgaaccaagtctgaaagacactaaggaaaatgtaggaaagagttaaaggacaggctggggtactggctgagaaagaacaatgtcacctccagccttcggcagctcagagctgtccctccacccccggaaatgcaccagacaagccagccctgcctcagagcccagggataggtgtccagtctcatgctggcctccccaacactttggctagacccagccccacactcagaggcagaccccaggccttatacaccagcccacccagattcatcaattcaaagggcttggctctaaaatcagtgttgcatccactatttcaatcacagtccccactccagagaatcagatagatgctcagtctcctgtggcctctgtccacacggccaggcagtaggacctctgaaaagaacatttgaggtccaccctctcccagacaccccacgcctgcccgctggcatactgacccagtgaggctttgggtgaggtgccaagcaggtctgtgttggggccatgctccggctctgtggatgcaatggtaggagttagagatgagctcctagcttcctgcaacctccccttgaaagaagtgatgggacaagaatcggtggctttcctcagcttgccaccaaaagataaaaggaatatctaccacttcctccaaggattaaaatgaatcccggcccacccaaagatacaggaggacccctgctcctattgtcatggccagatgtccccttccaaaccctgagtcctctcctaggaccagggcacctggttggaatctgggctgaactcacgtgccaggccactgctctctgtagacggggctggctgctgggtccctgaaggctcagtggctggcgcatcccaggcagggggctgaaaaggaggccagatcacagatgcctcggtgagccactcctgctggcaagaagcaccaagacctacaagcaccttgtggacaagaaatcatactccaaacccatgaggaaagggactggagggtagcaaacaagatcacagttgctattcactgtggaagaaagcaggaagacaagcagcccccaccccaaccccttcactatttacttagagccagagcccattctcctaacttaaagacagttaactaccaccacctaggcaggcacagatctaaaggctcctcatatatgaatatatttaattatcactacaacccctatgaaggagctacatcgccattttagaaactgaggttttgacaggttgagtgacttggccaccatcacaggaatgcggagtagagaacaggaattgaagccaagagtctaacttcagcacccagggccagtaaagaggaaaccctcctcaaaggggtggggcggggaggagagaatcctttcactgtccccaagcacagtgcctttttttttttttt

SEQ ID NO: 455 - DNA, 70601 bp, Homo sapiens
tgagatcagatggtgggtttcaattttacataaaaattatggtaactggaaaccgggcggattaagtagtgtagatgaacagacaagatattgcatatgtgtagaggaaagataaatatttgtattaggtgccattcaaatatggtagtcttttcactacatagaactatgccttgaaagcaatagatactacactgtataacttaattattaacttaagctctgattaagcaaactcagtaaaactttcaattgtccctcagacttgaaatgtattactgcatcagggataaaggaaaagtcaaaattatctcttattttggtagatgaaattgaaaaagttgcagtgtgtgtgtacatggtgcatccccccaagatctatccataagaatggcttgctttttgcttatttatataaaacccactatgttaaaacaatgattttgtttaataatttacaaatttatcaatgatttatacatcttaattttcagtaatatgcagtatttgttgccaaatggtgtaatacaattatgaatgtctgaagataataaaaccaagatgagtagaaatttaagagttctttggggaggtctgtttcaggtataaaataatatgcaataatatgaaagtgattgggtctggaattataatttactaaagtaaacataatttataaatagctattaaaggaaaactaggatataattttttctctacaaaatctttccgttttgtggtaagtaaacagatacatactagattctgcttcagtacaagtttacaaaaggcagtctgaactatttgtgaattcattttaattttccctctctacaaccctttccaaaagttcctcaaatacactttacctctcaatcttacagcgtttcccctttcctattaaggtccttaccacatgtaattttgccaaagttgctttaaaataaaataagcactaaaaggagagagtatgtgacatttttagagtaatatctatagctatagcattaaacccatgtttctcacggagaaaacatctgtgcgtagatgctccagaataaaatgccctagaaacgaaacggactatattcagagtaaaattactgtcgtgtcccaaacttaaaaaaataaataaactgtcagcaactattaggcatacagcagttgtcacttggagcacacgaatgttctgaatgtgtttgtgagcatacgctattagtataaggctttctcagcaaaaaagaaaataggacgagcatgccaagagcggccaatctaatcaggatttgcagaaatcacaagtcggaatttgcagatccaagaattcttgtttccagagtaaatactctactccaaaaacaaacccaggcgttaccaaacagtccttccctgcgccccttctcgccaaagttatctggcgaatttcacgtttatatattctgagaggcacaaatatgcctaacacatttaaaaccctgatccagaattaacccgcaacaatcggccagggcgttcggaatagaagttcaagactccttttagaaattactcaagtatatgagagcgaacctgaaaaacaagacttttctctttgttacgctcccgctacgggtctggccgccgcgccccattctccgggattccggggccgcgggcgcgctccggggtccgggcgagtggacacaccccaccgctcgggccagccgcccgcccctcccgccggccggggaccgcgccctcacctgctcccgctcccgctcccgcatcctcggggccgcgcgccccgctcagcgacccgcctcccggggccccgccgcgcggccgccgcagccgcacccgcacgccagcccgggccgcggcgcgctcatggggctcgcacgcctcacttcctgtctccaaaaacccggctcgcagaccattcccctgggcagagtccggcggtggcgacggcgaggggcgaggcctggaggtgggaccggccggcgaggagcgccgcacaaagaagccccgtgggggcggggggtggcaggaggacggacagaccgtcggaccgacgcgggacgcgcggccggagcagcggggcggccgggcccaggcgtccctccccctgagccgggcgggcggatccggggaggcggcggcggcccgtgacctcagagagttggaatgcgggcagccgcgcgggggaggcgcggacagctgcgcccggccgccggggagggggcgcgccgctgctttttttaatcgtatgaccacttattttaagagtttccaaataaagcaaggcttttaataaaatgagtggagggggtattatttaggttccagataaagggttttattcctgtgttattaggtaggctgtaaaatgctgttattgatggttattcgtttactctggtatatttctgaacactattggaatacatttcttcttttcctgcttgctcctaaggttatgccccatataactagacacttccagtactgggtgggaaagcccccccaccaaaaatggttcatatgcctcaaataacctgtcagtccccaaaagggagctgtctgcttatgcaatatagagcagaactgttaaggatggagacttgacaaagttgtcaaatcccagctccaacatttactagctggatgaccttgtgcaagtttcttaacttctctttacctgtttcctctcctataaaagagggatattaatatctttgcacagcaggggtgggggaaataaatactaagcaatatccaataacttgtgtaaagtatatatgaagtgtttcgtttaaggtttattatacagtattcttgtactgcattattactgtattgcagcacttaagctgaggaataaaactgtgtgaccctaccactattacaatagtgtaagatcttttcttggcatgtggaacacagaaccttttaatttatgtaaattttaatttcagtgattttgttttaatgctgttgtttctggaaagctttttaaagtattgtttcatgtaaatctcattttcttaaacaattaacaaaaacttttgaatacttaactctgcatgagacgtggtccctgcacaacacggacttttggtttagtgggtgataaacgcacctgcacaccacacacgcagtacaaggccaaagtggggagcattgtcatagaggtatgagtgctatccaagagcaaagcccagcaaggtgcatcttgggtcgtttagctaaaggcaaataagattacctgtgtttctaagggaaaaaaaatagatcaattctgtttgtaattgatatttcaactgaactctatgagggggtcaatttgtgtgtgagcaaagaaaagagatctaaaaagaagtcactttgctggcttcccaaggtagaaaaactggaatcatgtgtgacttctcccattatcatctccagcctgtcatcaagacctggtatttcctcctttgaaatgtctcatgaattctttgtttcctttctgttccccctggaacattctaaatccaaaccctcatcattttacatccggattattgcaacaagggtggtctcctggcatctggtttctcagttctctcttatttccttgctaataccaggcttccttctcttatcactcttaatggactcccaaggttaagttcttctgcctgacctatagggactttccaaacgggcctctctgaccacctatatcgctttctgcccctgtcaagctttgcccctggccagcagcccctcctgccctctttccacttgtctaagccttctgcttctctgcaagtaagactctgcttccaggatgactttctagccacaccattccacagtgatctccacacttggcaagaactgtaaaagttgtttcatgacggcttcttttatatctcctaggattcctaggacagtactgggcaaagagtaggcactaaataaaaacttgttaattgaatcaggaagaaaataaaagaattttaaaaatagaaaatgaccataaaacccaagagatgttagacaactgagttgaacttcctccctcacagtccacagatgtcatttactgaccaagtacctaagccctattttccctcagctatgttaatttggcaggaacattcatgggaaggcacttgaataacaccttcaaaatattagacataaaattattagcttgtgttgcatatctaaggaagtgagataatttatatggtgccacccccaaagatacaaaagggtgtaagtaaaaagtccccttctcaccctgcctgctagacacccagctcttctcctgggaggtaaccagtgttccctcattcctctgtatccttacaaagatgttctgcagagttacaagaaactacatataagtatctttaccccctcttgttatccagaaggtggcatacttacacatacttttacactggaagttatttcttactaaaataaataaaatgtaaaaagaaagcccagcacataaaatgatgaaagacaaaaagatgaaagaaggctgggtgcagtagcttatgcctgtaattccagcactttgggaagcctaggagggcagatcagctgaggtcaggatttcgagatcagcctagccaacatgaagaaaccccgtctctactaaaaatacaaaaattagctgggcgtggtagagcatgcctgtagtcccagctactggggaggttgaggcatgagaatcgcttgagcccaggaggcacaggttgtggcgagccaagatcacgccactgcactccagactgtgtgacagagcaagactctgtctcaaaaaaaaaaaaaaaaaaggaaaggaaattgtggtttggtgggtgcactgactagtgttttcttagaagttcaaaagttaatctgttttgatagcatggtgaatacccaccgtataaattatcatcatctgcaaaaatccaaattgaatgaatgccctgccacgcaaagataatgattcctgtctgggcgcggtggctcacgcctgtaatcccagcactttgggaggccgaggcgggtggatcacgaggtcaggagttcggaaccagcctggccaatatggtgaaaccccgtctctactaaaaaaatacaaaaattacgcccggcacggtgactcacgcctgtaattccagcactttgagaggtcaaggtgggcagatcacaaggtcaggagattgagaccatgctggctaacacggtgaaaccccatctctactaaaaatataaaaaattagccaggcatggtggtgggcacctgtagtcccagctacttgggaggctgaggcaagagaatggcgtgaacccgggaggcggagcttgcagtgagccgagatcgcataactgcactccagcctgggcgacagagcgagactccgtctcaaaaaaaaaattagccgggcaggtggcacacgcctgtagtcccagctactcaggaggctgaggcaggagaatcgcttgaacccagtaggcggagattgcagtgagccgagatcgcaccactgcactccagcgtgggtgatagagtgagacgctgtctcaaaaaaaaaaaaaaaagatgatccctgaggaaggggacagtgagggctagaactagaaatgtgtggccaggcgcggtggctcacgcctgtaatcccagcactttgggaggccgaggcgggcggatcacgaggtcaggagttcgagaccagcctggccaacgtgatgaaaccctgtctctactaaaaatacaaaatttagccgggtgtggtggagggcgcctgtagtcccagctacttgggaggctgaggcaggagaatcgcttgaacccgggagatggaggttgcagtgtgccgagatcgcgccattgcactccagcctgggggacaagcgccagactccgtctcaaaaaaaaaaaaaaaaaaaaatagaaatgtgaagtcttcggtctctgaatctgcaccttaagttctgcctaccacactcaatactgtgtcacatgcaacaccttttcagttgcaaaagagcaaccattttatggatagattcccctggacatcagagaaatgattatcttggcagtgtgtttgttgaaatggagaagcatgtctgcctcagtagcaagtgactgctgtgactgtaattcccaacacttagggcttttgatccaagtatgtctatgccatgtgataatcactattggaaaacacttgtccattcagcccacatatatttagaagccaggtgctgcaaggagaaaggtaaatagatgcatacccctgtcctcaaagactcaccatgtgaacaacagatgaatatgtaattgtagtaggtgaggaaatttatacatggttatactttatagtctgaatggactggtaatgtctcgttaatcactgtgatcagcttctgcttgagtctggaaaagcagactcaaaaggctgacaaaaaaaggttgactgagtactcaaagaaaagcaaagctttgggcctggcacggtggctcacacccagcactttgggaggtcgaggtaggcggatcatgaggtcaagagagcaaggccatcctggccaacgtggtgaaaccctgtctttactaaaaatacaaaaattagctgggtgtggtggcacgcgcctgtagtcccagccactcgggaggctgaggcagaagaatcctttgaacccaggagatggaggttgcagtgagctgaaatcacgccactgcactccagcctggcgacagagtgagactccatctcaaaaaaaaaaaaaaaaaaagaaagaaaagcttttcaagcaggaagacacccccactcccaccccaccttcccccatcccctagtgcttctacacactcacacacgcacacacgtgcaaaggatgtgcaacatccagctgaaatacaacctgagaagagattgcagacgtggttggggggcaatgttagaagactcatggctccatggagatggggttggtactcagcccttctgacttcaaagccaatgctcttttcagtcatcttctctttttggaagacagcccagagccctcttagctggcactttgggtttgttgaaatctggtcttcacactgtcccctagaggaaaacatgttgtttcccctaaatcagagaacatttccaagctgggaaaaaaaaaaaaatactgtccagtatagtctttttcaagcctagcactcctactccctctaatggcttctcttagggcattatcatgaacatcttcttcgagatgtgatgtagtttgtgaagctgcagtttacagggaagtgcctggaactgcactggaacaccaaatgaaccattggtttagtgggtttgcccctcctgtgatcgagacatcataacatcttagatctaaatgtgggaggtctcaagcagcctttcagtctcttttccacagttgtcctaaaagttagctcatggtcctaaaagttaacgctttcttgaatatattttaataagtttccctactctgaatatgttttaatgaaaacattactttttattaaatgttattctcaatattatgttaatattgactgagaattgggtacccagtaatggtaaaacatgtttttgttcttagttctgaaatggctggtaaaggaataaaagtaattcatctgtcttttgtattgtgagtgtcatgaaagcagggagttggtcttgctcctctttgtgctctggctcctaccactgtatcccagtgcaggtacttaatttttaatcagcaagcatagtactgctataagccaggcacagttcaatatacttcacaaatattaacttatttcatccttatagtaaccctttgcaggtgaaactagtatacctatatcacagataaggaaactgaggcacagagatgagaagcaatttgccgaaggtctcagagggagtggcagagccaggattcagacccagacggtctggctgcagtgcccttgttctgtgtcattctgctctgctgcctgtcatcaatgctgaatgagtgtatgatcactggatttatccttgaggaatgcttttgtaaattaggtctttaatttcttttaccctattaatatttaatgagtgcttactatgtgtccagcatcctgaaaggttggagaaatataaagccctacagagagtttataattttgttagggaagacacacacacacacacgaaataacattgcacagaatatattattatactaatagcttccatatagatgccataggaattcacaagaaaggattatatgagattattaaaggaccacgtgacagaccctaggtagccccacaactcctgcttctgctgtccccacaacccactcctgacccctagtgtggattgcttaggtaataaacatggcaaaaataagaggtttggcagatgtaattgaggtcgtgaatcagctgattttggggtcaggtcctgggtgggcctaacttaattaaatgaaagcccttggctggtctcaaacttctggtctcaagtgatcctcccacctctacttcactgagctgaaattacaggcatgagccactgtgcctggcttttactggcgtaagtgaacagacatgttagtgaaccctttggcaaagaactgtgggcagcctctaggacttgagagtggcttccagatgatagccagaaaaaaatctgggtccttactcataaagccacaaggaaatgaattatttttttttttcctgagacagggtctcactctctcatcaaggctgtagtggcatgatcttggctcactgcaacctctgcctcccaggctcaagcaatcctcccctctcggcttcccaactagctgagactagaagtgcatgccaccacgcccagctaattttttgtacttttgaagagacatgtttttgccatgttgcccaggctggtcacgaactcctggtctcaagtgatccgccagcctaagcctcccaaactgctgggattacaggcatgagccaccgcactcagccagaaatgaattcttgctaacaacctgaatgagcctgaacatagattcctcctcagtcaagcctccagatgagaatacagcctgcctgacacgattgtagccttgtgagaccctgagcagaggacccagtgaggttgacccacggaaaccatgagatgataaacgtttgtgttttaagctgctaaatttgtggtcatctgttatgcagcaatggataacagagaccactctcaggaattagtggatatgagggagaaaggagacctctctgtgcttcctctgtttcccaggttttgtgatcagggatagggagaattcggctattgatacaaataggggaatcaacagtagtaacctattgagtggaggaaggggagatgaaggcgacttctgtctaagcgctgagttgggagaaaataagagtagttacttagaatttgggagtggggtttgtgtgagaattcaaggctgatggaaaattcggtcattatcagcacagagttgacaacttaagtcctaagaacaaaagtgttgtcccacggagggtgttcagagaagcaggaggatgggattcgtctcggggagaggccacgggtggccctggaagaaggaaggcagaaccaaacccaggagggccagtgtactgcagagtcaaagagttgacggattggctctgttgctctggatagtccattttcccttcaagggtaattgcagtgcaacctctaatgggcagactccattttacaggtaagaaaagttgaaatacctggaccgataccatactgacagtaagtgagggctggatttgaactcgcgtctcatatcacagcccaagatctttctgctacacatttaattcattcttaccatccaagagagaataaaatgaataagcggagggccagcagagagactaacgaaaggtccccgaggtgcccgggaggcggagctgcaagaccacccgcacgcgcacgccgccgccctccttgcctgagcacaggtttcgcgggtagaaggcgtgcgcaggcgcggacacgggcgcatgcgcgttcactccggcgcgcagtgccggccggggcggggatacgccgtgtgcgcggccgggggcggaacggaggaggaggcggtggtgtcccggctgcggggtaggagtccgcggcagcctccgggtaagccaagcgccgcgcagtgctgagttcccgcacgccgcagagccatggagatcggcaccgagatcagccgcaagatccgggtgaggcccgtgccggtcgggggtgggaagccaggtctcggcgagcgggcggttgtcaggagtaacggggactgtgggcccgggtggacgccgcggcctggcctccgctggacgctcctggcgggctgcggctcctcctcgtccaggccgcctcggccctggggacatttgcggcctcggagcgtggctgcggctgaagtagccgccgggaaatggaaggacaggcgcaggcccggctggagccaccaccgcggcgcacggcgccgctttggatccgctgcgggaggtgggcgccgcggggctggggctggagctggagtggggtgcggggtggggggcggtgcaggcgaggctcctcccagcccccgcccgggggatccgaggtgcgcgcaccagcaaagtggcctcagccgctgcagagtccggtcttgttttcctagagccgcctttctcacatgcacgtttgctctttttctctcagagtgccattaaggggaaattacaagaattaggagcttatgttggtaagtgtttttttggttgttagtcttacagaatttagagtttgcagctaatagaattttagtgaatgcgtatttctcaccgtactttggacattgggagagactcccttctaccttcttcaaatcttatactccctggttacttctttatcatctttttgcaaccttgttttttttctcccaaacctccttctgttatggtgttttgaaatttagtttcctccgttaaggctctgtttgaccgaattttattttatgtttttcctattctctctctctctcattttaaattctagggacgggtctcgctacgttgcccaggctggtcttaactcctgggctcaagcaattatctgaccttagcctccctaggtgctgggagtgcggggattactggtgtgagccaccatgcctgtttaaagtttcctattcttgttactttcctcttgacatttgtttttagaactctgatgttggatgtgaatgtttgatgctttctggcatttgcttctgtaatggttcagtgagttttattttccgatctctttatgttttccctctctctctgaaacagtaaggctttttccgtctctttattcttttataatttgagtgtttactctgggtcaggtactgtgcttaactattgtatatgtattaactcaggataatccctacgagaatcctggaaggtaagtggcagtatctttgactgtgtaaacaaggaaactgaggctttgcctacttgagcaaggttttatggtttgcccccaaagctggtgcctcctataaaaataatagctaccactaatgacagtggttctcaaagtgtgggagactccaagggcctctgaagtcaaaactgttttcatattaatactaagatggtatttgttatttttcactgtggtggtggtgtttggattgtgtaaaactaatggttgataaaacttgtcagcatagtaacaccataatgaaatcatattcaaatcactccccccttgtagtttttttctttttgagccaattacacttaaaatgtcattgatgaagatgtgaagtccagggtttacaaaatattttttatcttcttagtattcagtgcgaggaaatagaaatgctcataaaacatttttattgtatactgaaatacgattgttctgaggaaaatcattttagttgagaactaagctagccacctctttcagggaacatcatttttaacttcaaagtactgacaaactggttacatacactaggatatttggcagatatttacttgaaagtgagcaaagaaaagaatccatagtctttgttgccaatcacatgtgagctttcaaatgaaaattagaattttggaaaatctgagcctgcctccatgaatttcacagcttcccagtacttaaaaaatttctgattaaataaatggtgatttaaaaaaaatttgttattattattattttttttgagatggaatttcactcgttgcccaggctggagtgcagtggcgtgatcttggctcactgcaagctctgcctcccgggttcaagcgattcttttgcctcagcctcccgagtagctgggattacaggcatctgccactacacccagctaattttttgtatttttagtagagacagggtttcaccatgttggccaggctggtctcaaactcctgaccttgtgattcgcgtgcctcagcctcccaaagtgctgggattacaggtgtcagccactgcatccggccaactcaatggcgatattaaaaaataattattttatactgcataatgaaatatatcaacgtgtcagtggtttttgtagctaagtgaaccaatcttttctaaataaccaatgcataatattacaaaattatgcagtggattaaagatttatttaaactctggggtgggtcagtggatttttgtgcaacagttcaaaaaggtcattgacgtatttgacattccacgttgctttaacatttaataagctaccacttgtttagttttggtgtagtgtcacagaagaatatccaccttatctgaaaagactatcagaatactcctttttcaactgcatatctgtgagaccagattttttcatattcttcagtcataagcacatagaacaagatatataaaaatatgaaacaaggccagtctttgcagtaaatttttctttttcttttttttgagatggggtctcactctgtggttcgggctggagtgcagtggtgcaatcttggctcactgcaacctccgcctcccaggttcaagcaattctcctgcctcagcttcccgagtagctgggattacaggcacctgccaccaccccgccccccccccccggctaatttttgtgtttttagtggagacggtgtttcaccatgttggccaggctgatctcgaactcctgaccttaggtgatccacttgtctcagcctcccagagtgctgggattacaggtgtgagccactgtgccttgcctaaatttttttttggaaaatttaataatgttacttgtgttaatataattggatttgtgattaacatgtgatggatttattttttaatgaattaataaatactttttaattaaaaatgatcagttctaattttgaacaccataaataatagaacctgcataaaccaaagaaggggcccaagaccaaacagtttgagaattggtaatttatggagtacttaccaccatttgctgggcactttcataaacgatttgttgtcaggattgttggaagactaacagatgagagaattgaggctcagagaaaataaagctgaaccaagatttatttattcttttattctttcaacacttgaactgcattttttatagttttctttgaaacaaaaaaagtacttctgaaatgaacctttctgcctgcatagaaatattacaagtatttaaggtattaaagaaatttgtcacagcatggtggttcacgcctgtaatcacagcactttgggaggccgaggtgggtggatcacttgaggtcaggagttcgagaccagcctagtcaacatgctgaaacctggtgtctactaaaaatacaaacattagctgggtgtggtggcaggtgcctgtaatcccagctactcgggaggctgaggcaggagaatcgcttgaacccaggaagcagagcttgcagtgagccgagattgtgccactacactccaacctgggagacagagcaagactctgtcgtaaaagaaaaaaaaaaaaaagagaactggaatggagttttgagggtcagagattagagttcctgataacagcttttgcttccttatcttcttagtgaggtttttgtttttttgttcttttaaatcctagacctcactctcataatcactgtaggattaccactaggagggtgttttttggcttcttttatttattttatttatttatttttttttgagacagagtcttgctctgttgcccaggctggagtgcagtggcaggatctgagcgcactgcaagctccgcctcctgggttcacaccattctcctgcctcggcctcccgagtagctgagactataggcgctcaccaccacacccggctaattttttgtatttttagtagagacagggtttcactgtgttagccaggatggtctcaatctcctaaccttgtgatctgcccaccttggcctcccaaagtgctgggattacaggcatgagccaccgcgcctggccttttttcttttttttttttttttatcctagacctcacccttataatcattgtaggattaccactgtgagggtaaaaccgtgcattgagttgacattatttaatgttaaaattgatttttttaaatgatgtggagcttttgggtctatttgtttattcgatgttgctacaagtttgttactgtgagtaattgaaacctgcctttagcaagggtaaagatgttcacttgagaaatgagtgttattttgaaactttgcaaattaaaactaaacaaaactcaattctttttcttggggaatgttcaaatatttcccataagcttctttgaaattaataagcattattaaaaagattcaaggaagtgaatgcatgctcaagtttgaccctataattcagaatgtttagttttgtaagtatcaattattcttaatttccattcttctagtatttgaaatacctgtggaatgaagagaaaaaaattaaagctaagccatcttgtccaatgtaattccagtagagctctgcgactctaaagcttagagctacatctatattttcaagcacatcaactttaagaagaaagttttgaggaaacaaagttttgatctacctttccttttaaatagatgaagaacttcctgattacattatggtgatggtggccaacaagaaaagtcaggaccaaatgacagaggatctgtccctgtttctagggaacaacacaattcgattcaccgtatggtatgtttctgaatttttgtgcctcagaccaaagtttggcacaagcctgagttgatattctgtccaaagagaggttcttgacacttgagttaggtttactttggagaggcagtttgtgagtgatgagagcacagcctctgtattagtccattttcacagtgctatgaagaaatacccgagactgggtaatttctaaaagaaagaggtttaattgactcagagttccacatggctggggaggccccaggaaggggaagcaagcaccttcttcacaagtcgacaggaaagagaagagtgaaggaggaacttccagagacttatataaaatcatcagatcttgtgagaactcactgtctcttgagaactcgggaactcactgtctcttgagaactcactatcatgagaacatcatgggggaaaccacccccatgacccagtcacctccctcccttgacaggtggggattacaattcaatataagatttgggtggggacacagagccaaaccttatcagcctctgaagccagacagccaaagttgaatcctggctgtgtcttgccttggtttctctagctataaaatggaaatagtacagccacttgctttataaaattattattgaggatcaaatgggctaatatgtgtaaagtacttataggtgtccctagcattttcctaaggaattcttagtatatgtcggctatacttaatatgtttcttttgtaaacttctatatctttttttttgagacagggtcttgctctgtcaccaggctggagcacagtggtacaatcatggctcgctgcagcctcgatctcctggtttcaagtgatcatcccattgcagtcccctccttcctgaactcccatgcctgactaatttttaaattttttgttcagacagggtcttagtatgttgccctggatgctcttgaactcctgggctcaagcagtcctcctgccttggccttcagaagtcttggggttataggtatgagccactgcacctggccagcttctgtatcttatagttccttttcccccaccaaaaccagttacagatgtttttttgaactgggttggcttcttacattgccttttacaatgagttacctttagagggcaaggttttctgtttctcacttttctgtttcttactttttaagctttttgttaaactcacaccttcattttgagtaataattgtagtgtaatgttacagcatattttgagattataagtttttttaagtttggaattttaaaataggcaactttgcttttatacataaattactgttatatgcctttagttgagaatactgactagaagagtaagattcaacttaagatgctaggtcctggtaccaggtttgaggtaaagtgaggatgagggctggaggataatgatgtagctgagaatagacagacgaaatactttattaggcttctcaggctaggaactaccagttaccgtgaaaggtgatgatgtagcagaagtgagcaagtggcctgccgaatttgagtgcaagaggaggcactgagtggggagatgagcctggttaagttcttgcctttataccaaaggtcgtcttcaaggtgtttttgcccaagtaggcaactgtatgcttatcaaccgtcttgaaattctgcacagaattctctgggtttatacattgcacaaatttgaagaacattgtatagtggtcatcagttgttatgatacactgctgcctcactgtgggtgacccaacccatttgttacaatttgtccccagaggttattccctcccagccccccacaaaaaaagactgtgggtcttttgactgggaaaattaccattattgtgagtactatttttttttctaaagcgaccgagtagatccttttctccgataacttgatagaatacttagatttttaaaacagactaccaaatgaatttaaaaccaaattaattcaacattctcatctggccataaattgagttctttaacatgtagtgaagcaaagggtgatgtccccattttggcactttgctttcttaagttagtgttcattaacaccagccccaaacagactattgtgattatttggagccttgaagtaattgtgtccgtggggacagtagcatgtgactagggttctcattgaaacatgaggtttctggcatattttgagaggtactgggaagggatgtaaggcaaagtacctcatttataactaccaaaacaggttatgttacaagcaagattacagccttacagcatcagttttgaaagtaatagagtgaaatgatatagcatagtttgagattataacttgttttaacctctcagaattaagttgtccaagacaccatctagtttaagcagttaatataagctgcttaaatggtggtaataataagcaatattacatgtttatgatacttgttttactgtaagctacagtaaatctttagtacttacaaacagggtgacatattttgtagactaagactggtcagatgatattctttcccatatttttgcagaggctagatgttgaaaacagtgaagaaaaaaatacaattttttattgacttctgtaggatttatacaaagcccttttttaaaaatgtgaagtttgaaagttcataccatttattcactaaatacagtttatcagtatttatctcagctaggtgcggtggctcacgcccgtaatctcaacactttgggaggctgaggcaggtggttctctcaagtccaggacttcaagaccagcctggacaacacagtgaaaccccatctctatttaaaaataataaaaatataaaaaaatttaaaaaattatctctgaatataatgtcataaatttagagtgacagttgaaatgaaatctttcttaacagaaggtttatttttgttttttgtttttttcctcaggcttcatggtgtattagataaacttcgctctgttacaactggtaagattcataacttttttttttaatttctgcttgctatggcatatgatttgtttctttctaaagtcatagtgctttgggaaaaacccatcaatttcaaaacggttcatttgaacttttttagaaagcacatacttttatgaacttaagagcagtaaatttaacataattcaaagataatttaagtgtgggagagggagcagtgcactttatccgaaggaaataattacatatatgtgcaaagatttagcctcaaggatatttcagtattttataattgaaaacaatttaaaagttcagtcataataaacgaaattgttgtattaccatgtgtggaataatatttaactattaaaaataatgttgtggaagaataacagaatatacacgcataagatacatgttttaaaaaatgtgtatatatgctcttcccccgaaaaatcacctttgagataattggtgatttttattatatttttaaaattttctacaataaacatactgcttttgaattggtgatgaggaaggaaacgacttaaagtaataaaaatagatggccgggcacggtggctcacgcctgtaatcccagcattttgggaggccaaggtgggcggatcatgggctcaggagatggagaccatcttggccaaccaacatggtgaatctccgtctctactaaaaatacaaaaattagccaggcatcgtggcacatgcctgtaatcccagctacttgggaggccggggcaggagaatcgcttgaaccagggatttggaggttgcagggagccgagaacgcgccactgccctccagcctggcgacagagcgagactccatctcaaaaataaataaataaataaaaataagaaataaaaatagattaaaaggactgtatttttcttttcagaaccctctagtctgaagtcttctgataccaacatctttgatagtaacgtgccttcaaacaagagcaatttcagtcggggagatgagaggaggcatgaagctgcagtgccaccacttgccattcctagcgcgagacctgaaaaaagagattccagagtttctacaagttcgcaggagtcaaaaaccacaaatgtcaggtaagagtctggtgtagacctgctgggggcagatggctctgtgtatgtgacatttatattagtttttatatctttcagtttgctgttctcagcaatttttagaaacaatgaagtgatcgtgagtagttttttgaataaaataatggataagatctaagtatgattatcttttatcacaaatttagtaaatcaaagttgaaagaaagtgcaatttcaaagcagttttgaatggaatatgtaaagggagtatcctcagttttttcattgaaatttttcaagtaaacattctttaaagatttggtgataattgccctaatttggctgtaatacattttgttgttcttttaaatagacagacttacgatgatggagctgcaacccgactaatgtcaacagtgaaacctttgagggagccagcaccctctgaagatgtgattgatattaagccagaaccagatgatctcattgacgaagacctcaactttgtgcaggagaatcccttatctcagaaaaaacctacagtgacacttacatatggttcttctcgcccttctattgaaatttatcgaccacctgcaagtagaaatgcagatagtggtgttcatttaaacaggttgcaatttcaacagcagcagaatagtattcatgctgccaagcagcttgatatgcagagtagttgggtatatgaaacaggacgtttgtgtgaaccagaggtgcttaacagcttagaagaaacgtatagtccgttctttagaaacaactcggagaaaatgagtatggaggtttgtatgtacttttaaattctggcttaggctaaaaatcggcagttcttgataccaaataatatatgaagtaactaaacacatattccaaggctgggcacagtggctcacacctgtaatcccaggactttgggaggccgaggcgggtggatcacgaggtcaggagattgagaccatcctggctaacacggtgaaaccccgtctctactaaaaatacaaaaaattagccaggcatggtggcaggcgcctgtagtcccagctactcgggaggctgaggcaggagaatggcgtgaacctgggaggcggagcttgcactgagccaagatcgtgccactgcactccagcctgggcaacagagcgagactccgtctcaaccaaaaaagaaaaaacaaaaaacaaaaaaaacacatattccaaatttattttattttattttactttttgagaaggagtttcactcttgttgcccaggctggagtgtgatggcgcgatctcaactcactgcaacctccacctcctgggttcaagcgattctcctgcttcagcctcccgagtagctggtattacccgccaccatgcctggctaattttttgtatttttagcaaagacagggtttcaccgtgttggccaggctggtcttgaaatcctggccctgtgatccacccaccttgatcttggctcactgcaacctgtgcttcccaggttcaagtgattcttctgattcagcctcctgaatagctgggattacaggtgtgtactaccacgaccagctaatttttgtatttttagtagagatggtgtttcaccatgttggaccaggctggtcttgaactcctgacctcaggtgatctgccctccttggcctcccaaagtgttgggattacaggcatgtaccatggcgcctggccccaagtttatttttaaattgttttatctgctgtttctcatgctataccagattttcttccccatggcttgctcctagagttcttttgtatcacatctgtatacctttttgggatttccagcatttgagatattaatcttaaattaatttggggggtttcaatcaattttagattgttcatggtaattgctagtgagcaaccaattaactctgttttattagtttcctcaatagcactatatgcagctgttgataaaataaatgtaaagttctaatttttgttttagctaaaggttgactgttagggataatatttatatttatagtatttatttatttatttattttgatacggtgtctcactctgtcgcccaggctggagtgcagtggcatgatcttggctccctacatcctccacctcccgggttcaagtgagtcttctgcctcagcctcccgagtagctcggactacaggcacatgccgccacgctcagctaatttttgtatttttatagagacagggtttcaccatattggccaggctggtctcgaaatcctgaccttgtgatccgcccacttcggccttccaaagtgctaggattacagatgtgagccaccacacccagcctcatatttatatttttacataaaaccaagaaatactctgtgaatttctcatattactgtgtactgtttttttcttaaaatggaaacattttgtggtagaactcttgttattttctgagattaggtaagcataaattttatctgattgcaggatgaaaactttcggaagagaaagttgcctgtggtaagttcagttgttaaagtaaaaaaattcaatcatgatggagaagaggaggaagaagatgatgattacgggtctcgaacaggaagcatctccagcagtgtgtctgtgcctgcaaagcctgaaaggaggtaccttgaacatggctgtaaattaatctttaactgccttggtggagtcttcctgatttattgaagagaataatcacgaaaataatttttgtttgttttttgagacggagtctcgctctgtcaaccaggctggagtgcagtgccacgatctcggctcactgcaacctctgcctcccaggttcaagtgattctcctgattgagcctcctgaatagctgggattataggtgtgcactaccatgaccagctaatttttgtatttttagtagagatggtgtttcaccatgttggaccaggctggtctcgaactcctgacctcaggtgatctgccctcctcagcttcccaaagtgttgggattacaggcatgagccaccgcacctgacataaatatttaatgtaataccgtgtaagacttttccattgggttttgagaaacacgttaatgagagaaattgcttaacattggagaggattgcagagaatattgactaatatggtggggtgaggaggaacaacatcaattaagattcagatttattatttaaaaaaactaaaaggggcctaggcatggtggctcatgcctgtacctagcactttgggaggctgaggcaggaggattgcttgagaccaggagttcgagaccagcctgggcgatgtaatgagtctttgtctcttaaaaaaaattaaaataaattagttggtcattgtggcaggcacctgtagtcctggactggagaggtggatgtggaagcattgcttgagcctagaagtttaaggctgcagtgacatcacactccatcctgggtgagagagtaagagtctgtctaaaaaaaaaaataaggttccagtgtagttggcattttctaaaaactgcagctagtctgtttaaaacctagagaaggttgtggtaaaggcataatagatggctggcctgtgaggaactgaaatttaaagtttaataaaaatacctttcttaactcttttagaccttctcttccaccttctaaacaagctaacaagaatctgattttgaaggctatatctgaagctcaagaatccgtaacaaaaacaactaactactctacaggtaatttaaatgtattatgtttacacttggtaagacatttctgtaattcttgagtaaggtgaaaatgattgctccttaaattgtaaaataaaggtgcctgtcagatgtcaagaccaagatgaggttcccatatagaaaaatggctttaaaaggaaattgacaagtttgagaaacttcgccaactgttattggactgtagtttttcaagcaccatataatgccttttatatctttccaatgtgtgtaaaatatatagtacgtaaatattttgaagagaattttgatgaagtaggactttcatattagtagcattagattcaacattagatatgaatttacgatgtgtaaaggggagtacaattggacaatgataggtatctgaagttatagaaatttgttaaacagtagtatataaacaaggttggtttcttcccttttggcggaactcattagtagaatataaggcagagaattgactcatttgtgatgttcctgctccaattctagtggaagtactgaataattttatgagagaatataaaagtattacgttttcaaaacaggagatgaatcagctgtaagctggtcttacggaaagctgattctgaaatgcaaacaactgatgggtgtcattttgtgttgtcaaattctgtactctctggccgacctgttgtagccaatgtgtaaacttgtgttaagaagctgatggtaatgagctactctaaaaagatttaagttttgctgtggatttggtgggtgtacttacagcattgccctgcttatccactctctcgcttttttttgtgaccccccttcctaaaatgaggtaaactgtagccatcagtttttttatttgttttctttttttgaggcgaagtcttgctctgttgcccaggctggagtgcagtggtgtgatcttggcttactgcaatctctgcctcctgggtccaagcgattctcctgcctcagcctcccaagtagctgggattacaggcgcccactaccatgccaggctaatttttttgtatttttagtagaggcggggttccaccatgttggccaggctggtctcgtactcctgacctcaggtgatcacctgcctcctcggcctcccaaaatgctgggattacaagcgtgagccaccgcgcctggcaccatcagtttttgatcctgatacttgtctgtcctcttggttctcctcatccctaatttaaccttgaacacaaaattcaacaggttttggcatatagaataaagattatcaggcaaaggcgcactcttgacctaatgatatatctacatttcatttcctgatctatcagcaatattaattgtctagaatgatgagaagtttagagaagttccatgactttgaaattttctttctttacctaggttatctaaattacaatttgaaactcatataagatcatgaagctaagcttaaataaaccgcattttgttgaaaatgaatacatatgtactatattgtattcatggtatgtggttgtatggatattgtttacatatgtttggataaataggttcaggtatctatctcagtaacgtaagaaaaaatgaatggtatctatggattgaactcctcatatatatgttcttttcttttctttttcttttttttttggagacagagtctcactctgttgcccaggctggagtgcacagtggtgcaatctcggctcactgcaacctccgccttccgggtttaagcaattctcctgcctcagcctcctgagtagttgggattacaggtgtgtgccactatgcccggctagtgtttgtatttttagtagaaacgaggttttaccatgttggccaggctggtctcaaactcctgacctcaagtgatccacccaccttgcctcccaaagtgctgagattacaggcatgagccactgcgcccagcctgaactcatatgtcctaaaccaaaggaggcatttatatttaatatgacatagtcactgtggagttttgacgtattactgcatttgtatttctatcttttttgcttttatgtgaaagttccacagaaacagacacttccagttgctcccagaactcgaacttctcaagaagaattgctagcagaagtggtccagggacaaagtaggacccccagaataagtccccccattaaagaagaggaaacaaaaggagattctgtagaaaaaaatcaaggtaataacttaaatgatgtttcactctttactacagttttttcatgaggcattgaatattttccaatggatttttatgaaatattacactatgaaaaaagtgatgattaagcccagaaatagaatgagaagaataccatgaggaaggttcataccaacacttcagaaaaaaattttttttttaaagaggtagggtcttgctgtgttgcccaggcagtcctcaaactcctgggctcaagcagtcctcctgcctcagcatccttagtagctggaggtgtgtacaagtgtgtgccactgcacccagccctttctagaaatttttgaaagtctttttattgtggaaatttttaatattctcaaaaatggaaaggctagtacagtgaactctcatgaacccagtcattaagccttagttattatcagaattttgctggtctttagatagctccttcttaaagatatatttatttctgcattctttctttttctctttttgttgatcctgcccgtttacctgaacttgaaattttagttacctttaaatctcccgtctcttaagcatcctgtctctgacctcccatatgtgtcccagcaaccctaatttatcccctcgtgcctaacatacttcagtttgcttccaggttttttttttttttttttttttttgcttttttctcagctttctcccccaattcctatacaatcttttgactttgaaagtgtgtctctcatcttctgactcctttgtgaaagtatctctcccctcctcctcattacccagaactaacgctattagtttggacttttggtgtctgttatctgacccctgggcctgcacagcccttctccatgactcttcagaccttttgtctcttttgtcgtcaagaaggattcttttttcttctgtttctttttctactaagatttgaattttaagaccccaccaaaaaaatctatatgcttattatgttatttctcacatacttttcaagaaccttggaatatattttttcatttcttcaaaactgtcctttaaattgttccaggtttcatgaaaccttatgatttcagaattgtcaattctgtatttgtttcctcattgtgtctctttaaaaatttttgactgtattgttcagtttgccatgacagcgttatatactattctgataattgataggcctgaggacaagacctgtttggtccccaaacagcagataggtaccaattggaaaatgtgaatgggccaaattgagaagaggagctgaaactgaggagggattttgctcagtgcagtggcagatgaggctgatctaaaaggactgcagtggtctactccctgtggagtctgtagtgtgttgcaccaaggttttcttcaaacacaggactctacgtgagagtcttggagtggaatcagatggagcagggaaacagacaatagagaaaaggaaagaatgtcagataaaaataggagaggaaaacaataggaaatctcaaagcaaggtgccatattttttaacatcacaaaatcaacagaagaaggttgttgattctgaagttagaatagctatccaaagcaaactttcccctaaaatgaacaacagaaaagtatcaaggtcaagtcctgtgccgaattaaaagataaaagggaataaaagacaaaacagcattgtttcaatgaaagcatgctgaaaggtataccaaaaagaaatacaatttcaaagtgagctagaagacattatttaaataatacaagacaaagccaagaaaaacataaaacagaagaactttgaggctgggtgcagtggctcatgcctgtaatcccaacactttgggaggctgaggcaggaggatcacttgagactagcctgggcagcatagcaaaaccctgtctcgacaaaaaataaaaatattagctgggcaaggtatacacctgtagtcctgtctccttgggaggctgaagtgggaggattgctggagcccgggaggctgaggtgggaggattgctggagcccaggaggctgaggttgcagtgagccacgatcataccattgccctccagggaggctgaggtgggaggattgctggagcccaggaggctgaggttgcagtgagccatgatcatgccattgccatctagtttgggcgatagagtgagactgtgtctcaaaataaatgaagactaaattagaaagaactcgaaagaattagtgcgtcttaataaaataaaacatgcgtgtaatcccagcaatttgggaggccaaggcgggaggatcacttgaggccaggagttgaagatcagccagggcaacatagcaaaaccttatggctacagaaaacagcaatttaaaaataaataaaattaaaacatcttcagagaaattgaagataaaagacaagaacattttaaaagtctaaaagggctcatgagaaagtggcaaatattgataataggcaatagaaatacagtgtttttatagtaggaatctccaaagaaacaatattcagaggaacagagcaaacattaactgtctttcaagaaaactttcatgaagtgaaaacatgtttgaaactgttgtctgaaaaattgtacagtatacctgagaatatttacccagaaccataacactaagatgtattatataattaatgaaattttaaaaagaaaaaaaatgatttggacattcaggcaaaaggggcacatgacttagaagaaaaggaaaggtagattatcatcaaacttttcaacagcatcacttttgtgctggaagaaaatggactagcatatttaagatactccagaaaagaaaatgtgagccaagaatttaatgtccagcaaaagtgacctttagaagtgatccagcaccaactgttatctatatgcagaaattcagagactcattcccatgaacttttcttaggaaatctaatggaggatgagcttcagacaagtaaaagcctgttgtcctgaatttacattggaaatgtttcggaactcacagtgtattttatatataaatacatttttttctagttctgtctactagaaggcatagaaacattcatcaacccttagcatcatctgtagttcccagattgtggtcttggaatacttcctatttaaaaaactaggcttcttgggctgggtgcagttgctcacgcctgtaatcccagcactttgggaagccgaggtgggcagatcacctgaggtcaggagttcaaaagcagcctggccagtgtggtgaaaccccatctctactaaaaatacaaaaaaattagctgggtgttgtggtgtgcgcctgtagtcctagctactcgggaggctgagccaggagaatcgcttggatccgggaggcggaggttgcagtgagccaagattgtgccaccgtactccagcctgggcaacagagtgagattccgtctcaagaaaaaataaaaataaaaaaacaaagaactaggcttcttgagaaatgtctttttccaggtctggggcaggaaatgttaacatgatcctggaatggctcaacatcccagatagcaaagaagctgtcaatgaatggtagaccacgtccaaaggatgcaggcgccaacttagaggtttccattggccaaaaatggaattatttgagattcagtaggtgtaaatatcgcggtgaattaaagcccatttaaatccacaatttcataatgacattttaaaaaaataagctctaactagtcaccttctggaaggtagtagataatcattcattgtcttgaaaactgggtaaataaaataattgaacatttatgctgtcttttctgtgagaacgataccactgggtaaccccataggacaggagttggcatctgttggaaccaaaccgtgcctattcatgtatgtattgtccgtggctactttcatactacagccttagttgaatagttgcaacagaccatatagcttgcatagcctaaaatagcctaaaagatttgccaacctctgatatagtagatgagagaaacattttcttttaaaatgatttcagctgataagagaacaagatggtaggattagagttatgcttttaagagtgaaaaccagttgttttgtgcctcttgatacaaaagaacagaacttttgtcttgccaaaaatgtaaacctaagtcatcaagctcccagtccagcagtcagtttgcaagaagttgcagaggccagaggagtatgttggttgagcttcaccatgagtgtgcagccggaaaaatagtgtttgggacactgtgggttgaatagcctgagaaattgagattaaaaggcaaatcaaaggaaaataaaaggagcaggattaaattgtagtggctagggatacccagtgtgtgtgaaattataaagaacctctaggcgttaatataaaaagcacatagtggttgcttttgaagaggaccgataaagatggagcacacagagaggcttctggggtggcagatgacgttctctcttttgacttggatggtagtcagaagggtgttttgccttacaaaaattcattaagctatatgtttgtgtggttttctatactgtgttttaaaaggggataattgaaatggtgtcaggtacctttgctgatgaggagtttggtattactagatatattcacaagtgtgaagtgatactgcaagcaactgttatctgttaatgtggttactcactgttgtacggtataatctggggcaggtttttaaaatataaacatgcactcgtattggcataagttgttaattttttttcttcttttgtttgagcagatagcattctctcatttctctggtgtctttatttttactagcgcacccacctcataatatgtgtactttttgctttttgtcttgccatcagtctgtcactagaagtttattttgccgatcttttcaaagacttaacaacattattctggctttattgatttttttttttttttggtgtttttgttttctatttcattgacttgtgctttttttttattttttttttttaagaggcgaggtctcactgtcacctaggctagagtacagtggcacaattgtagctcactgcaacctcaaatgcctgggctcaaatgatcctcccacctcagggaccataggcacacgccaccacgcccagctaatgtttaagtttttttgtaaagatggagtctcactatgttgcccaggctggtctggaactcctgagctcaagcagccctcttgcctcagcctcccaaagtgctaggtttacaggtgtgagccactgcacctggcccgacttctcttttaatttatccttccatattttaaaaattatttacctcaggctgtcttcttctcaaatgtaagcatttgagaagaatacatatgacaggttttaattcatcatgttttcattatcagagtgtctttaatttccattataattttcatcattgaaagtgtgttttctatacagtatttggaagtggtatgtgtttttgtcttttaatcctttttattatagacacctgacttaattgcattgtggttagataatgtaatttttacaatgcatagtttttgaaaattgttaacacttgcttagtgcataatcaagtttatgcatcttccacatgcattttggaagaaagtggactaattattggatggggaattttacatttattcagtagataaagctctactgttaacattattcaaatcttgaccttgctgagtttttgtgctgcttgacttaccacttgagaaagggtgttgaaattgcccaacatgatgacagatttatcttaatttctcttgtacttatatcaagtttttgctttatttttaggctgttatatactattaggtgcatacatatttaaatttgttatatcttctctgcaaattgaatcccttatcttgatttatgaccctctgcaaaaaagatgtttttatctcaaagtcagttttgcctgatattaatatagccatttaattatatttgctttatatatctggtttccctgcctttgttttcagttttctctctcatgctttaggtatatacagttgacccttgaaccagacaagtttgaactgtgtgggtccactcatacacttatatgtggatttttgaaaataaatatattggaaatattttttgagatgtggcaatttgaaaaaacttgtagataaactatatagcctagaaatagtgacaaaattaagaaaaatttaggtatgtcatgaacacataaaatatatgtagctactagactaacatttactatcttaaaacatacacatctattatgaagtttaatttatcaaaatatatgcacacaaacacagactttacatgataccgcttgtagttgagagaaatgtaagcaaacataaagatgcagtaatagctacataagatttactatagtacatactgtactactgtaataattttgtagttacctcctgttgctttatggtaagctaaggtgttttgagtgtccacttaaaatgctgtgtgatgcaaccatctctgcgacagttcagctctccagtaaattgtgaattgcagtgaaaggtgatctcgcagttcttgcatatttttcatcatgtttagtgcaatactgtaaaccttgaataacaccaggggacccataatgtgctactggtgatgctggacatgctcccaagaagtagagaaaagtcatgacattacaagaaaccattgctcagtatgtaccaaagatacatgttacaactgtggctgcagttattcaccatttctggataaatgaatttaacataagaaccatggttaaaaaaaaaagaaaaagaaaaaaatgtatgaagctgccactgcagctacgttggcaacagtaagtagttaaatgtttgggaagtcaaaagttgtatgtgggttttcaactgttgttgggggattggttcccttagccctcatattgtttaagggtcaactatatattatatcttaaatattataaagctggattttgttttttaatctcatctgagtttgccttttattggagagtttagaccagtcacatttattacaattactggtatagttggattactttctgtcatcattgctgatttgcatttgcctgcttttctgttttttctcatgttttttaaggttcattaattactgttattgttgacaaccctaaccctggttctacaattttaaactagtttactgtttaaaccttccctttctgttctttttttttttttttgagacggagtctcactttgttgccaggctggagtgtagtagcgcgatctcggctcaccgcaacctccgactccttggttcaagtgattctcctgcctcagcctcccaagtagctgggattatagacgcccaccactacgcccagctaatttttgtatttttaatagagacgaggtttcaccatattggccaggatggtctcaatctcttgatctctgatcccctgaccttgttatctgcccgcttcagcctcccaaagtgttgggattataggtgtgagccaccatgcttggcctcatttctgttcttttagtcgttaccagtgaaattttaccacacaaatttaatttagtattctaaaagttaatatcctgaccccactctcaaacagtaaaaggacttttgaatacctatgaagagcttcagtctttatcctcctcatttacttgtttccagtgtttcaatttgatcttttttaaaatgcacaagttgggccgggtgcggtggctcatgcctgtaatcccagcactttgggaggctgaggcgggtggatcacctgaggtcaggagttcgagaccagcctgaccatatggtgaaaccctgtctctactaaaaatagaaaaattagccaggcatggtggcacacacctgtagtcccagctactcaggaggctgaggcagaagaatcgcttgaacccaggaggcagaggttgcagtgggctgagattgcgccgctgcactccagcctgagcgacaaagcgacactccttatcaaaaaaaataagtaaaataaaatacacaagttggacaacatttttgtaattttttccaggcaatgttttttgaggtttacctcctgtttatcattttacttattcttaacatctctgagtgttatttggggatcattattttccaatattttgaagtatttttgaagtatttttttggaagtttcactgaaacatgtctgttggcaatatattttccaagagtctattcacctgtgagtgttttctttctttgtgttcttgtgcagtagttttgctggatacccaaatctaggttgttagttatttgctctccacaccttatatatattattatcccactgtcttctgctttccattgttgagtggacttctatcattctaattgtctgtcgttcctttgtaggtgatctgtcctttctctctggctgctttcaagatcttctctttgtgtttgatgttctgcagtttcactacgatgtgtctaggcgtggatttccttttatttttcctgtttggtataatgtatggaagcatcccatatatttgaaataaaatgcattatgaaatacatgctcaccatagaaaatctggaaaaagaaagcatatcaatgtaatatctcctgatagatgagaaaataatcaaatagtataaaaaagattaaaaataaaaagcaacattccttacttcattcttctctatactagtcccactccgcagaatcccccacttttaaatgcttctgtttctttctccgtgttgtaataatatgctttatactgtttcttcattgaccaactagatagtacctgttgatttcttgctgtatgtcaggttctagcccatttatacttttcccttgcttccaagctcatacagcaaaatcaatttttaattcatttattggttactttagtaattttaagtagtaacttaaatatttcttgtctggttatatttcagtatattttgacttctgaaagatatgtatccttcaattcctttttttttttggaggtagagtctcacttttgtcacccaggctggagtgcagtggcgtaatcctggctcactgcaacctctgcctcctgggtttaagtgattctcctgcctcagcctccttagtagcttgggactacaggcacaccctgccacacctggaatttttaataaaatttttagtagagacagggtctcaccatcatgcccaggctggtctcaaactcctgagctcaggcagtctgcccaccttgtcctcccaaagtgctgggattacaggcataagccaccatgccaggcctctctttcaagtcttatattttctttcttgccgccacctacattctgtcctgcctccaccttctaaattgtcacctgttcttttatattgtcaaagctgatcaaatttacattttgttccctactttagttaagacttagtcgattgactctaagttgagaaacagtaagcatttacactgttaagactatttagtctgggcatggttggtggctcacacctgtaatcccagcactttaggaggctgaggtgggagatttgcttgagcctaggaatttgaggccagcgtgggcaacatagcgagaccctcatctatatatatattttaatgttttttaattagctgggtgtgatgatgtgcacctatagtcatggctactctggagaattgcttgagcccaggagttcgaggttacagtgagctgtgattgtgccagcctgggtgacagaccaagaccctgtctctaaaaataaaaaaaaaattttaaagactatataaatattacaaggccaaatttacattctgtttcttgtacagttttgtgtgggaactctctagagtttttttaatttttcccccttttttgtttcccttaggttcttcttttttcccttctttcattgcctacctgtactgtagcctaaaagtcttatcactctgtgctttgaaatctttgggtttcccactttttcttaggtaccttcctcctggagcctctctcctccttttctgacctcactgcttgctctaggcctgctcaaggccatcatcccgaggcgccctcctcccctgagtcggctctgcaattcctgaattccattttgtcttctcagtgcatttctccgttttgtaatcacgtcacaaagaaactccttaagaaagtatagaaggtaaattttctgagttcttggaaatctgaagctatccttgtacttgtttgatactttgactaggtacagaattataggttgaagtcattttcttcagaactttgaaggcatagtttcattatcttgaggcttcagtgttgatgctgagaacttggttgcccatcttattccattgtgtaatacctgggatttttttctccgggaacttttttttttctatgttcctggtgtctgaaatttcactgtggtatgtctagatgctagttaggtacattaggtacccttttaatttgaaaattcattctcttccgtgtgggaaatactcttgcattatttgttttaaaatttgctgtccttgttttcattgttctctggtggaaattctgttagttggatgataagcccttactttaatctgtcagttgtatattttttctctcttgatttttgacttgatcttgttggtctactcttgaatacttgcttgacttgatctttagtctccttactgaacattttaaaaatgtaggcaagcatattttttaatttccacaaactttttcttgttctatttttcatagtatcttactttgtggatacagaatcatctcaactgtctgaagatcctaattaaagggattttttttttcttttcaaggaattcactcttgtcttctaattaatggagtcagagtcagattttatgctttttttcttgctctttcgattatggaatttttttcaaaaacatctgcagatagtggttcctagtttaaggaaaggtagtgcagaggcttacctagaattgtgctgtgggctgagcttttctgcaggcaggtttagctttcaatgaagcagacaaggagctgcaattggccttgcagttgtagaggaatttcttgggggagcaggttggtatgcttacactcctactggttgtctattaaaaatattaaaattttgtcttttaaatgtctgtctctggcagtaccattcacaagccttcttctctgccttacatccttcttggtttttactcattgctgcaatctctcacagttggatggccctttgtttcatccaaattcaaggcttgatatatcatctctgcactgtgactctcacatttttatatctccagcctggaccttgccctgaattcctcatttctgtccaaccactttatatttcttcttggaggtgtaataaatcatttcaaacttgtccaaagctcaactatgaattttcctctcctgtctgttcttcctgtagtcttcctcattttagtttattggtgacttcacctttccagtttctgagacagaatcctgttgccattctttttttctctccttctcctttccttcctcttccctctctacctctgtctccctccttcccttgttccacctgtcagcctctacctccagatttatagaattcactaccgtttatcacttctgcctctaccacccatcaaagtcactgtctggccgggtgcggtggctcatgcctgtaatcccagcactttgggaggccgaggcgggtggatcatatgaggctaggagttcgagacctgcctggccggcatagtgaaaccccgtctctactaaaaatacaaatattagctgggcatgatggcacatgcctgtagtcccagctactcaggaggctgaggtacgagaattggttgaacctgggaggcggaggttacggtgagccgagatcatgccactgcactctagccttggtgacacagtgacactctgtctccaaaaaaaaaaaggcaaaaaaaagtcaccgtctgtgatttgccttggttacttgattattggaatagtgtgttcttacaaggtgtgcctgctttcaaacttgccttccttcagtccatcccacacagcagcagcagtgatcctttacactgtaaattagatcatgctactttgcagcttagaaccccccaggggctccctgtcacactgtaagtcacagtgttctgccttctcatcacccacctgcctccctctgctctggctccccgtgcttgctgctgctcctgcacactggcctgcttgtccttcaggacgttggaagagctgcgcgtctcagatgcttttgccctctcctgagaatgtttactttggatgttctcatatctcatccatgtgtcatctttgaggccttctctggccccatccccacactccctcttttctgaagctttatttttccccataacgtttgtcaccatcaaatacatattttatgtttttgtagtttaggtatttttatccgaacgtaggtctttatgttttaacgtgaattgttttcttttagcatgtatttttttgggggtcttgagagctacctccttccccgtctcaacagagtctgtcctttttgagcagggatttatgtgtttgttctgtatggctgttactgagtgcccagagcagtgtctggcatatagtagcaggagctcagtcagtgtttgttgtctgagtaaatgtcactcctgccttgcatctaacctgcagttttcacaggggctcatttgtggttttgcctgctgtgccttacagccagtatttgtccatatattttctattacccagagattgttgacatctcatctgctgcaccttgtaacccccatctctaaaccagtgatctccatcatatttttgacctgaaaatttttgtacagtagccatttttaagtatgtataccaatatatgtattttacttacgtacacatgctgtattgatatgaatattagaaaacataagaatagaaatctgccgggcttggtggctcacgcctgtaatcccagcaatttgagaggctgagacgggcagatcattaggtcaggagttcgagaccagcctggccaacatggtgaaccgccgtctctactaaaaatacaaaaattagccgggtgtggtgatgggtgcctgtaatcccagctacttgggaagctgaggcaggagaattgcttgaacctgggaggcggaggttgcagtgagccaagattgcgccactccactgtagcctgagcgacagggtgagactccatctcggaaaataaaataaaaaaagaacagaaacccaaagatcatagggtagagatgtagatattaagttctttaattcacttttatggactcttcagaaggagagattataattgtatatgcttgatacattgtgttggactggaagcactgtgaaagattcttagtcaaggggagattttacattcaaagaaaatggaaaatccccctgctttgctcggagggaagaactgcacttaaaagtttgatgtgtattggtgtcgtcttctaggcatttcttatatctgtgaacatgtgcaccctttgtatataaagtggaattacatgtttacttacgcacacacacacatgtacatataaagcaggaattatactacccagagttctctgtgacatttttgttccacttaatgtatcatgggagagtccttgagtgtggacctaggagccagactaccgaaggtgcagaccctgcagtttactagttgatttaacctttctgtaccctagtttcctaatctataaatgaagaataacggtagcatttacttcagagttcttggtaggagtaaatgttaaaatacataagctttctctgctgatgaatatttacactggagtcttaggaagggtccttgcttattttctattctaaagttgggctggacatagtgggccatatgggtgccatcagatgggctcttgtttctctgtgacccgttctgttagacctctttcctgcttttttccttgaggttgtttatctgtcctctagtgaaccagctggtttgcaggtggtgcttttctgagagtgtcttgctgttaacagttactatggatgtcatatgccagctggttctgttaaaaaaaagtctgtgaatccaaagccttgaattttgaacattattttctgtctggaattttgaagaactgattcataaagtggagaaatgaataaagatttttattttacaaattccagcacttagcattttctttattctgttactgtgacatctatttgggaaaccaaagactaccattctttataaggattcctttttttttttttttttttttttttttgagacagattctcactctgtcacccaggctgcagtgcagtggcgcagtctcactcaccgcagcctctgccttcccaggttcaggtgattctcatgcctcagcctcccgagtagctggaattacaggcatatgccaccacgcctggctaatttttgtatttttagtggagacagggttttgccatgttggccaggctggtcttgaactcctgacctcaagtgatccacctgccttggcctcccaaagtgctggaatgacaggtgtgggcctctgtgccaggccaggattcttcttttaagagactatagtgagcagcatctaccaacttgcatccttgtatgttgcatatcttatttgtttgcttggggagtaaaccaaagtaaaaacgtcctttgtcaaattaaggaccttacaagattttctgtgttaatggattggaagtctttactattctttttttttttttttgagatggagtctccctctgtcgcctaggctggagtgcagtggcacgatctctgcttattcagtctctgcctcccgggttcaagcgattctcctgcctcagcctcctgagtagctgggataacaggcgtgcgccaccacacctggctgatttttgtatttttagcagagacgggatttcgccacattggtcaggctggtctcgaactcctgacctcataatccacccaccttggcctcccaaaatgctgggattacaggcatgagtcaccacgcccagcctagatgtctttactattcttaagatggcagtagtccccaagttgatctatggattcaactcaatccctgtttaaaccccaaattgcttttttttgtagaaatcggcaggctgatcctaaaattcatatggaaataaaaagggactgagaatagccaaaactattgaaaaagagtaacgttggcaaggttatgttgcttgatttcaaaacttactacaaagctagagtaatgaagactgtgtggtactggcataaggatgaccatacagacccgtggaccggaattgagaatccagaaataaatgcatactttcacaacccatcaatttttggcagcggtgttaagacagtttattggcaaaagaataggtttttccacaggtgatgctgggacaactgaatatccacatgaaaagaatgaagttggaaccttatcttatgtcataaacaaaaataactcaaaatggatcaaaaacctaaacttcaaaactcttagggaaaaaaatagatatgtcttggattccagaatgatttcttaaatatgacaccaaaagcacaagcaaccaaaggaaaaaagataactcggacttcatcaaaatttagtatttttgtgtttcaaaagatactatcaaaaaaaaaaaagacaacaaaatgggagagaatatttaagaaacacctgtctaataatggtctagtattaagccaaggctgagttcttatttccccatccttaagtttacacgatactatattagtgaagttgaattctgtcattaccacatgtatcttgaaagaagtttgtgtggatcacgggtccagttactttctccgccctttccctccagaggatttgtcactctcaataatgttatatactaatttcaaggggaaatacaactcaaaacaaatcagaaatctgaagcttaaaaatgttatggtttagatgatgaaaagggaaaagtacatttaattcatatcatatttagatgtaaagcacttaatgttatattgcttaacctataaagtagcgcttcagtgctctcatcatatgaagtaaataatagaaaattctttgtgtgacacatgtctgttttcagccaatcagaaaccaggattattttgtatgtaataatagggtttactggaagaggagctatacagatggtacttagaggatgtagggccctacgtattagggcttcttagttgtagcgaagagcaattggtctggtacgtttagctttttcacatttagttttgaattctgactctagaaatgtacaaccccatcttttgaattacaggttttaagatgttatttgctcttaatacgtcttaaggtaacagccttgatcactgcttttactttcgatgaaataacttaatgagctgtgaagaaaaaattatcagattttaagggagagaattttatgaaaatgtctttgaggttcctgtcacctttatgagaatgtcttcaaagtttccatcaccacctctaccaatttttcttccaccggagccagtggacttaggttccataacaagctcctcttgttcactgaatgagctagacaatatttcccaccttttaaggaaaatatcagctgatatcaatgaaattaaaggaatgaaagcagctattttgacagtggaagcaaatctttttgatctaaatgttagagtgtccaagaatgaagcaaaaatttcatctttggaggttaaaatgaatgaatattcaacaacatatgaatgcaacagacagtttgaagatcaagaagaagatactgaatcacagtcaagaactactgatgtaaaaataatcggcttccttagaaacgttgagaaaggtaaactcttaatatatgatatgttctaggtacccatcctttgatctgtatctttccacgtatgttgactgtagctctgatgtggagggagcaagttacagagaacttgaatttttcatggacctttaatgacaaatttggattctgcttgatttagcttagcaatctagaattgatcagaattccatcctctttaatggagctctctaaaacgatgttttgaaaagacagatgaacctagagcaatgaagcaaaacttgaaatgtggaagtgtggtctttcatgtgtcttgtgaaattattttaaaatgtctcattctttcatcatgtactgttgatgtgaaggagacctgttgcagtatttggatggaaagagcattcttcctgtaacttttcacctcagttttccaagcttcccacaggaatgcaacttgacctaagtgtcatcttcgttacagttcctcagaatgtgtgtttttttatggtaataattctggaaggaattgacttttttgggacgcaccagtaaaatttcatataacttatgttttaaaggaaactaactgatacaatttcaaatcgagtataggttttaaaatttaaaaacaccttttaatgaaatgtggtgcttggtgggagatggcccacttaacatctttgcactgagtaagcaaagcctgtccttgtgaagccacctgtaatggatatacccaaaatcagcatgtgggcatcttagtaagatttcagtatttgcaaccctatcagttacatccctttgtacactgtagtgcagtaccttataatgagcaagtgagtgcctgatgtctgctaagcgctgtgggggctacagaaaagtgtgacattctcccatcctcaaggagcttaacatcaaatcgaggatggaaaaaaatcagttctttgtccctattttgtgcagtcagactgctgggcatattattgttaggaatagtgaacctaataggaattaatgttaggagcctattttagaagaaataagtagttgaacatcttttcttgtggaagaggcaaagaattattatcatgctttgctaacatagggtgtggattgtagagctgagtgtcttattgttttctttgcatgcatcgaagcccagagtttgtcttttaggaactcttgtttagatgatgagagtgttttgttttgctatttcgattatcttcaaaggtcatgagttagtcgtgatggtaagagctcaggtgatggagggaggtgcttgccatgcttattgtgcagttggctgttatgcgagctgctgggccacaaggtgccttttcctggattttccacccgtttgccacctttactttccccgcagaattcaaattcaggaaaactgatgtcctcatagagggagaaccaggagtgttttaaattggcatttgtggtttaaccctgagtacagccttttttgtcttacaggatatgtctttggtctataaatactattaaattgaattgttgaagctttaagttacttttaagacttcaagttaagaacccagaaggattgatttttgggaaccacatgctggtattgtctgtgttgtaagcttagtgaagttttaaaatttatattctaggaactcaacagaggcaattattatcccgactgcaaatcgacccagtaatggcagaaactctgcagatgagtcaaggttggtaatgtttcaagttgtactgtaatccagccatttcagttgccatttccatttcttacaccccatttaacgtatctcggatctcttagatcctgccctaagatgttatatttagatctgtgaaaatattttagggccaggagataagatctgcatttctttcatgttatatagtgttataattttttgcctcattggaaaactttgttcctttcacaccattccaagtgtgtccctagcactgtcggctgtcactctcctgctgtcaggagtgacctgcgtttctgatttaccctcccactctacccagcttttgtcattgccatgagtggcttttgtatcctgtttttcacctggttagccttatcctcttgtacttcattttggagtcttatcaccagggccacacctggaacttgttgttctagtgttctagagccactctagtttgcctgtctcctttcctctccccacagacacacatgccaggggctactccaggactggagctgacgccttcatttttattatctctgtcctcagtgcccagcccctgccagatgcatgttcaatgtcttaaaaatgactgcaggataaacacaggcaaccatgagagacccggaatcatctcagtccttctgtttcccctaagtctgtcttttgtgggaagctctggtccctagacccctctcagtcaggactccacagtcagtcactctgttccccgaccctcccccagctttccagctcagaaagtgtgcttttcctccctaagggtcagcctccaccagaggccagatcccactgggttggtgagccactggcatgtcacccactcctccaacttcattctctgcctcctgtcttctctctgtagaggtgttcagacattctctgcccgtgattttgctctctcatctcccagcagtccgtcctgcttcctccacaggagtatttgaaaaggttgacagccgagatctgtgtgtgggatccacttcatcagctcttgtgcatgttttctcttctgcctccttcagcttttcattgtacccatggtgcacgcagtttgaaatagcaagtagttctgtgaggcttatgaatgactgcagtccttagctcctatcacattttttattctaagatccctttgtttctgcatattctattaattttctaaaaacatactgattttgtgtacacaatactctttgttatttctctgtggtctgaaaggtggttttgacatttttcccctccctgcttcgtcttgttttctctaagtggtctgttttggctgtcttttatgctggaggttcccctctgatgtctggggatcctaggtggtcttacatttaagagtggagcactcagaaggtcactggtattctgggttcatgagttggggcatggggcactttgactttctgtttgaaactagaccctgtggtggaaagtgatttgtcctgcctgtctggtttgtgggcaccctgatgtcactgccttcaagactttcctctcaggctggtcagcttctccaaaacaaagtttttcaagtaatagcctggtagtcagagttctgcgagcttaagtggggaaagaaggctgggggaggcacctcaccattaattattatgtaatgtttatttaaccctcccccaaccattgtcagtccagtacttctttcatcatggctggtgtctcttggtccagggactctgttcttatcctctgaagagtctaaagctccactttctccaagggagaatgcatgcagtgggtaaagatttatcaggaaatctaattgcctttaaaaatttttaacagtgtaccttcaggtgattttgtcgtagcatctttctggcagagaccctaatgcttcatccataggcctctccgaagattatctacaggaaagcacatcaccagtcatcccaggtgtcttcagtgtagaggtcgggattggtgtggcaagcatcaaaaccaagaaaacagtggccaggtgcagtggctcacgcccataatcccagcacttggggaagccaaggcaggcagatcacttcaggtcaggagttccagaccagcctggccaacatggcgaaacccaatctctactaaaaaatacaaaaattagccaggcgtggtggtgcacatctgtaatcccagctactaaggaggctgaggcaggagccttgcttgaacccaggaggcggaggttgcagtgagctgagctcgcaccactgcactccagcctgggtgacagagcaagactgtctcaaacaaagaaaacagatacatggaattagagttgaagaagaactaactgcttcttggacacatctaatacacctcttttttgcctgccatttcttccatttcttcctaaggtccttttactgccagttcctgagcctttggagaatcttgtggtctgaattggattgcttcattattgccttagaattcagcttttacagatcccctgagttcttaatcatctgttttccactttgaaaatttctttttacacttattttctttgtgagtttatgctttcaaaacaaaaacaaaacccttattgacatttctgtgggctttcaggagggaacaaaaagtaaatgcatggggtcagcctgtggtctctactcagaagatgttacttactcccccgtctgtctggtctccatgtgacctgggctgctaacgttccgcttgcagagaggtgtgcgggagggaccggtgcacgctttcctcaaccctggagcatgttacacttgggttcccatactttctccaagctttgacctttcggcttccagttcactctgtctttattcttctcattccctttcattctcatgtgtcagcgcatctcctccattcctcctcaaaaggttagctttgctctctcccaccttcagcattattttcatctcttctgtgttcacccaacctatgaactggtagaactccttcgtctcagaaagtgcagagtggtgggaaggagtgaagcagcccctgggccactgttgggacccacctttgacagttgtgagacctcggtgaatcatttaataacttggagctgcaaacagtcatctgtaacatgggaggaaaccgactttgtaggctttgagtgaggattcagtgagagacggccaccctgaatatgttaaacacttctgtcaccttcggttttgactcagcatcttatttctgtccccccacctacaggtcaaatctgaattttctacttcctcttaaacatgggagagtcccacaaagactttaaatctaacatggaaatgtatctttgccccttttaactttgctctttttcttttgctaagtttctcatcccagctttctcttccgcctgtctccctttaccatctgtactgcccttgctggggaaggcgggcacgccccttcccaggatggagcatgtcttctcttcctgtcaggtgtgtgagaccaggacagacagcagagaatcttttcattcagagcctcaccctctgtcccgggcaacagcaggtcgagaactctggttcttccttaacactgtttttctaaaaaccagtttgatcaggccacttccttccttaggaacctctcttgatttcttttctcttttttttttttttggtttgagatggagtctccctctgtcactcgtgctggagtgcagtggcacaatcctgctcattgcagccttgacctcctgggcccaagcacttctcccacctcagcctcccaagtagctgggactgcgggcatgtgctcccacgcctggctaattttatttatttatttattttctggttgatgggaggtctcactatgttgcctaggccggtctcaaactcctgggcttatggaatccttgtgccttggcctcccagaatgttgggattacagacatgaaccgccacaccaggccacttgatttcttactaattatagaccagaatcgagagtcactgagacatagaagaacctttattatatgtgtcagccttccttggtatgtactgctgagcccaccacacacacccttccagccattccacattctaacctttctcagatgccttcggccttgtgaaagcccctttccttctacgtgcgttttcctctgcctgaagtgctgtgttcgtttctccgagtctctctccttgtttattcctgcttgttcctttactgctgacttcagatgttcctccttgctaagcttttcgttggttcttggctggagtgggctgttctgtattctcagcaccttgttcacatcccttttgggtcatgctattctgaaattgtatatgtgtctgtttttctttttttctttgtgtatctagctcagttctcttagttgttcagtaaatactcagtgaatgaacataaatgaataccctgtaaattttggtctctaagctttaaaagaagtgtattaacttcagtccgttgatggcgtattgataggtcagccattctgggttgtaggtcttggcatattttataaaatagtagatgatgtgagcttatggttatttgcattaaaggccagtgtttttcttgatacatatgtttaagtgtccattcacctttcagttaccttttaaagtagtcctcggtttataaccaactggaaattataccacttgaattctttttatcaggacatgattctaagtggtactgtgcgaagtgaacaaaccagattttggaaaagtggttcagcagtctgtgtattctaattatagggagcattaggactcaaattctccaggtttttagaaaagatttttgtactttaagggtatattgttaatatctgttgagatgcctcacctgagaacctttctctgctgtggttagggagtgttaatcagaatcacttgtgccgtgccctacgcgagaaggactccttgagttctttgaaaacatgtttggaatagaattatagccctgttttcctgagtggaaccagttgtgattttcctttgaaataatttgaatatataaaagattgacattcttctcacatatataatgttgggaatgtaaggtatattcaaaagtaaacatttgtggccaatttttttggctcagattactatgacatggaatccatggtccatgcagacacaagatcatttattctgaagaagccaaagctgtctgaggaagtagtagtggcaccaaaccaagagtcggggatgaagactgcagattcccttcgggtactttcaggacaccttatgcagacacggtagatggtttctttttcttgtgtagttaatttgtgtgattagatagtaaaggttaaccattcgtttgcagcttccctcctccccgccctaaccgctagcgtagagtgctttcattgattcagtagctagcccatgaatagttagccaaattcagttttcaagaattccagttcatctttcttgttcagaaatccattaacctacaaattacaactcagtgtatgatttaactctattaaagattcttttctttatgcaaattcaggaaatgcaagtttaaaagccagctgaccataatcaggtcagctctaaagagagttggcagatcaggtttgggtgatttttcccttagaaaattgactgtttctataaaagaagaaacatacagataattagcataaatgctgctggcccttgtgttctgagcattgatgctaattttttggtttgtttccatgttgaccctatgaagatcgaatgggtgatggggtcaggcttgaggggagattgtccttagtaagtacaggctggagggtcactggtgatgccactgtgactgttcatggccatcgtgtgttagcagagaacccaccagtgctgcacctggtagccctacctagtctttttttattgaaccaaacgcaaagccaagggagtgatagttctgctgaagagcactttagggggctcagcgttttgtgtttgtttccctaattctatggtattttttatctgtctggcagagatcttgtacaaccagataaacctgcaagtcccaagtttatagtgacgctggatggtgtccccagccccccaggatacatgtcagatcaagaggaggacatgtgctttgaaggaatgaaacccgtaaaccaaactgcagcctcaaacaagggactcagaggtctcctccacccacagcagttgcacttgctgagcaggcagcttgaggacccaaatggtagcttttctaacggtgtgttgagagctcagattttcagggtgctgtcattgtgaagggaatctttgacttgtttctctaccttgaatgaatattggttaaaggccttgcttttatttatattcagtaatggccttttttcttctttcagacaaacccaccaagtacatttcagactctttttcctgtgtctttttcataggtgggctgttactccagtttgaaaacggagttcagccatggaacctgagagacctcttccgcttatgctggctaaaggatgaaccaccattcttgttgccttctttacctttgtattttcttcagaaactgtactgccactttgcccttttatcagcaatagtctcttgcaattaacttgagagaaaaatttagatttgatgctatttctacctcagtgaaatttctttgaaaggagtttctcacctaatctatcaagatcttggaactgtttaaattaatgttgaagagtaatatttagcagaactcagatgaactcatttcagatagcaccatagtttttggcaggtgacagtttcttatcaccgtttctttcactgggtatcagtggtagctgcaacgccactgatcatttccattcatgatagagaatggtaattatgttccttatatcttctaaaatatttagaagcacctcttcattggcaggagggataattactcaatcttaaaagcgtacagattcaaaggaaaaacagtaatggattttgaaacatttccttgagtaatcctcttcttggaagagatatgaaaatgtattgaatacctttctcgatcattaaaaatagaatagacttcagagggaaatcatatgttagtggagcaataacacttagctttattttaattggttgcgtttcctactgtgaatcaatgacgtagtgtcgtggttttgattagtggagggagttgaaaatctgaccctatcaacaggaagaaaaacttaaaaaatagtaaaagctgcagtaggcagtcccgatttattgactctgtatgttttgtctaaagagaagactccagtgttttcactactcttgattttcaatttggtaccttaattttttggtctattaggatctggtttcatttaaatgtaggtgtccatatgaggctttatggggtatacatgtagcagcagtgacaccataaataatatgttagtaaaaattcttgccagtgctgtggccattgtgctgacagccatgatgagtggtgagcctcctttcccattgctttgactggggactcagtgtttccctgctgctcaaggatgaagctttgtaagattagcataggggtgtggctggagagactcctgcagaacagttctcaggagtctctagtctctgcaccacttcccctgtgagcagggagtttgaaactgcaattgcttctggttggttttatgttgggttgtttcaaggatgctaccaacaacaacatctgttttaacctgctgtcttttcactcactgtcatatggcagcacagattttatagcttgctttctttgttttttttttttttgagatagagtctctctgtcccccaggctggagtgcaatggagccatctcagctcactgcaacttctgccttccaggttgaaagccattcttctgcctcagtctcccaagtagctgggattacaggcatgcaccatcacacctggctaattttgtagtttaagtagagacggggttttaccatgttggtcaggctaatctccaactcctgacctcaagtgatccaccaacctcggcctcccaaagttctgggattacaggtgtgagccaccgtgcctggcctatagctttcaataaaaggtgaatttgcctcttaaaatttgaacagaaagttttaatagtttacaaagtcggtgtcagccagtgaagactaggggcatgaccttcgtatgacttaatgtttttaaaagaaagataaagtttctttgtaaggtattattgtaataatcacatttctttgtaaagtattatattgttcctgagtatctagctactttgctttccagctaggcttctcttgggtattctcttaatcttttatttgtactgggttcttgtgtatatattatagtctgctgtgtgtaatttattataggaaaagggtaagacacatttactttgcggggatgacacaaaaaacctgtaaaaattagagaaacttccagtcatctcacattttctttggaaccgattattcttgtatcttagaactaaaatgacttatactgttttgtttttagaaagggtatccctcctgttgcccaggctggagtgcattggcacagtcatggctcactgcagcctccacctcccaggctcaagtgattctcccacctcagcctcctgagtagttggttactacaggtgcacaccaccatgcctggctaattttttgtattttttgtagagatggggtttcaccatgttgcccaggctggtctgaaactcctgagctcaagtgatctgcccgcctcggcctcccaaagtgctggggttacaggcatgagccaccacatcctatttaaagcttaaataggacttttactatttttaaagtagcatagaaaactgtttgtatcaggcatagtcataattgctctttgatgctgctcctatctgggctgcatgactacatttgtgtgccttgttctcctgtagtgaggacagaatgtgggtcactggaacagtaagtactcatagaactagctgctgctgctattacgactggttgcctgttttgcattttttccgtttaatcatcagactctaaggaagacattattttctctttgtatagatgaggaaacagaattccaaaaagttagctaacatttgcacagagtgtctggctgagcaactaagtggcagagtcagattttaactgacctctggcaagaggactagaggaatacagttgaagtgatacttgctttcatgaacatgaatgtgaaccataatacataatacccatgatgctattttgtggggagtttaaggtgtctcagtccagaaattagcagctgattattgcctgtagctgtaattttacttattcagtgttatttaataaattgccagcattacaatttcgatgaaggcagatttttggcttactgaaacaggataaaaatctggcaacaggggtcccactttgccctgtcatagtaatcgaagctgtgattggatgtggcacagggagtggagtggatgggtgtgcacttgctttccaggctgctgctccccgtctgtcccttattgcatttatcatcttcagcccagtcagtcttgctgttaggggaactgcccagtctctgtaagtgatggcatttgtgaccccattgtaggtaaaaatgttttcccctttttagacattgctggctgagcgcggtggctcatgcctataatcccagcactttgggaggccgaggtgggtggatcgcttaagtcctggagttcaagaccagcctgggcaacgtggggaaaccctgtagccaggcgtggtggcacgtgctacttggtaggggctgaggtgggagtatcacttgagcctgggaggcagaggttgcagtgagccgagattacaccactggcacaccactgtactccatcctgggtgacagagcaggaccctgtcgtaaaaaaaaaaaaaaaaaaaaaaagtaaaagacattgctgagtttcgcacctggacttacagctcagcaggtgggaatccttttgtatttgggccactcatcatcttgctggcgtgtgaggattcacatctccttatcaccttacctgttttcagtttttatttaattttattagttccccacttgacgtccttctctatttttaattcagctatgaattagtattgagaattagaatttttggtgaaaaatttggccgtagttgcagagtcactgtcctctttccttttcacagtgagaactgttgtcttcttcctggcaaccttttataggattctatggccagtgttaatcccataatttgagctcacttattttatatgactgtacatttaacagaagattctaagacaggtttgagggaaatatgttaaaggtgctgtgtactgaattgatcataatgaatgaaatacttttatttcctttccctttgtagctgagatgagtgaactgagtgtggcacagaaaccagaaaaacttttggagcgctgcaagtactggcctgcttgtaaaaatggggatgagtgtgcctaccatcaccccatctcaccctgcaagtgagtaccatccccccatctcaccctgcaagtgagtaccatccccccatctcaccctgcaagtaccatcccccatctcacctggcaagtaccatcccatctcacccagcaagtaccatcccccacatctcaaccctcaagtgagtaccatcccatctcaccctgcaagtaccatcccatttcaccctgcaagtaccatcccccatctcaccctgcaagtaccatctccccatctcaccctgtaactaccatcccatctcaccctgcaagtgagtaccatccctgcatttcaccctgcaagtaccatctcatctcaccctgcaagtaccaccccctcatctcaccctgcaagtatcatcccccatctagccctgtaagtgcgagtaccatcccccatcttaccctgcaagtaccatcacccacttcaccctgcaagtaccatcccccacctcagcctgcaagtaccatcccccacctcagcctgcaagtaccatcccctatctcaccctgcaagtaccatccccatctcaccctgcaagtatcatcccccacctcaccctgcaagtaccatcccccatctcaccctgcaattgagtaccatcccccatctcaccctgcaagtaccatcccccatctcaccctgcaagtgagtaccatcccccatctcaccttgcaagtaccatcccccatctcaccctgcaagtaccatcccccatctcaccctgcaagtatcatctcaccctgcaagtgagtaccatccccccatctcatcctgcaagtaccatcccccatctcaccctgcaagtaccatcccccatctcaccctgcaagtaccatcccccatcttaccctgcaagtgaataccatccccatctcaccctgcaagtgaataccatccccatctcaccctgcaagtgaataccatcccccatctcaccctgcaagtgaataccatccccatctcatcctgcaagtgaataccatccccatctcaccctgcaagtcatagccagctgattttggctttcagtttagtgtctgtatcttacaccttattttgtttttgtttttctgtggacaagtttttagttttataactaaatggagtgacaattaccatggccctctccagagtagcgtatttcttgttcatgtatgtttgttgagaggcaagggtgggggggctttgtttgtgcctcggacctgtgagatactgaaatacctggggttccttaagaattctgtacgtttaagcagatgggtatatggtaactgccccagtttgtatgcattttggccacacgcagtatacacagattttgaggagttgagggaaaagttagttatgggtaatgaaaacattttggacttgggttaaatttttccttacaagctggctggctcaatgtaatgagctttatgagatggctttttggggcttcttttttttgccgggggtaggtcctatggatggaatcttcatttttaattcttttaaggaaatgatgtgggaataatacagctgtacatataaggagagtatgggatgagtctttttgtatcacaaagccttgcatagaggatgtgtttattgtattaatgagttcactgcataaaatatataccttttttattaagtggtgtgatttttatcacaaaagcttgtctttcttggtggcttggcttgagttaaaagcctgtgtttgtgttatcccaagctttggaataaatgattgtgtcctattttgatatatggtcttattttaaaatattctttttgttgctgttttttttgcatttctcaaaacaagtagtgatggggagtgtaaagagcccttatacacagaactaataatgcattgagaagattgaatatgaaatatgctttttttttgttttgtagagccttccccaattgtaaatttgctgaaaaatgtttgtttgttcacccaaattgtaaatatgatgcaaagtgtactaaaccagattgtcccttcactcatgtgagtagaagaattccagtactgtctccaaaaccaggtgagtgagtgactgtgctactacatttgggtaaaaaatataaaatggcattttgtgactgtaaatggaattgaacaaacaaaagatggtttcagaaataattttggcaggatcagttaatccaaccagtctttaaagagcaagtgtgcctatctgtagtattccgaagtattttgactagtgaatatataaaccttaccattctaatttaaaaatggttttcactttcaaaaaaaacatcagtagactgcattaaaaatgggttttccaaacagattggagatcagtcctggtttttattttgttagcagttgcaccaccagcaccaccttccagtagtcagctctgccgttacttccctgcttgtaagaagatggaatgtcccttctatcatccaaaagtaagaacttctattttctcaaatcaatttagtgacaacatctcaatttcctcatttaacttcttttttgtcagagttactacattggtgcaaaagtaattgcgatttttgccagtaaaactattaagttgttcctcgtcactgaacctccatctggccccttaggccaagtggtctgaaactgttcaatgttagtatcccaagcactcagtggggggaagcatatctttgctagtcacattttccattattccctgcatttaagtatatggatgggttttagcgggggctggggggcagtttgaacctaatgtcagaactgagatgaagaaatccagtaggtactgcttaaaaccatccaaacttgtactgatgatggttgatgaatctccagatgtttagttggtcaaaatgaattatctccttcttgccccggtagcttgaggaccatatgaaggccttcacttgcccccatctgtaactgggcgtagatgagggtactcagtgaagagtgtaagggataattagaagtttttgtggtatgctaaactaccttttgaaattgtacttgctgtgattctttgactagaattttgtgtctcaaggttaagtccatttttcaaggcttcactagtattaaaatggtccttatagatggaatctcttactctgttaatggttagggtgggctggttattgtctcctaagttgtatgttggccaggtgaggtgggtcaggcctgctatcctagtactttgggaggtagaggcagaagtggaaggatcgtttgagcccgggagtttgaaaccagcctaggcaacatttaagagaccccatctcttaaaaaaaaaaaaaacaggcttggtagcacacgcctgtagtcccagctactcgggagactgaggcaagaggtcatgccacttcactccagcctgggtgacagagtgagaccctgtctcaaataataaaataatgtgtttacttatattagccttgtggatattgttgaagctctgttatctctattcagcattgtaggtttaacactcaatgtacaagaccggactgcacattctaccatcccaccattaatgtcccaccacgacatgccttgaaatggattcgacctcaaaccaggtaaacattcaaattcgtttttctcatgtcagttcaaattcttttttctaatttgcagtttctaaatttataagcacacaaaattggaaactagactgttactttgaatttttttctttgctgtttaattatagaaggctcctttggcaaaataatttactacatgggctaaattttacattatccagtggttacttttttaacctagattatcttgctctgttgcccaggttggagtgcagtcacactatcatagctcactgcagcctcaaacccctgggttcaatccatcctcccacctgtagctgagactacaagcgtgtgcctctatacctggctaattttttttattttaagtagagatggggtcttgaactcctgagctgaagcgatatccttccaccgtggccttccaaagtaccaggattacaggcatgagccaccacacccagccagattttaacttctcattatatactacgcaaacatatactaaggccagcaggagtatatatatgtgtactgtacttgaatttcacatccattttcttcgacattagcaactgggagatactgaaaggaagtttcaaaatattttagtgtggccagaaaatttaattacatatggtattatcttttatctacctgacataattgaattatttttaaaaatctgccatttatattgtaatcttatgaccaaatatttattgcttaaaactagtcaactttttaaactgagatatatggtatatatggatacaaagcagataattaaaacaatttttggttctgttcattcagcgaatagcacccagtcctgcctggcagaagatcatgcagtttggaagttttcatgtactgatgaaagatactctacagaacttgtcaaatctttgaaacttggaatatattgctttcataatatgaagttttattgcctatctatctgaagtgtctaatttttcaagtttgtaagtttattatgtggttttaacattgggtgtttttgttttgtttttactatgaaaagacagcttaaggaagagctaaattctgttaaaatatttggggcatgtttgtgcactgctgttgtgaggatcagcatatgaaattgacatcatggttagtcatggtactgcagcttagggggctacacggttgctgtgtgagtggagagatgcagtgaggcagttgtcattattctaaaaattgtactactttcacttttcccaaagattatataatgttcataatccaccatgaaaacagcattggccaaaggtactgaggctgcttaaaatattcaattctgctttttaatttttaagtgaatttagtttgaaaagcatgattatacaggcctctcaggctgagtgctactttggtaaagttcccagttttcctgccttctgtgacaggatgaatgaggtgggtatggacagtggaggcagctggaatggcaagtgcagaaaataggaacagttctatacagtgctctcatttactaataacataatgccttctaaataatttttttgggaaactacattatcacaaaattatacaaatttttttacaagtatttacatactgtatctgaaaacagactttaaagtcacaagattataaatgtacatatatattctcacattctgaaaaataacattctcagaatccacagaaaatatacttagttactactgaagataatttttgaaatgtaaaaattagatttaaatagtatattttaaatgacagaactataattacagagatcagatcagataggtaaactgcaagatagataggatgaaacttttggcctactgtattacttacagagtttttttgtgtgtggtttttaaaactgttaaggcaagaagtgtcaaatgctttagagttaaataacagatcactgatttcaaagacttggtgtatagtgttaaaaattaaagcttaaaaggtggttagaaaagtggattaatgcaaaaggggtaataaagactgcaacattctcaggaccaaattaaactgctaaaaaaaaaaaaaaagttcattgacttgcttagtcgtatactcaaatgatgataaacctacatgtgcaaaggctcacgtttaagattgtcaagccagcagtctactgttgtgttgccattgcttttccattgggagaagaaagaattaaccagtcattaaaccatttggtaagttgcactttgctgtgctgatcccacaggaaaggcttgaaacacgagaagcagcaaagacagagcacacaagtgcataaggctgttgtcttcggcttgggtgaaatgacagttcctcttcattctaaaggtttactccattgaatttaaggcatttgttcattccagtgttgagatgctttgcatctctgcagaagaaatttattttaaattgtttaaatatctggaaatacttttagctatcatttataaagatagttttgttctcagtttcactataaattatagaacaaatgggaaacaagggtttaatttagttcagccattttacaaggaaataataaaatactaaaatctgattgttttttgctatttaatagccactgcccagacacatatttaagagtttaatctttcagttgctatggcttatgaacaagctaaggttgaccataaaacatttgttggatgacgtggtttaaaatgatcaccacaaaaagggaccacaaaaaaaggaaggaaatgagcatggttggcgattggaagcaagggtaccagagggcacagtgtgctttggcatgcattttatacataaaatgaatggaacaaaaggtgccagaagtcccaggttacacaatcaggagcttagatactgcacacaaaaataattatctgggttaaaaaagtaaacatagggcagattctatatggcctatcatgtttcttcaccttcccctcgttgctggctgatacagcgaggtggtcagctgatgactacttagtcaatatgacctttagtcgtgaaactgacagcagcagtgattaaggctgacttaatcaggttggccactttgaaggacagaaatgcagtggaaacagttttattctatgtagtttacatgcttaaggttacagagtttctacctgcactgtaatggaaatataatttctctgtagccaaaagctggcaaacttgacccagagggaaaatttaaaactgcagcaggctcaaatgtagagtatttttctttttatgggcaggttgttcagggatttttttcctcctttaatttattgactgactgtaaatacatgagtagaaacttaatagtcatgtatttcaaaatttggcttaatttaggagaatccactgatgaacaagtaccaacttacgtttcaagcttcttagccccataatcagtccttcagccacagctatttagagctttaaaactaccaggttcaatcactggttatgctttctgtgatgtaatttagtcatttctatttttagtattaaccaagtattagacacagaaaataggtattaagaatcttcatatatcctgtcagaccaaatgggattccaggaacctaaagcgatctattatgctataaagataattaacacattaaaaactcatagggtcaatacagcatcttaaacctcacacttagaaaaatatatttttaaatagcagtctacataattttcaatcttcaggaaactacagataggctagacagcgaattcctgaatgatgagtagtgatctttggcagcatttaaagtgaaaagaaataaggatctaagaattcagccctaatccactaaaaaaaggaattctaactgacaagtttttacaaatggagttgggctcattcattttggaaataaacctatggagtggcacacatctaaacaaattttcccaatagaaaaaaggctataaaaattttattccaagagtgattaaattgtataatgttgtatatgtgaatttaacacttttgtttacatgttaaacaaatgtgtatatattagactacattaaatatgcaattctttcttccagttaaatactgttgctccctaaaacccttacattgtacaccattgggaatgattgttcatcatactacttttccattagtgaggctacagttatgttttaaatgtgcgattacagagatggcatctgaacataaactgatggctcgaaaatgaaaatggaaatgtagcagccatatactgctaactttggatctgttcctgaattcaaaactactaggagaaaagtgtcctttataaaaaaggaccttattaatgcctaaaaaacatcatattctctaggaaagcttgtgtctgtttccttagggaaaatgtttgccttttaaaaactgtgatcctttaggatgatcatgactttccctttccttatggaaatgcaagaataaaatatttcattaaacaatgaaccttgaaaataaaatataaacattaagaaaccattttgctaaaaagataatgaaaattatccaaattgggtttttgagttcttctgtaaagagtgctctaccctaaattttcccagcaggtctgccgaaatcacacacttcccaatacagggggacttggcctttaccatcaagtattcgatccttccttgaaatggcattatctggcagtgtatggattacggattatacccagtgcatatagcaaatattttgaacagatcagtctttcactattttgatgattctgggcatttctccctgttacagtcttgggttagcaccacttgaccatgcagggttgggttttggtttttcttctctgtaattctggtctcaaagttaatttctgtagtcatctcagcatctctcagtgaggtgtatgtacacatttccagacaaataagctgcaatcagagaagaaaattgcagggagttaattatgtttttagattttcataacagtttaatatttttcagttgtgctttcaggttacatgtgtaatatttttcctctttaactccttttattctgtatttgcataaatatgagattctgaagagccatctggttatactaccttctactaatgttgactagctgatttcataaaccaaagctgtaggagttgttgtattaagtctcttaactagtaacatagtctgctcttcatgggctgagaaagttactaacctgcagtcatcacctccagcactaacaacatgtcgatcaccactggtaaatcgaatatttgtcacatggggcgaatgacccaagaaccttttgtgttttgcctaaaaaacaatgacagacaagctcagggcatttggtgcacacagaagtcaaaggctcttattaggaactataatctctatgacaagagctgtggagagagtagggagttagcaccgcagccagtgattagaatgcttttcagcatgagtagtggatctgcaaaaccaggctgtgtgggcagtcagatgtctccaggtactctgaccatttttctctaaggaaaagcatttgaaatttgataactgattataggtttggtgaaaagctaattacagcttttgtaggatggttccaaagatggtattactcgagggagaggatttgtttctaatagcttttatttcaaagtaaatagatttagaaagtttggggaaaaatttagaaattaggacaaaacattttaaatatatggggaaaagtgctgatgataagacatcaaaattaggagtaaactgataatagtaaacaaaacacaaacttacaaatttttctggacatgggaagtcaaataacttaaccatgccaaagtcatctcctgtaacaagactgattcctgaatgagatacacaggcacagttgacatcagctttctcagcatgtctggaccagattcccaaaacctcatctcctagaatactagagggaaggaacaaaagaaaactcatcatggcaagtgcgggcaggttgactatattcaaaaagtttcttggcaattaatctctaagtaccctatcatgttacttaaaatacaggaagtaaattatggtaagttgtttggagacctgaatttcatcaggatatcaactcctgccttttaaaaatgacattttataatttgaagggtttctagattaatctttttaagattaaagtagtactttatgaaaactgatagaactattttttctttttttttttttgagacggagttttcgctcttgttacccaggctggagtgcaatggcatgatctcggctcaccgcaacctctgcctcctgggttcaagcaattctcctgcctcagcctcccgagtagctgggatcacaggcatgcgctaacatgcccggcttattttgtatttttagtagagacagggtttctccatgttggtcaggctagtctcgaactcccgacctcaggtgatcacccccgctcggcctcccaaagtgctgggattacaggctgagccaccgcgcctgactgaaaactgatagaactatttttcaaattaaaagtgctacttggctgggtccagcagcacataccagtaatcccaacattttgggaggctgaggcaggaggactgcttgaggccaagagtttgagaccagcctgggcaatattgtgagatccctatctctacaaaaataaaaatgacttatgacataggaattaaaaaaatttcagagatggggtcttgctatgttgcccaggctggtatcaaaacttctaggctcaagtgatcctcccacctcggcctgctacatcagagattacaggcatgagccactatatgcctggctgatacaggaatttgatggcatttttcattggccaaaaaaatggatagtcatggttacctgtcatacagccaggaaatttgaacaaatttggaagctttgacttctaatagattcaagatagcattcctttagatagagaattaataacagttgcttaacagcacccaatacctttttgccagtcattaaatttagcattaagaaaaatatcagggtatctttaaagttaaaactttgatttccttaaaaaaaaaacttgataaatcatggaaactgataaaacatggaaatatattcaataaaaaggggtcccaacatgaacataccatttcaaaatatggtaacaaaaacttgaaactcaattactattccttattggaatggctctaacagttcagaaataggattttctaactggccttcaaagtcagttcttgccttgtgaatatataagtatttacctagtccatgtagcccaagtaattctgtcaatagcggcatgatccataagatgttttcctgaaggcacttcatagacatgccgtttatagcagccactagagacctttttcatcagattaaaatgggacaagaattccattaggtgagagacaaaatccacagggggtttacagaatactagcatattgctacttgatttacatgtctaacattattaagtatgcaaaagatcactacaaaaacttaataggagaaaagctctgataagtgggggaggaaaggggagctgtaggtcagaaggtacaaagggaggagttgagaagctggagctctggagctcaggaactttaaatgcattcactaacacgaaatgtaaaagcagaagaacttgccacctgggtatacagtattggtactgtacctggagataactgctatctgcagagaagtccatttgaatgacaaagcttggaatgtctttgcagtagctgattctgttaagagtggggcccagcgttaggtcataaaaatccactgagttctcactagaacctactgccagataccgggaatccggactaaatctgaatcaaaacaaaacgtaaaaagtattagaccacatgaagtattataaatacttaagatcagtgacttttcctttctagttcttaaaagtaacgtgtgataaggcctcaaatagatttacctgtcagacacaactgatcatgtatactgagattgtctgggttacatgaaataaggaagctttatattttacttaaattttaaatatttccccaattgtcatctcccaattcctttaaaaacgtctaatggcttaaaaaaactttcttaggccaggcccagtggctcacacctataatcccagaactttgggaagcggaggcgggcagatcacctgaggtcgagagtttgagaccagcctgaccaacatagagaaaccctgtctctactaaaaatacaaaattagccaggcatggtggtgcacgcctgtaatcccatctactcgggaggctgaagcaggagaatcgcttgaacccaggaggcacaggttgtggtgagctgagattgcaccattgcacttcagcatgggcaacaagagcaaaactccaactcaaaacaaaacaaaacaaaatttaattttttaaatagaggcggggtctcactatggtcccaaactcctggcctcaagcaatccttcccccttggcctcccaaggtactgggattacaggtgtgagccacaacacccagtcagaacatctcagcttttaaaagccattagcattacataattaataagctaacaattcattaagatagttttcttccatctggaaaaaacgttgtcttaatattaagcaaagaacacagcccagcttaactaacctccagttattaaggtgaaatgacacaacttgaatcttggaagaagaattttttttttttgagacgaagtctcgctcttgtctcccaggctggagtgcgatggcgcaacctccgcctcccgggttcaagcgattctcctgtttcagccccctgagtagctgggattacaggcgcctgccaccacgcccggctgatttttgtatttttagttgagatggggtttcactatgttggccaggctggtcgagtactcctgacttcaggtgatctgcctgcctcggcctcccaaagtgctgggattacaggcatgagccaccgcgcccggcctgaagaacttatttaaaagacaaagtgaaatgctatttgcctagcaatctttggagtcatatgggacaattcagtctcttgaaatggcccatgagtcttactgaggtacgatagagacatgtaaaagctaagggaagccactgttactattttatatattgaagttctgaggaaggtttcatttgtaaaaggattttactgatgaaaagtgtacaagcttttgacagacctagattcaataatcttatctactgatcacacggaagtactccgtaaatggtagccactgttgaaaaatgcttaagcactgaaaaacaaaggtttaagaaacatttaaattaatttggattctggaacatttaatcaataggtattgattaaattaatgaactacatattcccaaactgaggttactaagagaagatatgtttgaaatcacaactttagttttccagggtgacaacttttgaagggcagatagctctcttgtattacagtgggagatacctcttggtgggatgaacttaatggacatggctaagtgttaacatgaattcatcaaacattacctactagtacttgctattatagttggtgcccagtgggtttataatttagcaagaagaattaagtagtatacaaacagccatattttagcatacaatttataatacgggaaatgctacaggccctggggacctctttttgaaggcaaggctatggaaaattttacaaatggaagttaaatcaagtatatactagaaactctattccatttgttcactaacctgatatcatggattgcacatctcctgtctctcttctttccccatatttttagagaactcactagtaaaatgataaattctccatttttcattccaatagccaccatgtccccttcagggctgtaacacacagtacgagcagcatgtcccaaattcactttgtttaacatcttctgcatttaaaaaaaaaaaaaaaaagagtcataggaaacattaagtgaagtacttctaaattataccagtttcccctcaaaatgctcaacagaattctggcagttctttaagtactagcaatttagaacttccaacttttctttttagaagttgtaacctcttttaaaaaaattatctgtacttactttatcagcaatatcccaaagtctcactgtcccatcttctgcagcagaaaggaaaaaatccctggaaggatgtgttgctagtccccagattggcccatccacatgaccgttaactaaaatattacaagctgcatttttctctccaacttcgattatttcagcattccttgtcccaacaaggatcttgccctgaaacacaagcaggaccaatacagtgaatgtaatacaacagctgcttttcttcttcataatataaaaatgaccctattgacctgctttcagagaactttttgctttgagctaatctagtagcaaggcagtcattagctcatgcaaatttttctatgactacaggcacacatctatctgtaagcacaatgggctagattacatattagagtccatgctacagaatagaacttttctgtggcagtacacctggattcttcaataatcaaagtttttatttgataatcttaggatttccaaactggggtcagtgcagtgggatataggaaaaaataatagaatttattttttagttaaaaagtaaaagcttaactacaatttaatatgcaggctgaagataatatccgtatgatttataaatacacttaataagtacaaacacgctcaaaaattttcataggagttgtagttttgaatttttattttgaaattgacacataattatacatatctatagggcatagggtaatacgcataaccatcacctcagacatttatcatttctttgtgatggaaactttcaaaatcctctcttgtaaatacctgaaaatacataaatacgtgattcttaactatagtcatcctacagtactacagaatactaaaacatactattcctatctggctgtgtaaacttgtatcctttaaccagtccttccctatccccctccccctcccccttgtccgcctccagtaaccactattctactctccacctctgtgggatcaacttttttagtttctgcacaggagtgagaacatgtatttatctttctgtgcctggcttatttcacttcacatcatgtcctccagtctcatccatgttgccaccaagaatgacagaatttcattattttttatggctgagtagtatttcattgtttgtttactgcacgttttatctagggaatgtgtgtttttttaaaaaatggagacagctgtcctaatatgagtcaactgccaagggctttcaattatgtctactagagttgttaaattggcagattctagaaaatattggaggtttacatacagtatttagacagaatagcttcctagcttatgcaccacactggtgctaactttggcaaagaaagcagcaaagacagagtaatgttggcaagcaaatccatcgttatgcattattaagtattgttcattaggctgcaaagggtgagggaatcacagtaataaccactttctgttttctgctgcactgtatcagctcatggaacatcttactttgcctctgcacacagaacgaacacaatctgtggcttgtcctgtctcaagcctgaaggcacggcaccgcctcagttcctgatcccacagtttaaccgctcctccttcttttgacctaagtaaataaccaagccagagtaagtgttcattattggctactataatttttattataaacaaataccaagttataagcagaatcttttttttttaaaaaggccctgatatttataatttacctctaatattcttgtaaactttctatggcaatttgaggatatactatatctcagtcaaaataaacatccagtttcagtgaattttattttgagaaatactctttttttctgacatgagcataattttatttagcctctacaatacattacaatacattatcctctctcataatacttttttttttttttttaagatgtagtctcgctctgtctcccaggcttgagtgcagtggcatgatctaggcttattgcaacctctgcctcccaggttcaagcgattctcctacctcagcctcccgagtagctagcattacaggtgtgcaccaccacacccagctaatttctgtatttttagtagagatggggtttcaccatgttggccaggctggtctcaaataccttgacctcaggtgatctgcctgcctcggcctcccaaagtgctgggattccaggtatgagccactgtgcctggcctcataatacttcttgattaggaagatgtaaaaaaacaattttattaaaaggataatggaaatgtaaggcaaaataatagaattacaaatgctatgctacagagttgatttatttatttttttgagacagagtgtcgctctgtcacctggcctggagtgcagtggtgtgatctcggctcactgcaacctgtgcc

SEQ ID NO: 456 - DNA, 38282 bp, Homo sapiens
ttattgctggaatcagaggagataacatatatggaagataaagtgaataaaagtactttgaaaaactataaagcattccacaaatatgagatgatggtattatccatccataaataggtagatatatctctattttatagtttcagattaaacaaaactgatatcaatagtaaaagtcattttacttatcaattttctgtttttttttttagttttaaagatattattggccgggagtggtggctcacacctgtaatcccagcactttgggagattgaggtgggtggatcacttgaggtcaggagttcaacaccagcctggccaacatagtgaaaccgtctctactaaaaacacaaaaattagccaggcatggtggcgcatgcctgtaatcgcagccactcgggaggctgaggcatgaggtttgcttgaacctgggagatggaggttgcagtgagccaagatggtgccattacactccagcctgggtgacagagcaagactccatctcaaaaaaaaaaagacaacaaagatattattaatcactgaacactattttctctcaattataagtaattgaaaattctaatcaaccttagattaacctcaaatgtgcgaaaaagtgaacaccaaaactcattgtgattttaagttctaatcatacacataaaagttttaataaactaataattataaaatgaggccgggtacagtggctcacgcctataatcccagcactttgggaggctgaggcagacagatcacaaggtcaagagactgagaccatcctggccaacatggtgaaaccccatctctactaaaaatacaaaaattagctgggtgtggtggcacatacctgtagtcccagctactcaggaggctgaggcaggagaatcacttgaacccaggaggtggagattgcagtgagccgaggttacaccactgcactccagcctggcaacagaacaagactccatttcaaaaaaagacaaaatgagaacaaggtcttgatcagtgattttgaaattgttttcttctactcagtcttcacttctgccttgaaattcttttgatttataccttttttttttttgagacagagtctcgctcttttgcccaggttagagtgcagtggcaccatcttggctcactgcaacctccacctcctgggttcaagtgattctcctgcctcagcctcctatttaattaattaataattgatttaatgatttagtttaaaatgttaaattcattttaaaataacccattacatgttaacacaaatagcatgtttttattttattttattttgagacagagtctcactctgttgcccaggctggagtgcaatggtgcgatcttggctcacttcatcctccacctcccgggttcaggcagttttcctgcctcagcctcctgagtagttgggaccacaggtgccctccaccacacctggttaatttttgtatttttagtagagacgaggttttgccatgttgaccaggctggtctcaagctcctggcctcaggtgatccgcctgcctcagcctcccaaagttctgggattacaaaggcgtgagccaccacactcagccatgtttttattttaaaaataattattttcaaaaaaaaaatagaagagtaacattgttttatatttctgcaaatattttttatttctggcttaatagaagacactagattctgatatctgcttctgtatcctatctgttgttatatgctgttttggttgaagtctgtgaagaaaatctgaccccactcatatataaagttggaaaagggaggagtattttaatagctttgtctgataattatggatactctctttgataccacaccaaaatatgacaagtagtagagttccttaaaggctagttgcaatgtggattctgaaatcgtattgatgagcttttctaaagtccattggtgtaccttgtatttaaatagaacttttacctatgtgtgatatttgtaacaccagtccagtgattgatcatttggaaaatattggttcactgagttatgcaaatcttccaaatgttgacacattttgatatacaatatctaaaacaaaataccattaattaatattaccaccaatcccattacaaaagtctaagtctgaggaagctataagggcacagaagtgtatacaagccttccaaaattttaggtttcatttggaagcttgagttttatcattggcaacaaatgccatcagttttttccaagctgacttgttcttttttgagcaaatctctgccaaaattacccctaaaatatgaataatcaatttgtcaggttttttcaaactaaaaatgttctgtgaaaacaagcagctagttcagcttgtatctcaaacaattgtaactactttttctagggaaaaaaaaatctagacatccatactttatggcagatgtgcttcatgcatacttcccattttgtcacacagaatatcaaaataacgtgtactcaaggtcaagatttactaacaactaaaattccaaaactgctaaacaacagaatgctgaataaggtgatccaatttttaatattttatttgagacaacatctcaccctgtcacccaggctggaatccagtggtgtgacacagctcactgcatcctcaacctcctgggctcaagcgatcgtcccacctcagtctcatgagtggttgggactacaggcatgcaccatcatgcccggctcactttttttttctttttttttttaattgtagacacagggtctcactatgttgcccaggccggtcttgaactcctggactcaagcaatccccccaccttggtttcccaaagtgttgggattacaggcatgagctactacatacaactgaaatcttttaatatgcttgtcaaaaagttttctgattcagcaaatggcacttatatataaaagagagaacaagaagctggatgcggtggctcacgcctgtaatcccagcactttgggaggctaggtgggcagatcacgaggtcaggagttcgagaccagcctggccaacgtggtgaaaccccctctctactaaaaatacaaaaatagccaggcatggtggcccacgcctgtaatcccagctacttggaaggctgaggcaggagaatcgcttgaacctgggaggtggaggttgcagtgagccaagattgcgccgctacattccagcctgggcaacacgagcgaaactccgtctcaaaaaaaaaaaaaaaaagaatagaacttggctggatgcagtggctcacacctgtaatcccagcactttgggagggcagggcagttggatcacttgaggccaggagttcaagactagcctggctgacatggtgaaactccatctctactaaaaatacagaaaaaaaaattagctgggagtggtggcacacacctgtcatcccagctactcaggtagttgaggcacaacaatcacttgagcctaggaggcccaggctggagtgaggtggcacgatcttggttcactgcaacctccacctccagggttcagagtagctgggactacaggcccacactaccacacccggctaattttcgctttttttcagtagagaccgggttttgccatgttggccaggctggtctcgaagcctgagccataacctggcgaaaagatactttgaaatgtaacatcgtttttcacttcaaaatcaaggtattttaccaacttgtctttggtacctccccaaaaactgatctactacatttgcagtttcattcatttttccaacattaaggaataaacttgaagcgcttacattcttgtgggggaagtaagaacaaaacacataataggtcatggtggtcacatgaaaagtaaagggtaaccgattggggtaggtggtggtagttttgtgtgtgtgtttttttttgagaccaagtctcgccgttgcccaggctggagtgcggtggcatgatctcagttcactgcaacctccacttcctaggttcaagcaattctcctgcctcagcctcctgagtagctgggattacaggtgcacgccacacctggctaacttttgtatttttagtagagatgggggtttcactatgttggtcaggctggtctcaaactcctgaccgtgtgatccacccgcctcggcctcccaaagtggtgggattacaggcatgaaccaccacgcccagccttcttttttcctttgagaaagtctcaccctggcacccaggctggagtgcagtggcaggatcacgggtcactgcaacctcagcctcccaggttcagttcccctgcctcagcctcccgaatagctgggactacaatagcccaccactacacccggctagatttttgtatttttagtagagatggggtttcaccatattggccaggttggtcttgaaatcctgacctcaggtaatctgcccacctcagcacccagccaggtggtggtagttgttttacagcctgtgtgagacattcgggtgagccccaggaaatgaaagaatgtgcttatttgggggagggggaggccttttttcttagacaaaattgggcattcccaacttacacgcatttagtgcataagctgacatttcaatgagattgtgaaatgacaatgggaagggccctgaaaaaaacatcaagcataaaaggcctgggaggccgggcactgcggctcaggcctgtgaaatcccagcactttgggaggatggggtttcgtctctactaaaaataccaaaatgagttggttgtgatggtaggtgcctatagtcctagctacaagaggctgaagagaatcgcttgaacccgggaggtagaggttgcagtgagcagcggttgagatcatgccattgcactccagcctgggcaacaggattcagtctcaaaaaaaggaaaattcagagagtaactgaagttttatcattaatgggactaaagtgctttagcccagaaacagatttgtaaaaccattactgctaacaaagacatcattataagcacagctgtactgacactgaaattaaaatttgacccatcttggaattttggccccttggtcctgtttccctgggacagattgccttaaaccagttgtgccctttatacccacttttggcatccctaaacacttagtgcttgccaaaaacctatcaccatggctatggattgtagattttcccaattccattaatgcctatcactagttgggcatttctatagtattttctataacttattttcccagcctcagactcaacatgactttctccaagtagctccatcaatactttaagctcaaaaccaattagcacaggggcctatgaaacctgacaatttgctcatatggagaattaggaaatattgcactttaatgcataagacaccttgtaaaatacccataaaattttaactggctgcagtgttaatgaagcaaataccatggagttataatagcttttgaatgtgatttatgcttacagctaatgaacagatgaaaagcactgtccttttttaagtaaacactacacactccagatggattgcaaaaatttattaaaattggagacactgttttaatcttcttgtgccatgagactccatcaggcagtctacaaagaccactgggaggctgaggatcacttgagcccagaagtttgaggctgtagtaagcttcaaaggccactgcactctagcttgggtgaggcaagaccctgtctcaaaaaataagacaagacttttagccacatttacagacttcaattaaaatgctacatgggaatgcagaatatcagatattttattgtcatcaagtaatcagtgagagagttcaagttggattgagatcatcatgtattctgcaattataatagtcccaacatttccaatcctcacctttcaagcagtaagctgcatgcttgcttgttgtggtcattaaaaaccctgaaagcgaagccaacatattaatcagggcaaaatacaaatgtgtgatgcttgttagtagagtaacctcagaatcaaaatggaacggttttacagtgatatcattatatttcatttggcagaatcattacatcattggttacactgaaaatcatcacatgtaccaaaagctgactcacctagtttaggataacaggtctgcctgtttgaagatgaaaaataatacccatttaaaatttgccctactcaatttccttctcagtcacattttaacttttaaacagctaatcactcccatctacagattaaggtgtatatgccaccaaaaccttttgccaccttaaaaatttccttcaaagtttaaactaacctgcatttcttcaatcatgaattctgagtcctgaaattaagggacaatacacagtaagacaacttgcatacaattaggagtaatccaaaatctccaaacattatagaatggctatattccccttttcggggcataaactagaatgttaccgccagatacatcagataggagcgaaagacttaatattgctcatcagcgttagtctgctgaactatgttatcatcattgtatcggctttacaacacttaaaaaccagacttgaggcggggcatggtggctcacgcctgtaatcccagcactttgggaggtcagtgcgggcagtatcacttgaggtcaagagttcgagaccagcctggacaacatagctgtacaaaattagccaggcatggtgtcacatgcctgtaatcccagctactcaagaggctgaggcaggagaattccttgaacctgggaggcagaggttgcagtgaactgatagtgccgctgcactccattctgggcaagagctagactcttgtctaaaaaaaaaaaaaaaatacttggaactgctatacctttgcttctttaaaacttgctccacacagtgtagtcaagccgactctccatacctgtagaaatttaatctcctttaccaataggtagtaataggtggatttctaaaagatttcccaactactgtttcagtttaagattaatctccattttctttctcagagagattcccatctgctttaattttaaaatcatcactaacagtagctcaatcaattaacgttaacatcaataaaacatgtacctttaaaaggtatgacaggaactgtcttcatgtccttacccaagcaagtcatccatggataaaaacgttaccaggagctggaatacaaatgaggacttccattaaaatgctaaacatcattaaactcttttcaaagttgtctgtcacagggttcttcagtgttacctttgtctacatgctcatttcaggtcagacatttgatcaacatcattacacaaaccccgttccaaacatgctcaaggaaaacacataaacactgttccagacatgctcaaggaaaatacagtcagtattcatcagccaagccttaagccattagctcagcagtaagcatatcaccatcagcattttcattaagtctatctactgttttcattaatacttaccagaaccattaagctggtccaggcaagttggactccacctaagaaataagagtggtcttagaatagccacagatgagtgttcaccccctgccaaaactaacaaatgcctttagtcagttagagctaattaagaccttcatgttcagtcagcatttgcttatcatcatccaggctgcatttacaaactttcttattaatcataacaagacaagaatccgccatttatttaatgcattcagcactaggaggtaactaaaaagccatttgtgccgtaggaagtttgcccagttacctgcttacttggatacagtttcacttaccatttcaacttccagctttctgtctaatgcctgtaattttaatacaaaattgtcagcaaaaaatattttaatggtagattggtggtacactgcttaaccattaacagcaaaccacaactaccccagatacatcagacagatagtacatctcttcatgattaaatctgctgaactatgcaaccatcatagtatctgttttcacattttcttcagtattaaacttagtatcaatatgagagcaaaattctcatttgaaaagaggggagagaagcactaacatagataatcatcattgctttggctattttctaatcccttaaaagtgagaagtacaaaatagaggtgtctcacctgtgtgccaatggcttgagttaggcttgctctttaggacctgggaagaaacaacttcatgtgaacttaggtgtactctctatgttccccaactcaccattttgggtgcctcagttaagataatggtggttaagatcctcatcattctagcactcaagagtagcaaataaactgtcatcattgtggcacatccaatggctttaaacctttttgagagggaattttcaacttacttcagtagctattctcatccttccttggggacacaactagaaaacaaaaagatgcaagcaaaacagtgagaatgaacctcacagcagtcacgttaaatataaatgctgttaacattaaagcctcagaatagaatttcagaaatcccttctgtccactactcttaaagcatcacaggctgagaccacctcttagatttcattcttcccaccatactttccccaattcttacctgtccataaggtgctatccagagccacactgcatctgcacccagcaccatacctaaagagatcaggtacagattttaattcattgttccacggttcttttttttaaagagtgttctttaaaaaaacggttcgtctttttaaaccaatgatgcaggtaacataccattcattatctagcgacaggtaaaggatacacttaatgttacaaagaagcactgcacccgcagttaagaaccaccgatggcggccgggcgcggtggctcacggcttgtaatcccagtatgttgggggaccacggctggtggatcacctgaggtcaggagttcaagaccagtctcgccaacatggtgaaaccccgtctctactaaaaatataaaagcctagcatggtggcgcgcgcctgtagtcccagttacttgggaggctgaggcagaactgcttaactcgggacgcggaggttgccattaaccgatgtcgagccactgcattccagcctgggtgacagaacgaggctcggtctcaaaaaagaaaaaagaaacactaatggaaatattggtgacactgcggaatgcaggcacttaagcacgtggactaccaccgacagcctttcatgagagcggacggctgatggaggctcgggtcacggcccttaacaatagcttactcgggtgactcggcatgtgccaccatcagagcggttggcattcatcattactctcagatgtccctaccaacacaggcttcatcagaggcagggcacgagagccgaggcttctccgcagttctactctaacatagtcgcagcttaggtcacgcatgcaccatatgtgcaatcccccaccatcctcaacttgtaggccctgcaaaggcgcgcgactggcttagaagtcccagtcaattcagggtgaccttagcagacaaaggctggagcgccccaaaacccgcaacattcgcaaagataaaacatacctcacaggagtcgactcctacctcgaaaagacagtatggtgcctgggctcctgtatataagagttcttttgatgacgtcacgacgcacgctcccggcagcgtccgcttcggctcctccccctaacctccctcaatcttcctctcatccagtatcaccttcttcccaccccttaagtccgccccttttccccgcccttcctcgccattgtgggcagagacatgaccgtccacgtgatgccgtgctcccgccctcctcccgactgaggaggaagagcagagaggggagggggcgcgaggcaaggaaagctctggggatgggggaagggggggcggtgtaaggctgagtgatttccttccggcacgtcgcccgctccgtgggagggggtgggggatttcacttccgggacggtgttccggcccattccggcccatttccacccccggaggtaggtgctgctccttgactggactcgggccccacaccccagtgccacttccctgcaccggggtcacctcgcccgccctccgccgcagcgcgctcctggggcgctcagctactttccttcaccccgcctccaggcaccgggcgaccttccacccccttggcccccggccgggctgatctgccggacccgccccctcgcggggcccctccctcaggaccccgggaagggcggccccctcccccaccgcagccgggacacacccagatacgcacacccacctcctggcagctccccgcccgccgccgcctggagccggtccctgggcgccgcccccttcctagttctcacctgagcgctggctcccccgcccgacgccttgtccccatcttctccgaagttcctcagtgacattttgccctttagccagttcccctctccccaggcttcctaacgcagaagaaagctgctcaagtgctggagtggccaaccccatgccgttcccaattctcccttttacagctctcacccctccagtgccgacggtagcgaaagactttcctccaggggcttcctcactggggaattgccggaaagagcaaacaaaaaaggcgctggtgtaggctccaaaataaacacatctgaattcatgatggcatcgacagaggctcttattggattaaaagtttcaaaacaaacaataacgctttggaaaaaggtcagattggctaaagttgattgttgaaaacagtgtatacacttccctatttaataagtgtgttgttaatgcggggcagtactgtgagcttggcagagtaagttcctgaagtttcaggtgtggtgtaactatgtaatatatagataagtgaacgcacattgggcttaagtaaatgtcttcctgttcggatttatacaaactattttcagtagttgaaactgtactttcaactatcttgtatacagcttcaggtttagtgtttcagccattttttaaaaatattttaatggaaaaatgttggcatacttggtaaatgctgtattttttcatcggatctggagaactaagtttcaggatggaagtattcatcaccacctcggaattgccaacttcgaatttggcagatttacccagctttcctaattttgacaactgaacttcacattctctgcatcttggttgaatcctggcacagctgtgggatttttcctagagtttgcttcacagccctataaccaaagtctttttgtggggggggctctgattcttaagcttagaaatattagcctacattcatgtgggatattagtccttttataaaataataaacataattcttgcagcaggtagtaaaatactaagaagagggatatcaagctatgtagaattgcatttattcagaaagctttcctcctccagagaaaagttgtaaagttatgagatgttatattcagtctgcaagtaccttatagttaacacttaaaagtccttccccctaccttctgttgaacttctgttttgatgttatataacttattagtaaggaaagcatggtcataacatgaatttttaggagtctaaagatcactttttagttttaactatgtcctcctgtgaaacttaaactgaaaaacctgttggtgattctgtttccacatctaaatataaggaaggtatttcttttatctggagattttgaaactttaccagataactatgtttaaatacttttgaaatggaaaccatccgggaagtaaaattataattattaatgagaatatggtttcttttttcagcagggttgaatgcaccctcaggcacgaccatggagaaaggtgggaacatacaattggagattcctgacttcagcaactctgtcctgagccatctaaaccagttgcgcatgcagggccgtctctgtgatattgtggtcaatgtgcaaggacaagcttttcgggctcacaaagtggtgctggctgccagctccccctatttccgggatcacatgtccttgaatgagatgagtacagtctccatttcagtcatcaagaaccctactgtttttgaacagctcctttctttctgttacacagggcggatatgcctgcaactggcagatatcatcagctacctaacagctgccagttttctgcaaatgcagcatattatagacaaatgtacacagatcctggagggcattcatttcaaaattaatgtggctgaggttgaagcagaattaagtcaaacaaggacaaagcatcaagagagacctccagagtctcacagggttacaccaaatctcaaccgctcccttagcccacgacataataccccaaagggaaaccggcgaggtcaggttagtgctgtgctggatatcagagagctaagtcctcctgaggagtccaccagccctcagatcattgaaccaagttctgatgtagagagccgggagcccattcttcggatcaaccgagcaggacagtggtatgtggagacaggagtggcggaccgtgggggtcggagtgatgatgaagttagagttcttggagcagtacacatcaaaactgaaaatctggaggagtggcttgggcctgagaatcagccttctggagaagatgggagtagtgcagaggaagtaacagccatggtgattgataccacaggccatggttctgtaggacaggaaaattatactttagggtcttcaggagccaaggtggctcggccaacaagcagtgaagttgacaggtaggtttggtttggtttggttttcccatgtaatggctattgtgtagacatcactaaagtgtcctctgtagtacagagagcattttccttacctgattttcttggtcaaaataagttgatgatggggaaactggaggtgtgccaaaagacttgcattcttatttttttaaaccaggaagctccattcctgaagtattcacaatgttgtgagaactgtggtaaagttagacacttccgtgaatcagaatagcatctgcagccacactaggataggatcagtaattgccagggcttcctcgggattcgaggcagggagccgatcatcagctgggaacctagcagcattgcccttccttggtgtgttatcacacaggtaggtggcctccaggagtctcactttcctttgtagcactgcttgcttttctttgcccccaactaccaaattagaggaagtatggtaccagcagtaattgttcttttcaaattagtaaaatagtaattctgaagaaaagcgttatggatatttttcatctcttttttcccttgtcacgtgatggtatcttccctgttttctttcatggatgactgctgctaccacaggcctgacaatctccctttttttcaccagtgctgctatgccccatgcctcacttttctcttttaatacattgtatttattagacatttctttttggtggaaataccatgggtttcagtcaattgagagaaagtctcaattgaaagaaatattactaatttagattggtaatatttgttctttttccctcttaaaaataaatttaaattgactatatgagcaaagaaaactaaaaaactattactttggtcttgagaaacaaatgtatcacagagattcagttagtgtatactgtatccacttcaggtggtctttttattttattttatttattttatttgagacggagtctcgctgtgtcgtccaggctggagtgcagtggtgcgatctcggctcactgcaagctctgcctcccaggttcacaccattcttctgcctcagcctcccgagtagctgggactacaggtccctgcccccatgctcagctaatttttgtgtgtgtgtttttagtagagatggggttttaccatgctagccaggatggtctcgatctcctgacctcgtgacccacctgcctcagcctcccagagtgctgggattacaggtgtgagccactgcgcccggccttattttattttatttttgagatgaagtctcactctgttgcccaggttagagtgcagtggtgcaatcttggctcactgcagcctctacctcttgggttcaggcgtttctcctgccactgtgcctggcttcaggtgatcttgatttgagtattgtcttcctgtgtccttattaaaataatcttgagcatagaacttgtcctcctatgttagaactgtatcagaagttctcgggtgatgggtgcaccaaaatctcacaaatcaccaaagaacttacttatgtaaccagataccacctgttccatgataacttatggaaataaaattttaaaaaaaactatcagaagtaatatcagggccaggtgtggtggctcacacctgtgatcccagcactttgggaggctgaggcaggtggatcacttgaggccaggactttgagaccagcctggccaacatggtgaatcccatctctactaaaaatacaaaaattagctgagcgtggtggcacgcacctgtagtctcagctactgggccagctgaggcaggagaatcgcttgaacccaggaagtggaggttgcagttagctgggatcacgccactgtactccagcctgggcaacagagcaagactctgtctcaaaaaaaaaaaaaaagtaatatcaatttcaatgcaaagattttttaatctccatgatctatatcaatagtctaaaatacagattattatgggaccttggggaagaaacagccaaaaacctggtaattacgtagaagaaacaaaattataggccccgttttaatttattcttttatggtctcccagtatttatataaggaagaaagcttatatttagctttagcttcaccagctcatatgttctatctgttatgtcattttgtgtttattaaatttactagggctaacctattatttcaaatcagattatgtattaactccacaaaactattcctcagttatttgttgcttggtttgttcccccttcctcagccatagaataaagaggggcgacatcaccatttttcaggttctttgatgctgcttttgtattagtcccctttatgttcctcttccaacagatttagcccctccggcagtgttgttcccttgacagagagacacagagccagaagtgagtctcctgggagaatggatgagcctaagcaacccagctcccaggtatggagttgtggatttagaactgctttggtggttggaggaattgctactgtgtatgaatagaaaataatgaaaaagaaaagatgtaggagaggtaacaatggccctgttaaagaaatactgtattttttttccctgagggtagcagaagtttaatattaaaattatacagagacatcaccagaaaggaaaattgcagactggtatttctaccaagcatagatgcaaatattttgaaaagaacattaacaaattaacactgatagctggtttaacattttaaaattaatcattgtaatctgtttcattaataaggaaaaagtgataaattacatgtggcaattttgataaatacagaaaagaacaattggctaaaactcttagcaaactagaaatacaagggaactggccgggcgcagtggctcgcgcctgtaatcccagcactttgggaggccgaggcaggtggatcacctgaggtccggagttcgagaccagcttgaccaacatggagaaaacccgtctctactaaaaatacaaaattacccaggcatggtggcacgtgcccgtgatcccaactactccagaggctgaggcaggacaatggcttgaacccgggaggcggaggttgctgtgagccgagatcacaccattgcactccagcctgggccacaagagtgaaactccgtctcaaaaaaaaaaaaaaaaaagaaatacaagggaactttcttaatctgattgaaagtatctatctaaaaaatctatagaaaacatcttttttttttttttgagacggagtctcgagtctcaccctgtcgcccaggctggagtgcatggagtgcagtggtgcaatctcggctcactgcaagctccacctcccgggttcacgccattctcctgcctcagcctcccaagtagctgggactacaggcacctgccaccacgcccggctaattatttgtatttttgagtagagacggggtttcaccgtgttagccagggtggtttcgatctcctgacctcatgatccgcctgcctcggcctcccaaaatgctgggattacaggtgtgagccactgcacccagccactgcacccagcccagaaaacatcttaatagtaaattattgaaagcttccttcgtgtgattgggaatgagacagaatgtctgctaccaccacttctacccagctttttatttgtagtcctagtcaatgcaataaagcaagaaatacaaatttatagcataaggatgacaaagcaagaaatagaacttttgttattagtagacagcctgacttgttatgtaaaaaatgcaaagttaaatactgtatttgattactttttttttaaaattcttgcttgtgggcgtgcaggaaaatacactttcgatgtcagcagagtttgggaaatataaaaaagtaagattgtggaactctttcctgattataataaccacactgtagacctgatagtaataaaaaataatcccagaaaaccacatacaggtaatttgcaggtaatttaggacctggaatcgaaagtctgattattatgtgtgtgtgtgtgtgtgtgtgtgtgtgtgtgtgtgtgtgtgtgcacgtgtgtactgtatatactatatgtagtatacacacactatgtatactatagtatgcacacactatatatactatatatactatgcgtagtatacacacacacacagttatgaagttactaatttgtagcattttatttatatatatatgtgtgcatatatatatatatttttttttttttttgaggcagtcttgctctgtcacccaggctggagtgcagtggtgtgatctcggctcgctgcaatctctgcctcctgggttcaaacggttctcctgcctcaacctcctgagtagctgggattacaggcgcccgccagcacacctagctaatttttgtatttttagtagatagcagggtttcaccatgtgggccaggctggtcttgaactcctgaactcaggtgatccacccacctcagcctccgaaagtgctgggattgcagatgtgagccaccgcgcccggcctgcattatatatttgtaaacaaattgcttatgcttttttttttctgagacagggtctcactctggttgaccaggttgcattgcactggtgcgatctcaactcactttagcctcaacctcctaggttcaggtgattctctcccctcagcctcctgagtagctggaaccacagatgcgcactaccatgcccagctgatttttttgtgtgtttttagtggaaatggcgttgcaccagtttgcccaggctggtctcaaactcttggactcaagcaatctgcctgcctcagcctcccaatttgctgggattacaggcgtgagccactgtgcccagctgcttacacatttttatgtgtgtttgctatttcatgtactgtatcttgtcatttattttcttcctgaatattttgttagactaacacattctagaaaggataggaatgatgggtttttttctattttctttgcaactctccttagcaactagtatgagtttgctcattttttttttctcacaggtctgattgaatgattttttttaaagctcatgaactcaccaagtagaagacaataaattgtgaacatttttgcctttaaaaagtaaacactgttgaattaagattacatagctcatgtttctagcctctgcattacactgatagtatcttgtctaatttttaactaaaccactgaattattattacttttttttttagatggagtctggctctgtcatccaggctggagtgcagtggcgcagccttggctcactgcaacctccacctctctggttcgagcaattctcctgtctcagcttcccgagtagctgggactacaggtgcatgctaccacgcccagctaatttttgtatttttagtagagacagggtttcaccatattggtcaggctggtctcaaactcctgacctcaggtaatccaaccgcctcagcctcccgaagtgctgggattacagacatgagccaccgtacccagcctaaaccactgaatatttattgtgtgcatggtatagtaatagccgtaagacattgttacaaactgtgttttttagttttgataagatgttagagaaaatattaggagcttggaggaaaggtaatttggctcatattattagggccctttttctcctcatctctcaaatatggtatgatagcaatgcagaggaggctgttgagcagatataggcgtgtgtcactaattgacagtatattctgagaaatgctagaccattttgtcattgtgcaaatatagagtatatttacacaaatttagatggtataacctactgcacacctagttcatatgatatatcccgttcctcctaggctgcaaacctgtatagcatgttactgtactgaatactgtaggcagttacaaagtaaatatttgtgtatctaaacataaattactgaatatagtaaatatttgtgtatctaaacatagaaacgatagtgtaaaaatattgtattataatcgtatggaagcacggttacatatgtggtccatcactgaccaaaatgttatgtggtacataactgtaaattcagtaatgagtcagacgttacaacttaatgggggcataagacagactaacaaatacacacaaaaaaactgtaagactctacagtataaacttgagtaatagtgttgtgggactaggattgtttaaaaggcaatggaataatgaaatcagtgtccacttaaggaaagtgttgtcaagattttctttcttttttttttttttttttttttttccgagacaggatctcactttgtcgtccaggctagagtgcagtggtatgatcatgtctcactgcagccttgccttccctggctcaagcagtcccctcacctcagctcctgagtagctgggaccactggcatgtgccaccacacccggttaatttttttgttttttgtagacacagggtttcactgtgttgcccaggctgatctcgaattcctgagctcagtagtggctcacgcctgtaatcccatcacttggaagaccaaggtgcagtcctcccaccttggtctcccaaggggtgagactacagatgtgagccaccacatacagcctcaaggatagggtaatatatatgccttaatggatatgaaagtttaatatggtaagtctactcaccagtttttttcctctactacagagaactaaaacagggcaaggacttacagtaagaatgaatattgatagatttgaagaacttcctgattatgggggtgattaaactggaacacactaataaagttactcttttacttgaaaacattctgtagctttttctatgacatgaaggttaatatacttggcctaatttttcaagtgatttacagtctttttaacccaacttttcccaccactcatcagcattcactgtctcaaacagatagactctccctgtgtcagaaccacattaaactatttctctttctgcatctaaagtctgaatgcctcatttcttttcaggtgtctgggttcagccaaggtccagctcctagttttatctgtcctaactgctccagtcctctttgatttttcctttttaggctactattatagcatggtacaatacaatttttcctaattctctagactcaatatatgttgttccttttttatttgcattagttttgtgtctcctgttaaactgaaatctccttgagagcagagaccacattttctttcctctttttgtttttgtcttttgacagttttagtaccaataagtctttgtttatgcattctattttcccagggaaaggagaagggaaggaaggggaaagagtcagcctatgttacagaatgattagaaaatgggcaaggaagtacccagtacagcacaatcaaccatcaaataaacacaccccagtgatggggtcaccaatgcccaaagaggctctgtctcctgcagttcaggaataaggggaagagaccaggaaaagaacagataggtacagactttcctaccctcccttccacctcataaattcaagatttcacataaagctttagcttctagtggtaaacattaagttacatttgttcatctcctgttaagcaatcttgtggctactttgacataaatttcttacacctgtataaaagttcttgagtgacttggatataaattcaacatttaggctgggcgcagtggctcatgcctataatcccagcactttgggaggctgagatgggcggatcacttgacatcaggagtgaggttcaagacaagcctggctaacatggtgaaaccccttctctaataaaaatacaaaaacattagccaggcatggtggcgggtgcctgtaatcccagatacttgggaggctgagacaggagaatcgtttgaacccgggaggtggaggttgcagtgagccgagaccatgccattgccctccagcccggggaacaagagcaaaactccatctcaaaaaaaaaaaaaaaaaatcagcatttattctctttcttggcttcctgaccccactttctacatggaaagcccccagttgcttctctctactttaggattaaagatgaggtaggtttaatccatccagaatccagcagtgtcttaagggtttagcatgaatcacatcaagaaaaatggtcttgactcaggagattggaaacaagggatgggggtttcctagcttcttcaggatttttgcatcaatcatttcagagttgtgtagttgccctaaaaattaaatatgtatatgcgtgggtgtgtaggttttcttttgggggtcgatggaaaagagggagaagggtaggagacaaatttttaggacagaagatctggcccaataggtaatagggaaaggagaaaactaaagaaaggatggttcaagatccccacttttaagaagagggctccgcagtctaatgtttcagattttttgccaggtacagaaccttctgtcaaagatgttttggctatttttctctcaatacaaaaagaagtttgtaaaccccaaaagaacacggagaagtagtttgcaactatcggctgggcgaggtggctcacacttgtaatcccagcactttgggaggcccaggtatgtggatcacctgaggtcatgagttcaagaccagcctggccaacatggtgaaaccccatctctactaaatataaaacattagccaggcatggtggtgggcacctgtaatctcagctactcgggaggctgcaacaggagaatcacttgaacctgggaggcagaggttgcagtgagccgagatgatgctactgcactccagcctgggcgacaaagcgagactgtctcaaaaaagaacatggagaaagaccagcacattatatttacacaaactaggccacctagcaatcaccaactctgaagtcctacaaagcccagacaaatacaataactaatggggtgtgggggaaagcatttaggggaaacaggaacacaggatcaggcacacactacccaagtgcattttattgcatttgagagaccacgttttcttatcttctttgtatctctgacattatcttcttagtgcctgattaatagttgttgttttatctctaagtaattctaagtaactaagtttacttagtagttgcccaataaataggcacctactaaatagggagttatttagttacttgtaaaatccttaattttggagatctttcaaaaacattaatacaccaaaccagatgactttttaaggcccttcagttaactttgggtctgcggttagtaactgaaaattagaatggtagaaggctttgaagtccatgtcaagaatctagactgatgtttgttttagaaaatatggaaacctttcatttatatggagttttcatataaattatatggagtaattcattaagaaatagctattgaaccaagcactgatcaaattcctagatatttggcagtgcagaatgtccctgtgcttacaacagagtttacagtctaataggtaattgtcaagtgagaggaatgaaataatccacctcttgacaacagagagaaccatgaggctagccgtttttgcctttgcttctttttaagtttaaaacaataaaactacaaaaagtatattgctgccattgacaaggacccaatctgcattttgtggtgtttgttcttctattgcaacttcactgcagtaattttttggatgagactgatcataatgtgtgatgtttgtgctcacagtttatcactgattactaaaatgcatttactttctgcatgtggataatactggtatgatattaccttccttagagttggggagatttctttttttctcttttttttttttaattatgctttaagttctagggtacatgtgcacaacgtgcaggtttgttacatatgtatacatgtgccatgttggtgtgctgcacccgttaacttgtcatttacattaggtatatctcctaatgctatccctcccccctcctcccaccccacgacaggccccagtgtgtgatgttccccaccctgtgtccaagtgttctcattgttcaattcccacctatgagtgagaacatgaggtgtttggttttccgtccttgtgatagtttgctcagaatgatggtttccaccttcatccatgtccctacaaaggacatgaactcatccttttttatggctgcatagtattccatggtgtatatgtgccacattttcttaatccagtctatcattgtggacatttggattggttccaagtctttgctattgtgaacagtgtcgcaataaacataacgtgtgcatgtgtctttatagcagcatgatttataatcctttgggtatatacccagtaatgggattgctgagtcaaatggtatttctagttctggatccttgaggaattgccacactgtcttccacaatggttgaactagtttacagtcccaccaacagtgcaaaagtgttcctatttctccacatcctctccagcacctgttgtttcctgacttttcaatgatcgccattctaactggtgtgagatggtatctcattgtggttttgatttgcatttctctgatggccagtgatggtgagcattttttcatgtgtctgttggcttcataaatgtcttcttttgagaagtgtctgttcggccgggcgtggtggctcacacctgcaatcccagcactttgggaggccgaggcgggcggatcacaaggtcaggagatcaagaccatcctggctaacacggtgaaaccctgtctctactaaaaacacaaaatattagccgggtgtggtggcaagcgcctgtagtcccagctactcaggaggctaaggcaggagaatggcgtgaacccgggaggcagagcttgcagtgagctgacatcacaccaccgcactccagcctgggtgacagaggaagactctgtctcaaaaaaaaaaagagaagtatctattcatatcctttgcccactttttgctggggttgtttgattttttcttgtaaatttgtttaagttctttgtaaattctggatattagccctttgtcggatgggtagattgtaaaaattttctcccattctataggttgcctattcactctgatggtagtttcttttttttttttttttttttttgagacagagtctggctctgtcgtccaggctggagtgcagtggcgcaatctctgctcactgcaagctctgcctcccaggttcacgccattctcttgcctcagcctcccgagtagctgggactacaggcacccgccaccacgcccagctaatttttgtatttttagtagagacagggtttcaccatattagccaggatggtctcgatctgctgacctcatgattcgcccacctcggcctcccaaagtgctaggattacaggcatgagccactgtgcccagccctgatggtagtttcttttgctgtgcagaagctctttagtttaattagatcccgtttgtctattttggcttttgttgccattgcttttggtgttttagtcatgatgtccttgcccatgcccatgccctgaatggtattgcctaggttttcttctagggtttttatggttttaggtctaacatttaagtctttaatccatcttgaattaatttttgtataaggtgtaaggaagggatccagtttcagctttctacataaggctagccagttttcccagcaccatttattaaataggaaatcctttcagagttagggagatttcttagggtattgttaccctcaagattataaataatatgaatttgtaatgtttaataatagctaacatttattcagtactttagtgtattaactcattcaatgctcaaagcaactagtgaggcaaatgctattactatattcactttacaggtgaggaaactgaggaatagaagtgttaactaacctgctccaagtcacacaataaatagaactcagatttgaacacaggttccagcatctttaattgctatgtaatattatgcattcatcgcataatattttgggaccattgaaggtcctaaaagttaccattgtatttagaaaaaagagtactgttggctgggcctggtggctcaagcctgtaatcccagcactttgggaggccaaggcgggcagatcacctgaggtcgggagttcgagatcagcctgaccaacacagagaaacgccatctctactgaaaatacaaaaaattagccaggcatggtggtgcgttctgtaattccggctactcaggaggctgaggcaggagaattgcttgaacccgggaggcggaggttgtgatgagccgagattgcactccagcctgggcaaaaagagcgaaactccgtctcaaaaaaaagaaaagtgtactgttatcatgttcaattctcgtgagaatcctctaaagctggcaaatcatgtgataacctttgtaccttatggatgagaagacagccttagagaagttattctgttttgtccctggtcacccaagacctttagtgggatgattcctcattctttatgtgaactcagttttttttatccagggaaatgaagcagaaagaaatattaatatgaaacaaataaaataatcttaaaacctcagtcttagtattcaacccttgactttacatactgcttcccaaacctgttgagaactgcctctattggaaaggctgaatagcaccatcagcataggaagggacaaaacacatttttagaaattaaaagggcacaagatcttctatagtgtctatcttaggggaaaaagtaccggcacaatattaattgctaactagatgaatcttgctccagttactccagagtcaactttgacattttcttctctttgcattggtactttattctttgttaaacatataattccctcctacatatttaaaaaggtttttattcctctaatataatgacttcagaagtcagtcattattaactcaggttaaaaaaataatttctgattgatttttttaatacagaattttgaacaaaaagcatttctaaatccaaagattttttttttttttttgaggtggggtcttgctttgtcacccagcctggagtgcagtggcctgatgacagcttattgcagccttggcttcccaggctcaaatgatcctcacacctcagccttcccaaggagctgggactacatgtgcgcacctccacacccagctaattttttattgttattttttgtacaggtggggtcttgctatattgcccaggctggtctcaaactcctaggctcaagttattctcccacctcagcctcccaaagtgctgggattataggcataagccaccacatctggccttaaatccaagatttttaagtaatttattgaaaggaatatgttcatactgcctcccagttttcggataaaagaaacccatgccctcagacaatttactctgaagtcagttaaactttagtagtctttagagtgaaaataatatgttcatatgatactgaaatattttacataaaaaggaatattgtcacctacaaattgtatacatttttataaagctagctactgctagattaaaatgtggtattaatgataatgtcacaatttataatatgttgccattatatattctatactatctgatatagtaaatggtagccattagccacttgtcacatgtggctatttaaatttaaattgtaattaactgaaagcacttaaaattgtaaaaattactcagttgtattagccatattacaaatactcaatagcaacaggtggctagtggctactgtaatgaatggggtagagcattttcatcatcattgatagttctggctgggcgtcgtggcttacacgtgtaatcctggcactttgggagatcgaggtgggtagattgccaaagtccaggaattcagaaccagcctgggcaacatggcaaagcctcgtctctgcaaaaagtacaaaaattatctgggagtggtggtgcgtgctggtggtcccagctactcaggaggctgaggtgggaggatcatctgatcctgaggaggtctaggctgtagtgagccgtgatcacaccactgcactccagcctgagtgagagaccctgtctcaaaacaaaaacaaaaacagatagttctgttagaccagcactgcctaagtatttgattgtctagaatataattgtaagattaggatccagggtatagtataagtgggctcagtttctcctcacattactgtaaaatagtacattcagcaggggtttaataagcatccagtttgtcagccagaaagtaactttactgtgttgttcttttatagtaatggaatagagtagtctcaattttttaaaaattattatggtaatatctttactttttggtaataattttctgtttgatccgccactaaaaaggtacatatatcttagtaacaagtaaaaatagatttgattgcttttaatatgtatgcttaataatatttgttctttcttggttattttccttacctggtacaggtagaagagtcagcaatgatgggagtaagtggctatgtggagtatctccgagagcaggaagtatctgagcggtggttccggtacaaccctcgtctcacctgcatctattgcgccaaatctttcaaccagaagggaagcctggaccgccacatgcgcctacacatggggatcacaccattcgtctgccgcatgtgtggcaagaagtatacccggaaagatcagctggagtatcatatccgcaagcacacaggcaacaagccctttcactgtcatgtctgtggcaaaagtttccccttccaggccatcttgaatcagcactttcgcaaaaaccaccctggctgtatacccctggaggggcctcacagcatctcccctgaaacaactgtcacatctcgaggacaagctgaggaagagtcaccttcacaggaagagacagttgctcctggggaagctgtccagggctctgtgtccaccactgggccagactgaaacatccagggggagggggctgaccctcttcccctatgagccataagcagccagcatcagagccatgggctgatacttagattcacaaaatgccacatcactaggccagaagatgctcccaagatgttgccaaactggaggatcagcaacttacacaaaagcactaaaggctcctcccttcttattgcccgcctcacactttggaaaataatcaagcaaatcaactttctaattcagggatcaacagccttggtttgttaactttataagaaaaaaggttttttaacaaaacgatgatgataaatggtcatttatctatcagtcatgtttgaacactgtactttggtccatatcatcttggtggctataattgcccggatctaaaaaatgcagcaggagcctcaaccatccgaagcagccaaccgcaagagaggaggtagtcatgatggtgatgaggaggagaaatttctcctcttccttccctggcataacatgcatttttgtgtttcaagaaaaaaatgaatactggtggttcttattttgaaaggttaggctttatctttcccctgactaggcatctaatactttgcctggttatttcatataatcagccatcttgaagcagtattctagtggacaacatcacctgaagcacttggcaactgggagtgaaatgagcagcaaagtgtatgcaataggtactgctacatttggggggcttgagtgttgtgttgaggaagaggagagcagggagggaagtgtttttatgttttgcaaatatcaaacagcacagagccgttctgcaacttcctgactggtatttgtaaaccatagtgctacacatccttgggtaatggctctagttcaggtgaattaatgtgttaggctgactaccaaagtttcatctagtctctttggctcctattttcacgttcagcaatattgtaatcaaaaatgtcactttccagtgaaatgagcctggattgtatttttaaatccacaggtctccatatttgataacttttatatgaagttttaaacatgttttttctgcagtattgtggttgaagaaattcaacactatggttcttactgcaaccacaatttcatttccttatacatatgtaatagtttatattttcaggcatatagaaggacctcacttaaaactatgtctcgggtctgcaaacctagtaattcataaaccaaccatcagcaaaccatagctggtgactccaagagctttgctttttaataatatactacagggcacttatcagaaaacatcatgcagaatcatgttgcaataaatgatcaaaggatcaattttggtcaggtttggttacttagtcattcctaagatttttaaaacttcaagggacccttttagtaattctgggtatttctaagattcttaatccagcactgagagaaagaacttagcaaacatgtagagctttggataccccgtctttcatgaagtgagagaaggaggaatattaagggatgccggcaaatagatgcttataacttacagtgcaagttgaaaaatctctagcttctgttgacggagcactagttgttggggttcttttaagtatgtaatggtttaagaaattgtttcagtgcagaggcatagatgactgtaaaagagatttggcagagggacaggttgtacctgcactggtgaaccatctgtgagaatgttagtcatgtgctcctttcctgagattgctttgtggtatgtgaaaaggtgggtagaaaagaaagaaatctctttgagataagaaattagaatgcaaagggtagatcttaagcaatctgagaattgtacatgtacataaagctgcaccctctcacaagagaaaggttattttatcttctgaaaaagcatagaaatgcatcttttatgggaagataatgatgctaccatttaataagagcctacccttaaaggcagcattgaaactgtattttgtctttagaagacatagactggtgcatcctccgctttagttagacaacagcatgataaggaaaaaactgtcttctaaagccatctttagggactggctgtgctctgtggcatagaaaaggtaaagttgaattagccaaaaatccttagggaaacaactggtaataaggttttcagtggacagattttgtcattactaaataggcagtgaggtgagaagtacagattatgctgctttggatggagcctttaagcctaccaaaaaacttttaagtccatcctacttttgagaaatagtatgctagaaagttctgtttttctttttcttcttttttatattttttagagactgtgtcttcctcttgtcacccaaaccagagtgcagtggtgcaatcatagctcactgtaatcttgaactcctaggctcaagtgattgacctgcctcagcctccaggtagctaggactataggcatgcaccaccatgtctagctaatttttaaatttttttgtagagacggtgtctctacaaaatttgcctaggttggtcttgaactcctggcctcaagtaatcctaccaccttgacctcccgaagtgctaggattacaggcatgagccagtgaacttggcctggagaaagaattctttgttgctttgttagtttcttagattatatgtgagaaaatggagctttttaaactattaccaaattttaaaggtgaagtgcagtaatttctgtaaagagaaactttgcagcatttgtcaattctccttccagggttagcaacaaacaaatgaggtagggactatctcattcatgtggaaatgctatgaatgtttggtgggtttcccctcccttttcttttcattcactttaaatagccttttcctatattgatactgtgaatagggtgcttcctggtcatctaggaccactttagcacaatcatgtttgctggttctctcaattggcctagccagagccacaaaattcatgaaaatttaaggcaggctagcttttaaacaaattaaaacttctgaaaacaatttcagctttttcgttaaaagagatgttgttattctaaataactgtccaagactcttacccacatacactgtgacattgtcctagttcttagctaacaacacattggtcataggagttactgatgttctatctacattaatgaacagctattggtgtatgcacagaggatacctcttaaggatgtactaaatggactttgtttggttgatgctgaaaattaattaccaaatcttaacttgcacgtgttaccttgtgaagggaactgcattagcaatgagagctacatcatcatgaagtactttaatgccatgaaattgcaaacactgggactgttttcatttattgagtggcacttagtagcaaaggagctatccagtattctcagcaaagaagagagacggaagtatattaatctattttcatactaagatgttcctttattctgtctgaactctaataccagtataaaatatagcattggcatgaacagttaatgctgtacttaggcagaaaggctccttctaatgacttgttctctctttactcagaaccgtatttacctctgaaccaagttgaattttattttatccaagttgcaaactaccccatgccatttttattataatagagggttaaatctaatctcaaatacataaaggtaaattagttcatagaggataaagtttgggaatgaagagagcagttaaggaaaattttattttttgtcattttttaaatgtttccagttccctctacatcagtgaaacagggttttccaaagatggtttgaagatagaaaaaactttttccccccgacttcatagttgacatctggtattggttggaattggtctggtggcagagtgaagtagggaacttcatttttttcttttttttcttaaaggcagggtctcactatgttgcccaggctggtctcaaactcctgggctcaagtggtcctccttcctcagcctcctgaggagctgggactacaggcgtgtgaccacacctggctgtaaatgtcattcttaatagctgaataatctttggtcaagaagtaacttttccagagttttagctgttacttgacattaattgggtttcttttaactggtgaaaactgtatttattttgtttgaccagactgtctaacttaaatgaaagcaatggataatggaaaggaaactgaacaaagacaaaagtcttcttcatcatagtgaaaggcatttaatcaggaagagttggaatcctggaagtttttctttttttcaggtacaagaggcatgatttttttctcttcctaaaatgtccttccccttatctgtgtacttattagttcaaggaataacaaatgagtcttaattgaacttagtctttggaaattgagctctttatttaggttatatgtgaaagagtttaaaatattgaaatactttggttgctaagcagatttagaaaagcaacaagcaattgtcgggcaaatccctaggtttgagaagatgtcctcagcaaaatatacccttaggacttacggaattagatcagggttcagcaaacagtagtttccaggccaaatgctgaggctacttgcttgtgtaaagaaaattataatggaatagggccacacttacttgtttaggtattgtttatgccttctttctactacaatggcaaagttgagtacttgtgacaaagatcacgtggctacaaagcttgaaaatatttactgtctggtacttgttagaaaaaatttgccaactccaagaaagaattacctcctaaagttgttactcatgacattttgcctttataatagtttggttgaagttttaaattcatgttgtcacatatacatgttttcttgaaagagtttgccaactttttctagatcctcttatcataactctttttgtgctccttcatgatttttttgtgctccttcatgattcccattactttaaaagcatttagaattggcctgttgtttgtccttgtcttaatggtgccggtattttaaagtttagttgtaagtaagttttgccattcctctgagttaacttgaactggtttgcataatggtgacaagaatgaattttttcccaagtggattaaaaactaatttcattatgaagaagtattttgattcatatccaaagtactgtttttctggattagaacccctaccttttccctttgcaatgtatcttaattttaacttctttaaacttactctgttccatgtagagcagtaaaaagccaagtttttcttccttttttcctggatgttttgaaacataatgaaacatctgaggatttcaaattctttttagacctatcttcccatttctgttattgtctataattcttctaaatacatattggaccattaacatgtttgctttgtgaatgttcattcttagtgttcagatagcctacttatactcgatgtgggaaaaatgggaaatgttagggggttcataaacagaaatccttgcaggaagccgggtgtgacagcagacacctataatcccagctacttgggagactgagctgagaggcccacttgaggccaggaatttaaggaccagcctgggcaacatagaccttatctctaaaacaaaaaaaaatccttgcaagaagagagaataattgcttcccatttggaaatgatatagggacttttgaattagatctatcttgacaaagttttctaggccatgctgatacagtatagggagtttgaatctgttgtgagcgctgtcaacatagacaaagttcaagtgagtaactagctttctataatagggactctcttcactaggtattttaaagttgctgctttctaattggatattaggaagttttatatgatataccctctgagtaatagataatcctcatctataaagttccagaatatttgcctaggttagatctcccctggcttagagcagttatacctatagtaacagtaggtttttgagattttggagtattacttttctgattaacctaggattctgattaacctggaaggtgggacttgtgaaagaaattggattttgttagcccagtgaatcatctgcatcccactctatttgaggtcttggtaatagatgtcaatttaaatatgcatctattgaaagcaatggagttttccaagcattatgacttccttgataattttcagtcttatcttttttcgtattttctagtctctttccctgtctttagtcttcttcctcttaaatggtgcttttcccagggccagtctttctactttctaagcaagcaggcttttttgttcaggataagccagagttagatattatgaatactttgaaacatctgaatatgttacattccaaagtatgtaattattgatagtagtatcaaaacctggaagatattggtgcagattattcagttttgctgtgtaggcaggctgtctttctcctcaactgtgacacagcagtgacttgagaaggcaaatattacttgaaacccccattatctttatagagggtacgtatataaattttcttacctgacatttttaccattatcaatatatcagtagctcacatcttaacatagaagaagcccattagctcaaatactggaaacttcaaacaaggaaataaattacaaaagcaaagcagttaatgaaaaaaacttgtctattgcctgcgtctttcatgtctactcaataggtcctgttgaggaggctagaatacaccatccggttaagaaaggggttgttttgttttgtttaagacagagtcttggtctgtcttccaggctggagtgcagtggctcaatcttggctcactgcaatctccacctccttggttcaagcaattcttgtgcctcagcctcccaaatagctgagattacaggcgtgtgccaccatgcccagctaatttttgtatttttagtagagatggggtttcaccatgttggccaggctggtcgtgaactcctggcctcaattgatcctcctgcttcggcctcccaaagtgctggacttagaggcatgaaccactgcacccagccccatttaagagagttttatattcagcatctcatatggcctacaccatgattttaatatactgtgaatcttaggatttcagttaatccataatgccaggagttaaggtatttcatgggaacatgtttcctcttctatgaaatcacctgtctgcagtgataggtaatgtataagagaatgtttcattaagtaaatattaagtactttttgataccagacaacatgcttgggatttgtataataaaactggttttagacatagtttagacatgatgtgtcttcctatacttgagagtcctaagcccacttggttggcgtctgggatgtattgcttttgaaaagcctgcactttttactgtagagataaaagatcaaaaaggggacagaattagctttattaagtgctttatcgtcataactgtggttaagacaataatactatgaggtaataacagtaatgttaaaaataactaactttttttgaatgcttactatgtgccaggcacagttctatgtgcttcacattgattaactcatctaatccttatgacaatcccatgagggtagataacatcctcattttagatgggaagaaacagacacaactgactcaggctaacactagagttgcctctagtaggtgtaattatatcatattttatagatgaggaaactgatgaacccaaggttacataactggtaaattacagagccaatatttaccaatcttgattccaaagcccagactatctgcatgatgtcatattgactccatttacttatcaagagttgaagttgactggaatatacagtagccaggaacagtactgctttttgtgaatgtgtaattcaagagtaagtgattagaaggttcttcaaaagctgatgcagttgatctctgagcagagttgaatagtgaatattttcagtggatattgcccactgattcaagggagtcacccgtgtggttaggtctaatagtgagtgaggtactatcaaggcaaaaattgaaagagttccagttacctattgctgtgtaacaaacttaattaaaattaagtaattttaattacttaaaatcaaccatttcctatatcatggttttgtgaatcagaaaatccaggaagggcttgtctgggcaattctcctccctgtgacaacgactcaggtcacctggtggtattcagcaggtggttagacaagtctggaaggagtgtccaagatgatcgatcttacatacctgacactttggtggggagactagaaggatggactcagcaggtctcctctttctctccatgaagtctaaggactctccatgtgttctcttcatcaaggtagtcagatttactacgaggacagctaaggcctctgaaaggctgggcagaagaatctagtcaacttaaaggccaggcctagaattatcatacagccaccactgtactcttggtcgaagaacttaatggtaagatgacagcaagaatgaagggggaaaaaagaactcaatggtcagcccaaatttaaggagagaagaaataccctaccactttatggaaggcatgtccaggacttggggctatttttaatgtgttaatgttttttttgttttgttttgttttttgtcttgactctttggtgtttattcatcagttgtttgtgctgtagaaaccatttattatgtctaccatgggtcactaaaggagctagaaggagaatgagacaaatatctggagcatacttcatttgctgccctctccctccaagtttcatttatcttatagcaaaattttcattttgtactgtgttccaagttgtgaacatttgcctggttttgctctgaagccacggtaactgcatgcggagctagaaatactctagagggagtaaaaagcttacattttttttgtttgttttttgttttaggacagagtttcactctgtcacccaggctggagtgcagtggtgcaatcacagctcactgcagcctcaacctcctggactcaagcaatcctcctacctcatcctcccaagtagctgggactccagacgtgtgccactacacctggctaatttttgtgtatttttagagacgggatctcaccatgttgcctgggctggtcttgaactcctggactcaagagatccaccttcctcggcctcctgaagtgctgggattacaggcatgagccaacgtgcctggcctggaaagcttactattaaataatttgatttcttggagatatcagttgtattttaagtttacaaataggtgaatactcttgtggtatggaaacattgcatggctgctgaatctctttcaacaggagtttctattgggtggctacatggatcatattcttgagatagtgaaaagttttacctacttatcttaatcccattctacctctacacctccagcatgattttgtgctcgaagatgaatcaattcctttcattcttgttacctttcatacaggaaaattcatcgcccaattttatatgttgttaatcttttaaaattggcagttgttaccagcctctctcatttaaaataacagatcattgaagttttttgatttttggttagatgtgtcagatttaggatgccttatttaaactcgtgctgtcttactagactgttcctgctctgagaagaaatatggacagagaatgaatttcattgtccatattgatgaaccccaaatcaatacacttcttaagaaaggtttgagattatccagtccatgtgcaatgaatccttggagcattagctgtgtggccttcctactgataatctgcagttatcacagtaaagagatctctgttcctaggtcaggccttagcaattacaaatacaggaaataaaggggtactcaatgctgaagacttaattttgggtacctacaaagtcctgggaagggaaaaagaagaccttggcatttgtatttgcataaccagagatggaatgtttgaggcttttaggcataaagattaattagattttatcatataaagattagggcaaattatttttttttccagttcattcttaacatgttaagggacaaattttaatgaataaaaatttaaaggccttaaaactttcttttggattcacatttccactctggtataatccactctggtgtagtctgccctttatgacagagaaagcctttgaaaatattgtcccagggaatgaaaaatcttaatgatgatctatggaaatgtctctcattctctattacagccctttgggccctcctatagattctctgtgaatttaagtttgaaatcatttggtgtttgcatgaaaaataattcttactattcatttaaataattcttaaatgtggtcttaaattgcaagagagaacaaagccagaaaaaggggaaccttgtagattgaccaaatatttattctttattttcagca

SEQ ID NO: 457 - DNA, 671835 bp, Homo sapiens
aattacatccttatggtatcattgaacttgtttccctgtcatctgtatttcctgtaactggtatttagatccaaaggtttaaacagattcaaatttgattttttttttggcaagaatacttcataggtggttgttatgtacttccatcagaaggcctataatgtctggttgcctcgctttttgtgatattagcagtcattgatgatcattgccagaatttattttaataaaggtttcaaaatggtgataaattctatccttcatttactggctgcaatacttttgtaaagagactccgcttcttaatatttagttaccctgaaatacattgcatacaaaaagcaggatgaatgcttgctcttccctccttttacttactggttatcaaaatatagctggtttcttaatgttttccataagtgactaatgagtttttaaaaaaatgttatttattatttatgattatttcaatagcttttggggtacaagtggtttttgttacatggatgaactatatagaggcgaattctgagatttcagtgcacctgtgtgagttagtgtacattgcacctagtgtgtagtttttatctctaggccccctcccagcctctgctgtctgaatctctgaagtccattatatcactctgtatgcctttggatactcatagcttagctcccgcttataagtgagatcatacagtttttggtttttccactcctgtgttacttcacttagaataacggcctccagctccatccaagttgctgcaaaagatattatttcattgattttaatggctgaatagtatttcatggtgtacgtacaccacattttctttatccactcattagctgatggacagttagggtggttccacatctttgcagttgtgaactgtgctgctctaaacatacatgcgcaagtgtctttttcatttaatgacttattttcctttggatagatacccagtagtgagactgctggatcaaatggcagatctactttaagctctttaaagaatctccatactgctttccgtagaggttgtactaatttacattccctccagcagtgtctaagtgttctcgtttccccacatccatgtcaacatctattgttttttcacttatccataatggccattctcgcaggaataaggtggtatttcattgtgttttttttttttctttttttcttttttgaggcagagtcttgctctgtcacctacactggagtgcagtggcaccatctcagctcactgcaacctctgcctcctgggttcaatcgattctcttgcctcagcctcccgagtggttgggattacaggtgcctgccatcatgcctggctaatttttgtatattttggtagagacggggtttcaccatgttggtcaggctggtctcgaactcctgacctcaggtgtccacctgcctcggcctcccaaagtgctgggattacaggtgtgagccaccgtgcccggcctcattgtggttttaatttgcatttccctgacgaatagtgatgttgagtattttttcatatgtttgctggccatccatatattttcttttgagaaatgtctattcatgccctttgcccacttttaaataggattatttgttttaaaaatattattacgaactcatagattcaaacacagttactatttttcatccattgccttattattattattattttatttttctagatttaggggtacaagtgcagtcatgttacatggatatagtgtgtggtgatagagtctgggcttttagtgtattcattgttcaaatagtgtatgtcgtcaaattctcctctgtgagttggaccagcagtgacagtgccagtttctcccacagttttgtcaacagtgtgttgcctagcttttggatttttgctgatttaataggtaaggaataatggagtgaaactgagtaccttttcatatatttcaaggtttttgcatgtcttttctttcacagtctttgaatgtttgcttatggtacttttagacttatttttctcaatttttaagagttctctatgtataagggatatttgcatgaatgttccatgtatgcttcaaaagaaagcatattctctaatattgggttgcagagtttgacagatattcatattcataaaaacttccttatgattattttggttaggtcttctacagccttacttttgtttccttgatttgttatgaactgagagtggtgagttaaaactgctgttattggcatgctccaatttgtctttgcacctcctggtttctgctttatgacacatctgctttcttattgggtgcatagttatcgatatctgttatatcttcattgtgaataatctcctttagtgctgtaaagtgtccttccttgtcctctttcatgcctttggccctgaattctaacttatctggtgtgaggatggtgattcctgttttcttgtttgcgtatgcctgttattcctttgctttgctttgctttagatttcaatacatggtatttaagccattttgaatcactttgtttaggtatgcctcttgtgatagcacagagtcaagttttattttgtgagataatctgaacatctttataattaaacctaattatatttaataatatagtggctacgtttgttttcaggtctgtcatattattttgtattgtatttacttggtgcatttgtcatatttactggttctttcacagtgtgtttttttggagtacttaaaaatatatgtattagtatttggcaaaatttatattttcttctagtaattacttttatattaatatatttataaatgtccttagtcctcttttttctacttaggttctaactgttttattaactggttctcaaccagtgcatctgttgatcaatgactttcaacagaggtggggggagtgtatccattttattccccagaagacactaggcaatgtctggaagtatttttggttgtcacaactgggagaggtgtgcatctattgggcagaggccagggatgccgctaaacatcctataacacacaggacagccaggccctacaacaaaaaaatcatctggcccaaaatgtccatactgccaagtttgggaaacctttagatggtctttgactcccacctgttatctgtgtggcaacgagtggggtcactttactttcccctttctctttctcttcccattaaaaaatcatgttatctccactttgtcagaacctaggacatttacatactattcttcggtctttattttcatcttcattgtagatttcaatatgcagttttcaattcttaacatcagtcctgttgttgaaattccttaactatcatttggttggttaaaacttgtcctcccagtagattcttcaggaagggctcctgaggaaaatattcctgaattcttgaatattcattactgtgttctcattgtcttgatgcataaaaatcactgcatataaaattcttggtttgtactttctttccttcagttttgctttgtgtgtggctgttaagaaatctgatagcaacctaatttaatctggaggctcagagaatgttttatttttctttaaaatcttacagtttgactggggtttgtcttggagctgagcattgcaggataattttcccaggaacctggtggacctttcaatatatatgttaagtttttcttttagttctaaatagttttcctagagtataattttaaatattaattctgtctaatttatttaggttttcttctttagggactcctattgtacataaattggcttgctttgcctgtcttttatctttctttctttctttctttctttttctttcttttttttctttctcttctttctttcctctttttctctttccttccttccttctttctttccttctttctttatttttctttttctttttttttgagctgggggtctcgcttttttgcccaggctggagtgcagtggcacaatctcagctcagtgcaacctccacctctcgagttcaagcgattctcctgcctcactctcccagtagctgggactacaggcacgtgccaccatgcttggctaatttttgtattttttggtagaactggggttttgccattttggccaggctggtcttgaactcctggcctcaagtgatccacccgcctgccttggcctcccaaagtgcccttttatcactttcagtctcatattttttagctctttacataacttctgttttcttagatatttaagttttcttcctgtatgtgctttattatactttctttctgtatgttacccattgaacactttgcactttgctcttcatttctgagatatgcttgttcttttattgtaagctgtcatttatttcttcctgttttatgtctatttgtatcctgagttttcaagcttctggtttgtattacatgttaatatttacaattgcttgattatatttaattaatgttgggatgctttaaaaaaagttttcctttcctttattttttaggggagtattttaattagttacaatgttttcttttctttgctttttttctcttttccactcttagatatatacccaagttacaatgtctttactactcattttctgttttattctttttttttttttttttttttttttattgatcattcttgggtgtttctcgcagaggtggatttggcagggtcataggacaatagtggagggaaggtcagcagataaacaagtgaacaaaggtctctggttttcctaggcagaggaccctgcggccttccgcagtgtttgtgtccctgggtacttgagattagggagtggtgatgactcttaacgagcatgctgccttcaagcatctgtttaacaaagcacatcttgcaccgcccttaatccatttaaccctgagtggacacagcacatgtttcagagagcacagggttggagtaaggtcatagatcaacaggatcccaaggcagaagaatttttcttagtacagaacaaaatgaaaagtctcccatgtctacttctttctacacagacacagcaaccatctgatttctcaatcttttccccacctttcccccttttctattccacaaaaccgccattgtcatcatggcccgttctcaatgagctgttgggtacacctcccagacggggtggtggccgggcagaggggctcctcacttcccagaaggggcggccgggcagaggtgccccccacctcccggacggggcggctggccgggcaggggctgacccccccccccccacctccctccgggacggggcggctggctgggcgggggctgaccctcacctccctcccagacggggtggctgccgggcggagacattcctcacttcccagatggggtggctgccgggcggaggggctcctcacttctcagacggggcagctgctgggcagaggggctcctcacttctcagacggggcggccaggtggagatgctcctcacctcctagacggggtcgcggccgggcagaggcactcctcacatcccagacagggcggcggggcagaggcactccccacatctcagacgatgggcggccaggcagagacgctcctcacttcctagatgggatggcgccgggaagaggcgctcctcacttcccagactgggcagccaggcagaggggctcctcacatcccagacgatggacggccaggcagagacgctcctcacttcccagacggggtggcagccgggcagaggctgcaatctcggcactttgggaggccaagacaggctgctgggaggtggaggttgtagcgagccgagatcacgccactgcactccagcctgggcaccattgagcactgagtgaacgagactctgtctgcaatcccggcacctcgggaggccgaggctggcggatcactcgcggttaggagctggagaccagcccggccaacacagcgaaaccccgtctccaccaaaaaaatacgaaaaccagtcaggcgtggcggtgcgcgcctgcaatcgcaggcactcggcaggctgaggcaggggaatcaggcagggaggttgcagtgagctgagatggcagcagtacagtccagcttcggctgggcatcagagggagaccgtggaaagagagggagagggagaccgtggggagagggagagggagaccgtggggagagggagagggagagagagagggagagggagagggagagggagagagagagggagagggagagggagagggagagggagagctgttttattcttatagaagctttgaagatatgtccatgaaccctttttgtccgtgagaaaagaaatgtgtaggattttcctagaccagcaataacaggtgcttctgctggagtgagggaatggagtggtgttagtgtttatttgatttcttagttcagggacactctgttctcttggtataggtagatcttgtggggtgcagcttgtctcacaggcattgtagtttgggcttgccccctctatctatgccctacggcttatgaaaacttgtcctggcctgatgtttggaagtctttccccactctatgtggtgtccagcaatctgctcttttcttcctttcttttttctcctttatttttagtagggacagagttttgccatgttggccaggatggtctcgaactcctggcctcaagtgatccaccagccttggcctcccaaagtgctgggattacaggcatgagccactgtgcccagcccatctgctattttcttataaagtgtttgcatatttgcatgctggtatgaacttgtcttctgaacttagacttaatatttgctcccttgctctcttgattcccaatccaaccggagcttgtgttggacaacagtccaattcctgaccctgaatccctgccaagctacctgaggttccagtgggaggactacacccaccctgctgattccctgtgtccaggagagaaatgccaggcagcgtgtccaagatggaatgcctttattaaaactgggggccaggcgcggtggctcacgcctgtaatcccagcactttgggaggctgaggcgggtggatcacctgaggttaggagttcgagaccagcctggccaacatgctgaaaccccgtttctacaaaaaaaaaaaaatacaaaaattagccaggcatggtggcgcgtgcctgtaatcccacctactccggtggctgaggcaggaaaatcacttgaacccgggaggtggaggttgcagtgggccgagattgtgccactgcactctagcctgggcgacagagtgagactgtgtctcaaaaaaaacaaaaacaaaaaactgggaatgttggtctaaatcaggttattgaggtgacaaggggggcagctggagccgaggtacagtgcaaaagtgaagggtagtgggagtcagaaaactgaaggtagtctggatgaattttccacctaaaatgatgactgctaacaaatgcatagtacatttaagaaaggataggctcctactagctcttgccagttctttcctcttcttcctcaccactcctctcatgactgtcttgcctggatgaccctccttgatttggcttttctctgctatggagtttctactgcctaagcccacctgcccttagaccgcggtcctcagatcctgagctcctcagtccaagccaaactccagccctgaggggagcaacttctttgtccccaggttcttggtctgagctgatgtggcctccactataaattaaaaaaaattgtattgtggtaaaatatatataacataaaattgatcatcttaaccattgttaagtggcatcaagtacattaagtatattcacgtaattgtgcaatctccagaacttttctttctcctttttcacaatacaaacatttaatgaaaattggttagtgagtgtgtataatccacagggggctaaatgttaacctgggactgtagcagaaatttaaaatagaatagatgctggagtaaatgttatatattgtcatcatctgattcatcttcttccttcaaagattccttggcatgtttctcttcttcttcccttatatcttttggaataatttcatgtcttcttcctttagttaattcaccaaccctgctgagttctaatttaaaaggtttattcttaacttcatcatatactatgtaaatatttttgcaacttcttaacaataacatggcaggtcatttctttcacctgaagcttttctattttctatctttgcagcgtgcctggctttgccaagggtacagccccaataaccatacgaaacatcttgcagaattgtgccctgttgttcacgctgtaagaccctactgtaaaactgcagccaaaaggtctaacagcactgcagagtgtatatgcatggcaactgtgtctgcaagatgtttttgtggaatggtatagccaaagctagatctaaagttggaagcgtcttctcttgttatatctgccaaagaaggggcatctgtcaacaaacctgctaccaccattccaacatgccaatcaatattaaaaagtcttttgttggagccttcttcataaagtttaggaagactcccttttctaccccaaagccaccaccatctttacatctgagtccagtggctgtactattttccacagccttcacagcatattcaactcaaaaaactcttccatcaggagagaatgtagagactgacaagtcatacctggtgtcaattgagctctttgttttaaaaccagtagaacgcgtagggcttccaggcctccagaaacttttcatcttataaaactgaaactttatactaattaaacagtaactccccatcctttcctccccctagtccctggcaaccaccattctactttctgtatgaatttgatgactcaaggtagcttttataaatagaatcacatagtatctggttgttttttttttttttttttttttttgtgactggcttatttcacttagcataacatcctcaaggttcatccatgttgcagtatgggtcagagtttccttcttttttaaggctgaataatattccattgtacatatgtaccacattttgtttatccattcatctgttgatggacatttgggttccttctactttttggcatttgttaataaatgccgctattaacatatctttttgtgaccctgctttcaactcttttgggtatatattcagaagtagaactgctagacaatatggtaattctatttttgatgttttgagaaatcgccatactgttttccatagtgactgcacctttttacattcccaccaatggggcaccagggttccaatttctccacatcctcaccaacacttattgttttttgatagtagccattctaatgggtgtgaggtggcatctcattgtggctttgattatttccctaatgattagtaacgttgagcattttttcgtgtgcttgttggccatttgtatattttctttggagaaatgactgttcaagtctttcataagagttctttatagagtctcaatattaaccccttatcagatatatgatgtgcaaatattttctcccattctatagcttgccttttcactctgttgattgtatcttttgatatacagaagttgtgaattttgatgtagtccagtttatctgttttttcttttgttgcctatacgtttgatgtcatatgcaggagatcactgccaaatctaatgtcatgaagttttccacgtacgttttcttgtaagcattttataattttagggcttatgtttaggtctttgatccattttgagttaactttttttatgtggggtatgcactatcatttttgctcagagtttccaacatgtagcagtgataacacaatgcagttaagaaatggactcccatatttctacccttggattttaggcgaaaatatgtccttctttccctttcccaacaaacacttgcccctagtcatgaaagaggccataaaaatgtaagaaaaccaatgcaaaaatttatattttatttgaattcaaaaaatttaaaattgctttcaaattcaggaaagtaccataatgcaggaccccagggggaagcctcatatacagagacagataaattaaatgtatatactgcagacaagccaagaaggtgtgtagattacatatttacagcacttgatgttttctgaaaaccatatttatacattttattacatttacaaaaaaggcttccactaccgtttacctacaataatgaaaaaaaaatttacacctttttttttttcttttttggtactgtacaaactttgtataataaaaatatatctctgtacaaaagattttttttgtctttgttttacttttttttttttcctcatgggatggtgatgggtatatggcgtagatggtgggtgaagggcctcatctgccctgttcccttccaagcctctggaggtggagagaaatgtcaggggtgcggagggtgatgcccagcagagtgctgggtgccccaccagcaggtgctcctcgagcatctcatggaactttacaaggagacgcaggggaggggtggggggcgggaataggcatccgctgggtggtctgagaggggcataagaagggggaagggagcagtcgaaggagaggagtgtaagggggaagggagcataagaaattgggaggggagcttcctgcacttgtttccagccaaggaaagagatgagagtgtgagtgtgtctggattggccctctccctccaggcccaggggggtgccgtgtcccagaggtggtgtggccaggggtaggctcctgcctctgtcagcctccattgtgtctgctggaaatggacgcctctcactttcctctggccactcttaacatcagtcagatcttctaattgttccaatctagaatttgcttaagaaccaggtgtcgctgtccctccgctcctgcacatttctatttgctatttcaatatgtgacatgaatctctgaggccagcatgtcacacgtatacaggggcttaagcttgtgggggccttcccgaggacagagaaagtggccctaaatgctatactttgattcctaaactcatgaacttcccaacaattctcatggaattcatgaacgacccaagcatgatatagctgtcaaaatcaatcaaacccactcgcaaggagctggagaggtgtgactttcagccactctgttgttttgattcaggacctgccaggtcttttgctggctatggtcagcggctgctgggagccaaggagccagcaccaaccgtgggaggcctggggagttgaatccttgccccgaagctgcctacgcggagacagcagaacccagataggacacacaggtgtcttgcctggctttccagacctggccacagtgctactgtagagattcatcggctcctcccttcttagctgccccttctagaacagggtttctggcagctggtgtagtggactttggggcagactgatctgggtttgcattctgactccacacttcctaactctgtctttacctttgcaggcttctgttttctcatctgtcaaaggggaataacaaatcctacattttggtgttattgtgcagactagaaatactacaggtaaagtgtcaggcacagagaataaccccagtacatgatagccattgttttttgggtactggggcaggcttgctcccctgttctctcaaggaccctgctgctgcccccagacttggcatcctgtctgggccacagacttgtcttctcttctctttgtcagttgacagccagacttgaccttgggctcctggccagactcctgccctatcctccccggctctcccttctttcccagtgcttcccaggacccaaatgactttttaatccactgggtttagaactcaataaaacagtgtttgaaaaaaataaagaaactgattttcaatctatttccaaagacttttttcctgcccttggggtaatccttgctgccgctgtgcagatgggccgttcatcagcagacagctggtttctgcacgctgaccgggtttctgcactctgaccgcatgatgggatgtgtcctactgttacagtcaccgagtcaccatgtcctcacacatgggatgggcggggggcatattgttttgaaagctgaccgtacctccccctcttcatctcttctctgtgtggggaacagggcatgaagcatccttcatgcgcacttctagttttgaagcctttatggtctcttccataggacgtgaatgaaggagaggtgtgtgtgtttgtgtgtgatcaggcccatacacacacacacacacacagatccacaagttgctttgctattttaaatccataaactttcttcctctgtctgcagcccctcttccttttctgccttttcaggacacggcaggagtcctctccagggtaactggcatagatggcggcagggcgagggcctgagtcccagcagtagcagacacaggcaaggagacgaacgaagatgggcactgggcactgtgctcaggggagcctacttcctgccccctggggaactgggaacaaacagatcacacctgagtttgcaaagaaaaaagaggcagtgggaggggaggggccgggagcagaggaggaaaagcaaagcggcaaagaaaagaaggcacaagcgggaaagagatgagtcacctcaatcttcactttgatttttaatcttcccaggttggggatgggggtaggtagggaatacgtgcagcagaacatgtatttttctgtctttttcccttgcagggccaacttcgccattagacctggaggcccagtgcttgggggccaccatacttttaggaacccaggaaaacattctaattttagtttctttcaaaatcagatgaaaaaaaaaaaatgactaggataataatggctctgtaataaagaatccaggctggattatattcatttttgtagtgacacagttgtgaaatctcatttttgatacttttttttaatggaggaagggttggcaaacatcatcacacagccctgttcccccgccctgttactcactgaccgcacaggcctcgttgcttccttagtagggtgtttattttaatttcagcttttctccttggcattatttaaaaaaaaattaccatctagtcactcatttgcaatgtgtgtgtgtctgttcagggtggctcttgctttctttatgctccagctgtgggcagaagtggtcagaggggccctgctggagacctgtgggctgggcagtgggttcagagcctgctggcaaggggccaatgctgagggctggccagatgtggagccaccaaccccagccgacccggaggtgacagcatggcgcacaccagcacctggaacccagcagaacccaggtgtggagcaagagtgactgtgtggaggtcagcggcattcttgtttctttcttacactgttcaataattcatgcagtgaatcagattcatcactgatcatctccaagccccgatttacatcatcagaggggatttttctttttctcttttgccttctattgataagagttctgagaaggaaaaaataaagattgggcatacagatgaaacttgaggagtaattttggcatgctaaaacaatcccactggaataagggggaacccttatttaaatgtttgttttggagagacgtaaaaagatggggaaaagctctttccataaattgtttgtattcaggagctgcatctgctgagtccctgactcactcaccatctgggactcaggctgaaactgtgaaatcctccaggagttgtgaggcagaaagggagtaaagcacgtcaggggctgggcagtgataatgacatttgctgctcttgtaaccccctccgcaggaactgtccccaccatctctgttggtggcctttgcaggcaccctcataaaagcctgtttcctcgctgcactgccatttgtgtgtggctgggagaatctgccacgtgagcggccatgcacaggagcgtggggagggagcgcaacactagccctgggtttggctggtggcccacttggcggattttccaccgccctcactgggaatccctacctggctggctctgtgactcttctccccagagtccttcagcacaggacctgagagggggcacctgcctatccccagaaagcgggatgtgtgggagaagacagttctcagaggggtgcagcttggacatcgtgttggggcaactcctgaagggtcataggtcccagaggtgagggtgtcatcgaaggaggacacagtgaggaagaggcagtgccttttagattcatcagttccttcccagtgggcctgtcagatgcatgcctgtgtgcatgtatgcgtatgtgtgtgtgtgtgtgtgcatgaccgtgtacacgtgtgggtgtgtctgccccctgtctatatttccgggagctcctcccctctgttgtgctcaatgtggggaattttgtaagtaaacctgcctaggctatggtgctcagttgatgggtcaaacaccaatctggatattgctgtgaaggtatctttttagataaaattaactttgaaatcagtagactttgagtctccataatgtgtgtgggcctcgttcaatcagctgaaggccttaagaaaaagactgaggtgctccaaagaggaaggaattccgtctctgactgcttttggactcaagatgacagcatcaactcctgctggaatttctagcctgctggcctgccctttagatttccaccttgccagccaattccttagatgaatctctctctctaaatatatatttatttatatttctatctctatataacatttacatatagctctacggagatgcgtatctatatatagatggataggtatggatatatcttgatatggggtatatgtattgcgtttatagtgtatgaatgtatatatatacacaatatacctatatacacagatatatgtgcatctctgtatagctctacagatctccagggcttgacttcgacccagaggatgtatatatccagttggttctgtttctctagagagaaacagactagtacatgccgatgttctgccaagcccaggggtgaggagcagtttctggagccagtcagcctgggattggatttcgaccccaccccttctgagctgtgtgaccttgctcaagttagtttctatgcagctcagttttctcatctgtaatggggctcccacaagcttctacctcacagggcgtgcagggattcaatatattagatccacaaagggcctggttcagtgcctgttacacaatgatgctcaatgcacagctctcctcttactgggtgtgtctatgtggtgtgtgcgactccgttgggtggagcccctggcacgcataggtccctgtctgtgcttgtcatggcctgtcttcctcccacacccctgctcaccggctgctggaggcggggctctcggtggcggtggtggcggccaggccgggtggctatactgctgtgcacactgtgctgactgtgaactccgcctcgctggccatgatgtctgtgggctggatgttgcggtcgtacattgggttctcaaatgtggcccgaacattggtgttctcgtggccagcatagccattgaaaggaactttgggtcttctcctggcgataaaagaggaagtgcccacggcatgaaaagagcgacacagagaggcttaggggtctggtgcggggggccctggagggagagagggaggcctgcctgatgcccgccctgcctccttcctgcacggtacctgtgcttgtagagatagagcacgaagcccgcaataatgagggcgatgaaaggcaccaggatcgcggctgccactgagctgctgttggaagcaaagtggcggccaatggactcggggtctgactccagcagcctgaggtctgtaaagtcccaaagcagaaaagtcaagtcacgagacacagtctgaggctccgttggctaccctccccgactatacactcttgggaagcagggctgccactcagggtgctcctcactcctgctcagcacgggaggcaggtgtgcccagggctgcccgcctgcctccacgtgcacactcagtccttgggggcagggtcctgcatgcatctaccttgtgctgctcagatggcacccagaggaccatccgcagaggagcctgaaaccatggctcaacagaaactcttacaagggtgcagccctttagaagtctctaaagttcttttggctgtagcagccttttatcagatgaaaccttacaggcacaacaaaatataagacagatgaaggtgaaactgttctggttgaagctgaagcatctccttctgaaaggctgcctctcctccttcctcaccctcccctgcagactgggaaggctcagaagaacacaagtagaaactgtggccccagtaggcaccctgctaactgaggggctggggctctgagaggggacaggatgtctgctgtggagccagaacaaaaactgtgattttctaaggcctttgcagcgtgcctggccatcttgcagtaggtgaagggtgctgtgtggaagacagtggtctcagtccatgcagctcatgagggcagagctgggacaactccgggggaggagcagtgtgggtgggaaagggtgggagcagaccgtggctcagtccagagaagctttcaggagcttggagccagaggacatggagtggactgccttggcaggcaagggccccggcgatgggaggtgtcagtgcctggggtacagagaggctgtcacgcacctgcggctgcctcctgtttccccctcccctgcttctgagaaaccagacccctccccccaccagagtctgaggctgggcacccagaggctctgggccaggacaaggctccaaggtgtggatgtttgacatggatgacaggaagcacgctaggtaaagaggccagggaaggaccagggagggaagtggccttaatgctcagttttcttatctgtaaaatgggcacaaaaccagtcttctagggctgggctagggcagaaacgacatcacagtcaaggcaccctgagagctctaagacactccacagtgtcgttgtttgttgaggcaggggtgacacccagggctggctggagggtgtggctgggggctgtatctaagagccaatgtccctggagttgggggctctcctctccaggtctgaacaggaaactttgtcaaaggttgagtgggttatgcacatgtgtttgcttttggagagatattccatggcttttgtcagaatctcaagaggcatccctgatcccaaagaggccaaagcacccccgcctcagactgttcaacttccccagtcctctacctgaccacggcacacacggtttctctcccacccacccgggcccacacttccgggggacaagcactagttacccagtctttgaaagccgaactgcccaaagccttggcccttgacagagccttggtagatgaaggtggctccggaggactctgacgagacctgtgatggtggggagcacagagagcaggtgggaggctgctggaaggatctagaactcctctctcatcatacacgctgcccagcaggtcacccactgacctgctgctctgacacacagggtttgttctctgcccacacctaggcaagggtgggtgtgaccggggagcccggggtggggcaggggcaccagctacatgtatgaggtaggaggaagattttattttctactggtcaaatcacttaatctctctgtgcctcagtttgtcatgtgcaaaatgagaatagtaacagtacctatgtcatagggtggctgtaaggattaaatgagttaataaagatgaaatacttcagaacacttaatttataggccttacatgcatggtagctgttattactgtgatgaaaaaccgccttttggagcattatggaacacacagaaccatgctgaaaatgtcccttgcagattaaaggtattggagagttcgtcacagttctaagagctattaattttttagggggcgtagctggggacataactcctgctactgatgctcatgtgacagatgcagacccccaaatgtgcagtctggggccgcagcggctgagggcatgctgtgaggatgcctgtgctcctgggtactcccaacctatgctccatggctaggagcagcctctgtctgccctccgcagctgtccccgcaaacacaccttgctggctatcaaaaggctcgacgcttgtctggcgtcctaggcagtagctccagctgttcctggccctctggatccccatcctcatcttcccctggcctgcactgctagctccatgtcccaactttgaccctcctggatggtggagtctattgttcctgcacagcttttgggccacgatgattgaagctggcccatacttggattatgaaggggacctacagatacccttgggcctaccaaggaactacctgtatgtgccagcccctggagaagccacttggttctcctgatgtgtttataaagcaaagtcaactatgccacagtcctccaccagctggtcctgtccatgagaatgcactgtgactccctagctctctgctactctggtctaccatgacctctcgcttcattctatcctttctcttctagctccagcaatccaagacagagaagtggaggacgtggtaggggatgctatgctcaactccactatgtgtgaaataggaaggtatggccagagaagtgtcactggagatccagcttccacctcaagaaagccctagaatagaatgtcttttccacaagggaatgcaagaaagtcctatccctctgccatgtcctggtctctcaagctgtgttaatcactcacaatctgcatcctcaagtgtgaggagaagttcaatgtagtcatgtgagactcactgccttcttccagctcccacccaccacattaataccttcaactagcctgaattccctctgcccccaacctccatcccttgctttctgttcaaacaacagaacttactccaactctcttgaatgtggtgaacctctggactctgagtcttctgtcttttaaaatcttttcctttgcctatttcattagcagatgaggatcctcttgctgctcctaggcagggccccacagaaaacctcctcccaagttgccagattgatcctaggggtttgcacacccttttgtcctcctcttccctgccagtgatctgggagtcaggggaggaggtgagtttgctgaacttacatggccatctaaagcccagtgatcatctttgaacttattcataaagatctccacaggccctgtaatctggtacacctggagtaggagatgaaaatcttctttcttgtaagttcctgggaaataaagttcaggtgttacacatgaaagatatgggaaaatttcaaaactcaaatttgtgggtttgtgggtgtaagtttctggatggaatttcatgtgtagatgttgatataaacattctccacatccctttaagtcgtaagtgtagtgttgagtgtgggtttgtgtaggctgaacgtggttatatgcaagaattattaatatatgcatatgtatgttaataattggattaccgggttgaggttgtgatgctattgacacaggcatgtgtgagaatatgattttgtcttttaatctgtccactaatgcatagatagttcaatgggtgcaatagttcatgaggtcctgggcatgggagcatgtgaacatgtctattatcatgtgtgaaatgagcaaatgtcatcctgcagttgcgtaggtgtgtgcacgtatgaatgcgtagataggattttatgtggggttgtgcattaatatgttcattcactcacacatttgcttatctatccatctattcaacaaacacttattttctaaggtacttactttttctgattatagaaagattgaaaattgggaaaattttagaaaatgctgagatgcatgaagaaaaaatgatctctcctgatcttactaagaaataaccacgttactgtaaattattcctgttttctttcttatgaatgtaatattttcctttaaaacactggagtcatattttaaatacattataatgaatgcatttccctcaacactggcataatatttcatctagtagatatactatcattaaaatatccatttctctattttagggaaattttctagttccagtttttatatactacaaatggccttgtaatgggaacagcctttattcataaatgtttgactccctccgtatcttcttatgataaaaattgttagaaatgtaattaatgggtccaatcattttcaaggatcttgacacaaatcgccaaattgttttcccagaatggtaccattttagaatttggcgttcatggctgaacccgacctgcactaagtgttattgtttaaaaacactctgagttgatggtgtaagtggaaaatgacattttgagtttactttttttttgatgattgctgaaaaatattttttcttttgtttgttgactgattgtacttgggatcctgggaagtctctgcccctatttttggttcagtttagggatatcagtcttttctctttgttcataagagttctttatgtattcaggttattaatatttgccatttaaacatttccctttagtccacagtgctttatcatgtaaagatgaatagacacttcctcttccctgaccaccagacaagtctgagccttgcatgacagtatgatgcaatgccattaggctcatccttgccaagggtgtgtgcccatccatcctcccggctttcatagaggggcctgctccttaccagccaagtgcagctccacgccactgtggtcgatcatggtggcattgaccttgctgttggcaacttggaagccagtcactctgagcatggctggctgcttcttcccctggtattcataggcccctttccacagggaattcttggcaaaaacatccccaggaactagaggaattgagaaatagatgtgagagggactttgtgtgtgctgccagaattggggtagcctgatgactgatcccagcccactcactgggattgtttcctttccccaatgtctaccatgtgaggaaggtggtagaatgctctggcctcttctcgtcttgtgtctcagagtggatggatagagggaactgataaatatccactcccatgttcatcgcagcatcattcacaatgtccaagatagggaaacaacccaagtgtccgtgaatgaatgaacaaataaagaaaagggtatatatacatacactatggaatactagacagcttttaaaaagaaggaaattctttcatttgcagcaacatgtatgaactggaggacattatgttaagtggaataagccaggcacacaaagataaatatcatatgatctcacttatatatggaatctaaaaaagttgaactcattggagtagagagtagaatgatggttacagaggctggggcagagtggagggtgatggggagatggtcaaagggtacaaagtttccattagactggagatatgagttttggtgatctactgcatggcatagtgactatagttaataagaatgtattgtacatttcaaaattgctgaaagagtagttttttcgttgagatggagttttgctattgttgcccaggctggagtgcaatggtgtgatctcggctcactgcaacctctgcctcccaggttcaagcaattctcctgccttagcctcccaagtagctgggattacaggcatgcaccaccatgcccggctaattttgtatttttagtagagatgaggtttcaccatgttggtcaggctggtctcgaactcctgacctcaggtgatccgcccaccttggcctcccaaagcgctgggattacaggtgtgagccaccacacccggccaaaagagtagattttaaatgttctcatcacaaaaaaatgataattaggtgagatgatgggtatgttaattagcttgatttatttattccataatgtatacatatagaataacatcacattgtactctataaatatgtttattatttgtcaattaaaattaaaatatttaaaaagatatagagagggaactagaaaggagtgacagaagaagggaggagaaaaggaaaggtgtttaaaagatggagaaatggaagaggggagaagagagagaaaactgacatgtcagtatagcatggtgaattggaacatgggcaaatgaagtcagacagacccagagtctaatcttagctctgtcacttatcagttgtctgatcatgtgcaaaagccttgactttctccctgtataggctatgcctgtattcctatacatggtggccatcccatctaccttatcagggttattctaggggttaaatgactaatgttgtaaattgtatgttacatgatgttgcatgtgtaaaagcacctaatcagtgatagctactaaaattgtcatttatccttgtaatcattctctatggcaattattatgatctctattttactgaagcttaagaggcgaagctcattcgtccaaggacacagctggtcagtgaccaaaatggtactcaaattgagtttctgatgccaaatctagcctcgtttcctgcataatacacatgttaatgtggtaaataaaagtagaaggttcatgaaaggatgtgatagtctctaagaatttggtattggtcaggccacatctgcagtctgtgtccagttctggatgtgatacttggaaagaccccagacctatcttaaactgtaaccatttccaggaagctccctgggtatggcctgggtcaatgtgtttgtatgaccacacactggccagtcctatgccaggaggggctgtagtaatcaacagttccagagcttccagttggaagttgctggctctttcttccagatgaagtttctgcttccttcaggctcactttcttctgaagtctgcctgggctggggaggtgggtagggaaagccatccagatttatagatagttttcatgcccttcctctaggcactcagcaactctcagcaacacgagttttctggctaactgtgtgaaaaaagtaacaccagtttcttgagccaatgatctggaccatacgtactcaaggcttgggtgagcggtggctcccgggcagtgttgatgggtctcccactgggccggacctctgctggggaaaaagagtggaagaaaacaggttcagcttctggttcacactctgttggaaaaataatgaccacctgtctgaccttaggtcaatgggttctttgagatcttgctttccccttattttttttagaccaggaggtagactgctttgatgctctaatgatgctatggatccctctcagaataaaaaatacaaagaattacagaggaagtccattttattagttggagttcttacaatattagacaagacattaggatatagtggtatatatgattctttattactgcattaaataacaggatctagcagtgagtcaagaaataaccataatcttgaagtagtcaggaacatgaacaatattcatgatattggtagcaactggaatatatacaaaagtcttttcaatttctactggtgacaaagtcacaggtgctaacactcctaagggttgttgtctacattccaaattaaaggagaggctacatttcagtaagaagtaaaggaataaaaggtgtatattttcccatccaagtgcacagactccctgaatgtcctcattgaaaactttgcggaggctgaggcaggagaatggtgtgaacctgggaggcggagcttgcagtgagccaagatcatgccactgcactccagcctgggtgacggagtgagactctgtctcaaaaaaaaaaaaaaaaaaaaaaagtcctgccctcgactttgcttttcttccagatgcctcgcatgaaggaagaacttctacccatcaacggtgaactctgtgagtcctggtgggggttgcagaggagcaccttcctcccttggaatgatgagattaagaccaagaagccctcacaggcaaagcaaaggcaaaagctttgggcctgggccagacagccaaggttcaggtcccagcagtgccacttaatgactgcgtgaccttgactagtaacttcaccactcagagtctttgcctcctcatttgaaacctggaaaaaactgaaacatacctcacaggtctatgctgaataaatgaggttatgaacaggaaagtcatgaccagtaagtattaatgtcttttcttcttttgcagagaaacaatagaaaatctgccttgtcgccattaagggcagactccccactgtctgccttggcggggagcacagctttagcaaatctccttcaactctggaggtcagcctatgcctcagtacacagaatgctgtggagaaagtttctgcagtgactcaatgcaagtgtacttctgaacaaaatgctttatcgtcttaggtttcataagatgaatggagcaaagaaggagaaagcatcttatgtgcgaggtgctgtgataggcacttcttcatttcctcctgctcttgaaactctgaagtagagattattttccccattttatagcacagaaactttttgagaggcagagaaatgaaagggcttgctcaagatcatacagtaatgggttgaattcagctgcctctaaaacattatatatttttaaataaaagtagctataataacagataaaaatatttaagaataaatgtaaccaaagaaatgcaagacttgtacactgaaaaatataaagcatcattgaaagaaattaattatctaaataaatggaaagacatcacatgttcatggtttggaaaccttaatattgttcagatggcaatactccccaaattgatctacaggttcaatgcaatttctgccaaaattccagctctctagtttgcagaaattgacaagccaatcttaaaatctgtatagaaacaaaaggcaaaacaataggcaaacagtcttaaaaaagaacaaagttggataattgatacgtcccaatattttttgttttctttcatttaaaacaatttatttttatttagagacaaagtcttgctctgttatccaggctggagtgcagtggtgtaatcatagctcactgtaacctccaaatcctgggctcaagtgaacctcctacctcagccttctgaatagctaagactacaggcatacaccaccactcctggctaatttctttacttttatttttttgtagacatgtagtctccctagggtgcccagactgggacacttgccaatttgaaaacctactacaaagctaaagtaatcagggctgggtggtaatggcataaagagagtcatagagatcaatggaatagaatagagaatccagatataaactcatacatttatggtcaaatgatttttgacgggagtgtcaagacaattcaacagggaaagaatagtcttgccaacaaatggtgctggaacaactggatagccacataaaaaagaatgagtttggattctaacctaatatcataaaaaattaattcaaaatggatcaaagacataaatctaagaagtaaaactagaaaactctaagaataaaacataggcataaatctttgtgaccttggatgtatcacagtttcttagatatgacaacaaaagcatatgcaacccccaaaatagaaaagttagattttatcaaaattaaagacactggtgcttcagagaacaccaacaagagagcgaaaagacaccccgtgaaatgggaaaaaatttgcaaatcatgtaccttataaaggccttgtattttagatagagaaagaacactttcaactcaacaataaaaagataagtcagtaaaaaatggacaaaggatttgaatagacatttctctaaggaagacatacacataaaaaagtgctgagcaccattagccattaaggaaatataaatcatttttgcacaatgatacaggcaacaaaagcaaaagtagacaaatgagattacatcaaactgaaaagcttctgcacagcaaaggaaacaatcaacagagtgaagaggcaacctgtggaatgggagaaattgtttgcaaaccacacatctggtaagagattaacatctaaggaacatatagaaggaactaaaacaactcgatagcaagaaaatagataacctgatttaaaaacaggcaaaggacctgaatagacatttctgaaaagaagacatacaaatggccaacaggtatatgaaaaatgctcagcatcactaaccatcagggaaatgcaagtgaaacccacaatgagatatcacctcctacctgttagaaggactattataaataagattaaagataacaagtgttggtaaggaggtggagaaaaggaaactcttgcacattgttagtgggaatttaagttaatgtaaccattatggaaaacgtatgaaggttcctcaaaaaattaaaaatagaactaccatatgatacagcaataccattatggagtatatatccaaaggaaacaaaatcagtaagtcaaagagatatctgcactctcatgtttattgaggcattattcataatagccaagatacggaaacaacctaagtgtccatcagtggatgaatggataaagaaaacatggaatatatacacaatggaatactatgcagccttaaaaaagaaagaaattctgccatttgtgaccacagggataacctggaggacattatgttaagtgaaataagccaggtacggtaagacaaatactgcacaatctcacttatctgtggaatctaaagtaattgaactaattaatagaagtagagagtagaatagtggataccaggggctagggtggggtggtactggggggttggaattggaaagatgttggccaaagggcacagaatttcagttagacagggaataagttcaagatctcttgtacatcatggtgaccatagttaataacaatgcactgtgtacttgaaaattactgagagtagattttgtgttcttaccacaaaaaatggcaagtatatgaagttaatggatatgttaattaacatgactttgccactccacaatgtatacatatatcaaaacatcatgctgtacactctacatatatacaacttttatttgtcaattaaaaaataattggatgaaaattcaaacaaacaataaaaaacaccacaatgagataccactttatacccactgatcatggatacactaaaacaggatggacaagtgtggggaaggatgtcgagaaattggaccctgatgcattgctggtgggaataacatggtgcaagagttttggaaaactttggcaattcctcaaaatattacacatagagttactgttttcctagatatgtccccaggagaactgaaaacatattaaaacaaaacatgtacatgtatgttcacagaagtattatttgtaatagccaaaaagtggaaacagcctaaacagccatcaacaggtgaatggataaacaaaaagtgatgtccatatgatgagatatgattcacgcataagaaggaaagaaattccgacagatgccacaacatggttaaatcttgaaaacattatgctaagggaaataagccagacacaaaagaacaaatattgtatgattccactaacatgaggtacttagaataggcaaatttacagaagcaggaagtatgatagcagttactatgggctaagagaagggggaaatgggcagttattgtttaatgggtatggagtttctgttcgagataatgaaaaaattctggaaatggatagtggtgatggctgtgcaatatcataaacataactaatgccactgaattgtacacttaaaattgtatattatgtatattctatcacaataaaaacttaaatgtactttaataaatgtactttatatcactactgtatgtggaaaacaaaagaaatttccaagtgataccatgaaaataaaacaccgttagtaagttctagctctgatatagtctctgaccctgaaggcttccctctgagtggcaggatagcaaaatagtcatagatcctaaagttagaccatcagggtatagatcttcagcacttaacctttctcagctggggaccttggacacattaattaacttctctatgccctagtttcctcatatattaaatagcctcataggatcttgtgaagattaaatgagttgaaacatacaaagcatttagcacaatgcctggtatctggtgaggtgagtgcctatcagagagtttaatgctattccagcactgaactaatcgtttaaccttaatcctttccctcaagactggactcagacatcaccttctccaggaagtcctccctgacttctcctttcccccactttagtgcccttcctcctcattcctacagcatttggcacatctccatgttcctccaagtactccaaatataaaatctgataacgtgtctgtcttccacatggcagggttgtgtctttcccctctgaatccctcatgcctagcgcaagcatggggccacatgaactctcaataaatagagaacgagtgaatgaagaagaggggaagggaggtctgggacatcctggtaaccccaagggacctacaggcgggtgctgttttatcaagggtgcaatatgtgtaatgcgtcactccagtttggtggaagaaagcactttcctctgcctgatgatgaaatgtgatcctgtgagtgtttcagcccaggcaaaaggggcaacccttggggtgggttgagtatgcacctttttagaccgctctgctttgctcttctagactcaaaaccttagaaaatcagaagcgggatccagctccttgaaacgcaattccttccttctcttttgccctctttcagctcaagttcagccagcactttcagcctcccgccctggagagcttccccgagcaggcacactcacccaggcagatgggcggcttgcctgtccagctgccatccgccttgcaggtgcggtgctcggagccacccttgagggagaagccctcctggcaggagtagatgagcgtgtagcccatggagggcaaatccagggccccgacgttggcatgcgttggcgtctctggctgcctgcagtggtgggctggatgagaggaaagaccctgttggactggaggagattaggggcttcaggggccctttcgaccattcccctgttcctagatagaatatcctcttcctttcccttccagtccctttcatgccaagcatccccctccctaatcctccaccctaacccaagctctgtgtctagaggaatggccaagatggagatcatgtggatatcggcttggttgactctgagttgggggaacttaagcctgcagcacttcctgaggggtaaaggagtaactgggtcaaaagcttgatatctccatcctgaggcctggccttgcagttgttagtttttgctgctgccactggatagttttttctttgctaaggcatagggattgccttccaatatcagaaaggcttttgtgtggaagtcttctgtgaggccccaaagtgtaaggactacaaagagaccgatgtcggttcgcatggggagttgtgaactccctgtcattcagagcattcaaacatgacccagatgcccagctggggcaagaggaattttcttgggatgtgggtgaagtctgcactcacggacacagtcaggtggggttccactccaggtcaggtttgggaggcaggtcctggtggtggagccctgaagcaggtagcctttttgacaacggaagaggactgtgcttccaacctgcggcaagatacaaagtcccatcagccccttcctttcagcggtgcttcctacgtctgtcccttgaccactttcacatggcccaactcctcccgcactgttgcctgcaaaactctttttctgattctccgcctggttaaattttcttcttcctttgaggcagttgataggatgcctcctccacaaggcctcatctaataccctgaacaaagttgtaatattacactctgttgtggacacggtggctgattcagagtcagaagaccctggatccgagttctggcttctgcatttactcagggcaggctgcatggaactctgtaaaccttagtcttcctaaggatacagtggggatgaccatccttgccacaatcacactggaatgttgtgacactcaaatgtgatggcggatttgacagcattttacaaaatgtgaagaagagtgcaaattaaatattgtgtgtgtgttcctttcctcaatgaaattgcaaattctttaaggatgggagacttgtctttacagatatggcccccatagaatctgttgaacgaactgccaccctccctccctgctctgctcagttatgttccctaccttaaccctccaccagcccctcactgtacaactcgacaccccgcaaccacgggctccatctctccctacccaatccacttggtgtaatgcggctagatctgtttcctatactgcaactcggattatactacttcccagttcaaacacttatgtgtccctattacctactggagcatgtgcaaatgcaatgtgtaactcttaaattccactcccttcttccatgctgaacacttttttgtcttggatttcatcatttgacttagcaaatggcacctttatccatgcagttgtgcaaataaaaaacctcaagtcatctttgatcccttcgaccccacaatccaacccatcaatgagtcctcttggttctgcctacaaaatgtatcccgaacaagcgttcaggatcacttctcaccttctttttccctggagtcatgacaacagtgtcctccttgcctaagtgcatctattctcaactccctgatattcattctctactcagcagcctgagtaatatttcaaatgaagaatcagattgtgtcaccttcaaatggcattttagataaaatccaaaatacttatcatggcttcaaggccctgcatgacctgtcccatgctgccgcctttgcaaaaattatgtgatatccgacatacacaaaataatatatggaacacatataaagtataataataaaatggatattttagattgaatccaccatgcaacttaagagctatggacatggttgtaatgttctaggggctctttccctgctgtgttcctcaacacccctccgtagtaatggctgtcttgaaatttgtgttaatttccttgccttgttaaaaaacaatcctatcacatatgtgcatacatacctctaaacaatttagtaagtttttgctggttttaatatttgtaaaagtagtgtcatgccacctttgtcacttgatagtatgtttctaagattcatccatgtcatgcagagctgtaattcattcattttctttgctgtataataatccatcacgtgactatacccacaaatttcctgtttcttggtgacatgtgcaagagtgcctctgggatatgtttgcagaggtggaacttttgggtcatagagtgtgtgaatgtttaactttacacaccaggaccaagctgttttccaacctagcctcactcttgactacatttccttatcctccctcacggggctgcagacttgctagctggcctactttccaggcccccaggctgctaagcacttccctcagcactcctttgcaccagcccttcgttcagccaggaatgtcaccctgctctgcacagggctagcccttctcatcatggaggccgtagttcaaatgtcacccttccctaaccacctttcctaaaatggtaacccaccccgttcacacccctttatatcaatcaccgtgtcgtgtctactgctctcagaagctagctcgtttatttatttatcatcttcagccaggcagctcccttcaaacaggcacccagtctgtcctgttcccactgtattcctagctcctagaacagttcagggccataagcatgtgccgagtgagtacagactaagtgaataagtcacattacttgactagatcccagcctgtcatgtccaggtgagtccgatattttcctgggcaagtcctggactccacctaattgtcctgccttgaacacacccattcttccttttcttttctcttcttttttttctgagaccgagtctcgctctgttgcccaggctggagtgcagtggtgcgatcttggctcactgcaagctccgcctcctgggtccacgccattctcctgcctcagcctcccgagtagctgggactacaggcgcccgccaccatgcccggctaatgttttgtatttttagtagagacggggtttcaccatattagccaggatggcctcgatctcctgacctcatgatccacccgccttggcttcccaaagtgctgggattacaggcgtgagccaccgcacccggccatccttttctctgttcaatgtgtcacaacccagactgtccaggttctctcctcccaaagctcatctgaggtgtgtccgcagggcctgtgtcctggtgggccaggcatgccaacaggcctgcctcctgtgtggcacatgctcgttgccactgtgcatgagcccagtgtctgtgggtggggtgggcaccgtgaggacagaggtctcactcatttccgtatttccacaaccaccctgcctggggttgccgggaagtgttcatggaactgcacgccatctgtccttcctcatcagtttctctgacggatgttagggtcctgctgtctctgcagggtgctcccatggagcactgttcaaagaggcagagggctttctttctgcgctttccaagctcttgtcctccctgagtgctgtcctgaggaaggtctctgggtcctcttatgttgacagtgacaagaagggataggatgtaggaagaccctatcttggctgacctccttacctggtagccctgagaattgttctgtatcccaaactgtggcacaccagggtccgcacacgtggtcagggtcggatctggatggccaaaacaaagacacagatcacatggtcatggaagccttcacggcctcatctcactctgggaaataggtgtagaaaagaaaatgcggccacatcctgacttccctgcccactgagatccccacctgagccttggccctggctgtctatttgactcctcgaagcacactagctctggctattttacatcctgctgcagaagctcagaggatgagatgttcccttttgcagatgagaccactgaagacagggaaggaaagtaatcatctcaggcccaaaagaaggtctcccgcaaccccagccaagacgctccctgctccagatgacctctcacctatgcagctgggctgggtgccactccatgtcccatctgactggcaaaacctgcgtggagagcccaccagcaccagagggggatggcaggagaaggagacagatgacctgtaggagaagcctcggtcctctctcctcccacgggacgggacaccaggatccccgcagaacacagctgggaagacgaagggagaaaggcaggtctaagttgctttccagaacccaatcttccagtcccacacccccatctttgttctttgcactgctcccttcctggttgagcttgaactctgggaaccggggcagccccaggtaggtgcttccacctgctgcggtgctgctgctgatgggggcttcctctcccttctacattcaaagtgcctattaataatgatccaagtaatggagtaacattacaggaagtttagaacatgaaagagaaataaacgaaaatcccactattcaaaactttttttccattttcacgcacattcttttccaatctttgttcagttgtatggaaacttgtgcggagcggcaaacccaagcctatgtgatcgtaaatcttgtttcattcacttagcattatcttgtaaatatttcctatgtttatgacatcatcatcgcttattggctacacaattagcaacaggtggttgtaccataattatattttatcataatccttatattgggcattttctattatacagttatatataactcttctttcacctgttttgttttcttttttgttttttcttttcacatgtattactttcttaggagaattctctaggagtgaacttattatttttaaagggctgaacacatccacagctcttgatgggtagtgtcaaatgtctttccccaaagggtacacatttacactgcggtgggtagtgcatgggtgtacccatttcattcaggccatgttaacatcaggcagtgccattaaaaattgactaccaaaggcaaagctcaccacgatgtcacttcaagcattgctttatgctatgatgcaaatgtgtgtgcgtgtgcgtgtgtgtgtgtgtgtctgtgtgtatgtgtatatggagtcatgagatacataaccacatgcaaaataaaatgaagctggacctgcatcctctgccctgaaggttggggtgtctatgctgaccaattagaagtcagtttaagaatcgattgatgggaagttactgtatccagaaggaggcaactgaaagaaccagaaacacaaacggctgacaagtgaagagcaaccagcgtggcctttctcataagcaatgtgatgccaattaaagtaatgagcgatcttttaaagctcctcaggctggtaaatatttaaaaatactggcacaatccattattgatgagggtgtgcatccagaaacattctcattaactgctgtggggaatgtaaattgggacagtttctagaagacagtttgacaacatatgtcaagaagggaggcatgactgccctcggcccagcattctcatgcctagggctttgctgcaggagtaaagaaaggcatttttttttttgagatggagtctcactctgtcgcccaggctggagtgcaggggtgcgatcttggctcactgcaagctccgcctcctgggttcacgccattctcctgccccaacctcccgagtaggtgggactacaggcgcccgccaccacgcccggctaatttttgtatttttattacagacagggtttcaccttgttagccaggacggtctcaatctcctgacctcgtgatccacccacctcggcctcccaaagtgctgagattatgggcatgagtcacctcacccggccaagaaaggcaattttcaggaatacatattgcagaactgcttctaacgtgattaagttggagataatctaaattcatcaccagtgcaaaaagattaaataacttgtatctacaaggaaattctttaaagccattaaaaatgatgatgcatagatcagtaaatattgataaagaaaggtagaaaggtattgatggaaaggttttggtggcctatcagtgaatacaagttatgaaacagtatgtacagcatgagccaataccagttctagaaaatgtatacatatcactatctattcaaaaatgcacagtgattcacacgggacaccatcaaaagctgaactgtggttatcattggaaagtgtgagttcagatgacttttactttcttttttgtattttctaatgggtaaaatttttttcatgatgaccataattcattgttaaaaggcacttcagctatttctccagaggaaaagcaaggtggctgagtccagacttgaccctggtagtatgtgaaggttggaaagggtaacattgcaccaaatacctgtgtccagttttgagctgctggccctaatctctgaggaaatccccagatggaagcaaattttcagaggaacccaaaacagtatcatgagtatgtggatagttttctgcagaattagataaatggcaattagaaaaatacgtcctactgtttgcccaaagcacgggcatggagaaaaccttccagagcccattcacagggtgtgacaagaataagtgacccagaacctgcttactggggatctcagtaaagagtaagccctggaatagatttggggctcctcaggatacaactgggccaggtgtataaaaaataaagcaactcaccagaaaatcacaggtttcccagaagtcttttctgtgcaggtcatttttcatgaaaacagacatgtatatagcactgggaaccctcagatcttggagtactattccatacagttaacaacccttcaggtaaaaaaaaaaacacccccaatatctctagcttaatttccttctgttaccatagacagtatctgacaccagggctcaattaagggatcctcattttcttcctttccacttccttccctctttaatagtgtctttgatgaagctcctccctggttttggggaggggactacctattctgggccttccagccacaaagctccgaggaggcaaggggaaggagctattgaagaggatgcaccaaaggcccttgtaagcaacttacggaaacactgaggcagctctccggtccaggacccatttccctcacaggtgaacaccgcgggcagggagagctggtacccctccaggcaggcataagtcacacttgagccccacatgaagtcagaccccaccaccttcccattggggatgagcggaggtggcttgcacatgagagctggagggagaccaaagcaggctgagttctgatgctgtcctgggaaaccagcccccgtcaccatcattgatatcaccgactaccctgcacccacctagagcctgggctaaacaggaagaaccagaatggggccctcttactgtgggagttctgatctttttgcaccttacaatgccctctctcaagtgtgacaacccagtcctctgtttgcgggaccctcccctcaatgttcatggcccaggccttattttggtacttctgattcactcctggcagatgttcaggggccagttttctcaccttgcacatcccctgataagatgttagggctggcctttcacccctctcccttctagagagatgctcagggcctacatctcacttttgtatcttctttggctctctgtccacatttgcagccccagacacacctttgcagacgggcttggttccattccatgtccggtccttggtgcagctcagcacagatactctatgtgactccatcatatagccagggacacactgatatgtcacagttttgttgtacctgaagtcattgcccagccgaaggccattggctggaatcccagggtcaccacagtttatgactaggataagagagatatagcattgttcactcctggccaggaccccacttctcctccaataccatccctatcactccctgcatgcatccaagaagggaaactgtcagatcagggatgccctgtctcctcacaggatcccagttggacattacccattctaaatttctttttttttaagtcagggtcttactctgtcacccaggctggagtgcagaggcacagtcatggctcactgcagcctcgaactcctgggctcatgcaatcctcccacctcagccttctgagtagctgggactacaggcatgagccaccacacccagcttgcccattttaaattttgttttgtcaaatccctggcatcagtcctgtccttgcccacactgtccttatgcaccgctgcaacttgggctatgaagattcaccttattcaaagtgccccctctaagaggaagtatccagagggctcagttcctaaatgaggctaggacccagggaaagggagttttctgtttgaagaacctaaggtatattaatgaaccacatgagacaattgatttgtctgctgaggggtacatcttatcacctgctgttgtacctacgaggcctctgtaggcccaacagcacctacacaggactcctagggacaacagcctggaagcagggtcttatggcccatgaaagggtcatgcctatgtcatcatatcattgagggtggggcttggtgagctctggtctcaaaaccaaagtgaacttgacacgggatttcagagggagtcgaaatcacagactaggactttgacagggagaatcttgtcacatttcctcatcctatctcttccctccatctggatcccacagtgactcacttttcccagaaaagaactgggactacccttgagagaagcaagaaattggagctgtgaggctacaccgtgctcaggaacccgtactgggtggggtcgggtacaaggacagaacgaagcaacaaagatggcagatagctgcatctttgaagtgaaaagagaatcaggttgagctctggggtttgattctaagagataaaagggaaagcccaaggaattggctagagcctgagaaatggccaacatatattctctgcctctctgagcctcagccatctcatatacaaaatggggataatagtagctacttcacggagttacggagttatggtgaagatcaaatgaaatgtgcatatgaaataaagtacttcgctcagtggctgccacatagcatatgctcaacagaggctattcatatgattatcgttcaggttcaagtccgaccatcccaaccattctgcaccatcttccatggatagccttctcctctggcatgcaggatctgggccactgttggccatggaacccgtagggcctgagctctcaccgaggcactcagggtcactgcctgtccaggtaccattgaccgagcagtgacggctgagcaggcctgtggcgtagtatccttcccggcactcatagacgatagagctggagaaaaccaggccatcactgaacacaactcgggcattacttggagtcccagggttcccacaagagatcactaggaagacaaaaatacacattattcaccagaacaatggtgggtatcacctaggggactgataactgcccagagtggaagccacatgctacctcgggacctcgtggatagaaatgcctctcatgctgcttttgtatcgaattatcttgcccctagacaggaaggagagacccctatgaatcttttgaaatttctgagcaaattccagttttttacagaaaaaagatgatctattctattatcgtccttaaaattttaaacacaattgcttaatatcaccaaatatccaatcagtgcttgattttcctcagttgtttttctctttttttaacagttgatttgtttgaatcaggatccaaatagggtccacacatgacatttggttgacacgtctctaagactttgaacccagagatgattatttctgcttctataatttatttgttacagaaaccagaacatctgtcctatagaacttcacactttctggattttgctaactgcatcaatgagatatagtttaacatattcctctatcccctgtagttccttcctgtaatcaagttccgccttttggcaatggtattcataggtggttttgggcctctcctattgcattggataagaagcaaagaatgtctgggtgttttcttgttcatgatgttgaggctcatcagtgatttcgggcatgcctgcctaatgtggcattatgaagtttccattatgaagtttttcatttaatagttttagcagtcattgaccagattcattatttcattagggattggaaagtggtgatattctaattctatccttctttctgcattagctagagttctttaggaaagacattttctatcatcaaatatttgcttaccctgaaatactgttcatataggaacgccagataatgcttgattttttgtgtgtggtttttattttaaatcaaatgtcagaataatgagttggtttcctagcaaactccaaaggtgaccaatgtgtttatttaagaatcattttgaactcatggatctaaagatattttttatgttcccatccattgccattattattcttattgatgctcagattctccatctttagccaataggagcctcttctagttggctcctgagtccagttaacatgacctcagttatctttggtggaatcctcgctggagtgacaagatgttccatatttgtcttttttttttttttttttttttgagacggagtctcgctctttcgcccaggctgaactgcagtggcgctatcttggctcactgcaagctccgcctcccgggttcatgccattgtcctgcctcaacctcccgagtacctgggactacaggcgcctgctaccacgaccggctaatttttttttttttttttgtatttttagtagagacggggtttcaccgtattagccaggatggtctcgacctcctgacctcgtgatccacccgcctcggcctcccaaagtgctgggattacaggcgtgagccaccgcgcccggcctccatatttgtcttgtatatttcctgcaccagcccgggaattagccatttctccagagagtctagtttcttttaatggagaatggaccacaatccaggcagtaagagtactcattgccactgatctggtcattgattctagacttttagagttagagctgtgaaaataacttcttaaattgaaaatacatggggatcacgtggaggtagagagtggaaaaacagataatagagcctgggaagggtgagtcaggggagggggaggatgaagagaagtgggttaaagggcatggacatgcagttagaaagaaaaaataagttcaatgcttgatagcagagtagggagactatagtcaaaaatgtattgtacttgagtgatggacactgtaaatgccctgacttgaccactgtgcatttatatatatatatatatatatatacacatataatctctgcctcacattcaccctcttttcccttgccacttctgccaatgtcttagttgcctgtcaaatctccagctctgtacccaatgcactgtctgctctgtgcccacaactaggtagcaaaatgagcttgaacaaaaacatggtcccatgctgactgctctcactttaaattaatgatccccccaccttaagtgagcgctcagtgctgcctggccattacacacttcccaattccattccacttgtatcttgctaaatgattatctccttcctcttccagatcttctcactcaaacttactctcatctgttaagcctgcttcctgcctaggagagtactatgcaagctgtattttagaaagagagagacagagagatttggggaccaactgcaagaggagagagagatttaaaaatatacattttccccagaaacttaggaatatatggaaaaatgataatttctcccattggtgctacctcaggcaacatcactgagggcctagattactttgagagttttctaaaattggatttgtatatcttttggcacattgaatatttgtttcacgtagtctcttcccttagactgtaagccccaggagatcaagatgtgtgtctccgtctgttcaggcttggacatggtgccttcttgctgtgtcttcacatggcacaagggaaagggagcattctaaggtattttcttttctctataagagcattaatcccattccatgacctaacaacttcccaagaccccacttcctaatactatcactgggtgaccaggtttcaacatatgatttttgggaggtcacaaatatccagaccatggcagtgtccgtcttggtcaccattgtgtccccagcacattccacagcacttggcacatagatgctgaatgaaactatatgggaaatgaatgaaatagtgggtcaaattcagtcttttttgatttcttcccttttgaggtgagagtgggaatatgtttgtcttttgattactaatgaaaatgcacatgaattatctgttgcagtcctatcagccaggctgagggttcaaatggggccacggtttttttctgtgagcgcaggtgcctgggaataagagcaggagcaggggcgagctctggggctgggcaaaggggagaagcagaatggtcacatacattacctccacactcaggctgcgagccgctccacgagccattggcttgacaggtgcgctctgacgatccccggagcacgtggccagcttcacagctgaagcgcatcacagtgcctggatcaaagctgtcccccaaacggatgccatgagccgggatcccagggtcaccgcaaactcccacgctggttcctatggaccagaaccacacaaatcccattatttttcagggaagaaaagggagtggagaagcaggggagaaagatactgggatgggactaaggggatgcagtgggtcccacgaatgaggcctagcacaagttacctgcacatgctcctgcctccatatgcaatggtggaagaacacaaagatctgaggccatgggtaagtccctgggaaccacacagggaggggaagcaagaaggcagaggaaaggctctgtggcccgtgccagtctggaatttcagtgatccaaactggccacaggtcctccttctccccttcccctcttctctacaaacacctgctgattctgtagtcccatctcctctcctgtgccactgtcttagcttagacattcaacattcttttgcctgaactcttgcaagagcctcccgactaatgtcccctccttgtaaactctccctctaatccatcttctactttgtcctctaatcttaacaatcactaaccatctgacctttttttttttcaaaaaattttttcctgcagaaacatctttactggctccccgatgccataggataaagtccaaactgcttagcatagcttcatttcttaaccgcctagcttgaatcttgatcttgggcatttatttatttatttattactttttaaaaagtttcattttatctttaattgacaaataatcattgtacatatttatggggtaggaagtgatgttttgatgcatgtattgtatatttccaagtagctgtaggagagaattttaaatgttctcaccacaaagaaatgataaatattcaaggtgatcgatgctgggcctttcattaaggattccctactcacaaattatgccatacaagtgagctctagaataaacatctcagaccctctcatttcatttttgcttcacccccttcctcttgctacattcctacatttctctggcttctggtattgtgcaaacccactcaagagacctccaaggacccaaggagcgaagaagggtagagaacaggagacaaagccacaagatctatggtcccctgcagggccaacacatttcatgatacagaaatgtgtaggagatgtccttagatcagaccaggccatggtaaacatgaggaaagaggagaacaattaccgaataaatgacaactgcatgaaaagataaagttacaactatcatggaatctatctcctcatgtaaccatgtgtgggcatcaaatggtaacatctgagtgaccacatctagttggctggagccaataaatgtttaagtcatgtgtaccccaccacttgccatttatgtcttttccacttctcaaccttgggattattccctttcctagtctcgactcagactgtgagacactacctaaccacatgttctccattctgtttcccactgtggaagagggattcattttcaaccttcaatgtaaacattaataaaagagagcttatcgcatttggctaggttttcttatcttttgaaggttgccaggatgtaattcacacaacaggcagaactgggtctccctggaaacaatcttgatggtgagcagctctaacccacacactggctagctaacctcagctggagctagcactattgtaaaataggcacaagatggttaacgtggtttggctctgtgtccccattcaaatctcatgttgaattgtaatccccaggttggggaagagacctggtgagaggtgattggatcatggggtggatttcccccttgctgttctcgtgatagtgagtgagttctcatgagatctggttgtttgaaagtgtgttgcactttgctctccctctcctgacagccgtgtgaagatgtgcctgcttccccttctgccatgattgtaagtttcctgagaccttcccagaggcagaagcctgtacagcctgcagaactgtgagttgatcaaacctctgttgtttataaattaccaggctcaggtatgtcttttggcagtatgagaacagactaatacaatggtgttcagtcctaggggctttttctgaaagaatggcccccactacagtattggaggcttctagttcagtgatggaagggagtctggacaggatattgcaccatgggggcagagtagatagatggcaactatttaccgaagaggcaaagagaatgacagtggagatgtgggtggtgaacttcttgaagtaggtctcaaactccagaaatctctccatagccttggtggcccagtggtgtatgactcaaggacttaagaggttttgttgtgcaacagttgggtccactgcttgcacacaatgagactaaaaactttgacctggaattcatgaatgtgtatttcataggactggcaggagatgccactgcaaaagacgacattgtttcaggaagggaggaactatctctatatctgtggtatatacctaatgttacttcctaattgcctattcttctcatcccttatgttctcatccaagggatttaaggttcactcattgtctagcctttgcgtacattgaattccttctaattctgttttcagagagctccagggaggctggagaggcaatgtacatgacccttgtcctctcatgctgtattgcctatcacttctaccagatgtccaaacagaaagaagccagggcacagttaataggccttcctctagcccagctaaatgagtcatcatggctcctatatagtcctgcccggttccttaattaggtgtttaatgagattaataggggtgagaggccaaagtcctgggtggtcatatagagtgatgtgtctgggatttcctgggcaaccaacagccctttgaaatagtggctttgggactcttttctttctggagagatctaatgaatatctcattaaatattctggcagtgacctaacttttgggaggcaggctcatctgggaatgtcaaactgcaagaacagtggcacatcttatgggtaaggtcctacatcaaggagaaggcttctgtattaggaggaggtcatgatcctttcctctgaagggatctggcatgggaagggttacgggttaatttcaatgccaaggtgggccctccgaggaacatcaagctgcacaagcagctccctcttgcaggcaacatggaatcccttcctagggccaggcaggtccccctcaaagaagacaaagctgcaaggcactaatattttagcttggtggtttctgctattggcaggacaattcacttgcaaaattttgttctgctatatggcattacacattcatttctggtttggatactgtggacataggacctttggcagttctctacatttgcgattttgatagcatctgtcagtgtcctcattagcagtaaaaggaacttaacaggaaaagtctggggactggcgtttcaaggcagtagagaagaagactgtaccccactaggtagccaggacataggacaagttgaggggcagtgataagaaagggaaggaggctggggcctacgagtctgaaacagagaagaaaagaacacaggagtgggcttggacctgagcacgagtctgaaacagagaagaaaagaacacaggagtgggcttggacctgagctgatcaacaggaagacttgaactgtccccaggaactcataaaatcaagtgtctggacaggactctggccataggttgacctaaaaagttgtgcccctcctagttttgcaatccctgggcatggtcagggctgactgaggggataaggcagggctcagcccaccagaagctgaagctccattgggaccttgtcttgctgtgctttctacctgttagggtagatataagggttctgaggtctgattccctcccatccatcaatcacactcacaccttgggggctcgtctacctcccatcagtcaagcattccactggagctctttcctcaatgccatgcaccatacctgagcagtgagggagggagccagtccagtgtccatccagcccacacatgcgggtgctgtttcccaccagagtacgcttgccgatgcagctgtaccgcaccactgctcccacagtataactgtctccagacatctgggagtgaggcggggagcccggatggccacaggacaccactgtgggggaaaagcaaacatctcaatgactctgcacagggatggctcaccatcacacaatccatgctaggcttctttaagcaagaggctgggaagaagagaaacccaagggtatctgttgaagcaaacttcctgctggcatgcccacctggcgttggcagacaatgtccactcaggggacagttttccatatctatgaaatgaggaataataccttctcagcatgtagcagatatacaataacattagattgttttctctcttgcctcttatgcttacctctccctatttcctcatactcatgatgtctctgggcaggaaggtggtacgcagagtatacacaagacaaaaatgggagctctgtcaccctcagattgtcttcattggccaaggattccagaatgaaagccaattatagcccttttccatctgcatcttacagttgcctcatcagttgtccccaacctgtccctctcagtatgcaagttccctttactaaaatactgaagtatagctgtgaaaacaagtgagaagatagaacaccagaattgagatgtctaggcaagggtaatgctttcaacattactggggctggtcttcccattggtcttgtcacaggatcacaggttgatcctaagattctctcatttactcaacacacatttattgagtccctgtcatgtgctagacactccgtgtgtttgggaagatcaagtgactttgagaagttacttgaatgatgtgaagaggccagccatgcaaaattttggagaagagtattgttggggatggaacatcaggtataacgggccagaggccagagtgagtttgctgtgtttgagagacagcaaggaagccaaggatgctgggactggaatgagccaggacagaatggaagaagacaagggtggagaggtcactatgagccagatcatggcatgaaaattggattttattatgagcatcttgggaagccactggagttatatgatcggatttacattttaacaagattatactggctactgtgtagagaaaggaccaggtggtacaagaaagagggagctgttgcagtagttcaaggagagatgataatgtcttggagtctggtaggagatccctgtagacatcatacccagaaagcccacagggcatagcatacaggcagaccacaacaggtgaccaagtggtaaaacctgggttgggccagtgctgaccctgatgatgaattttggtaggtactgggatggtaagaatgggtcttaggtatcttcacttctcaatgtggtcttaatatgggtcaaacattgttctaaatgcttatggtagattatctgcaaagactgctgctactaacaattcctcccatcaaggagtggagtctttttcccctttcccctccccttgaatcaggctggccttgtgacttgctttgaataacaaaacatggtggaagtgatgttgagccaggttacatcctaagaggcttggcagcttctaccttccctgtttggagtactatgccaccatgtaaggaagtttggcagagactacggaatgacaagaactcatatgaggggagggaccatggacaatcacaatgccccagctgacagccagtgccaagatatgagtgaggccatctcggatcttctaggcccacctgagccacaacagccaataacatgtggggcagagatgagctgtctctactaaaccctgccagaattgccaatcataagcaagaaaatggctgttgcattaagtcactatgatttgttacacagtaaacacataaaaatatgcttaacacgattcgtcattagagaaatgcaaatgtaaactacaatgagatagcactttgcatccactaggatggttataataaaaatgatgaacaataacaagcataggaaagaatatggagaaattgtaatccttatacactgctggtagaaacggaaaatggtgcaaccactttggaaaacagtttggcagttcctcaaaaagttaaatatagagttcctatgtgacttggcaatttctctccaaggtatatgcccaagagaattgacaacgtgttcacacaaaaacttatacacaaatgttcaaaccagcataattcataatagctaaaaaatggaaacataatagtcccaaagtggaaatgttcataatagtcccagttcatctatcaattgtcgaatgcataaacaagatgtggtatattcataccatgaaatagtatttggccaaaaggaataaagtattgatatatgctaaaacgtggatgaactttgaaaattttatgttaagtggaagtagccagacacaaaagacacacatataattccatttatatgaaatgtccagaataggtaaatccacagagacagaaaagtacattagaggttgccagaagctggggtggggtgggcaatggggagtgacttttaagggctgcttgggaatgatgaaagtgttctggaattagacagtgatgatacttgtacaactttgcgaatacactaaaatcactgaattgtatacattaaaagaatgcattttatggtgtgtgaattatatttcactaagaaaaagaaagaaaaaatgcaaatggattaaatcctccacttgaaagaaaagattgtcagatagggtttaaaaatcacaattacatgctttttacatagagagcagttaaaaataaaatgataaaaaaatcatgccaatactaaaagaaggaagctggttataagttacaggtacacctagttttattgtgtcttgctttagtgtgctttacagatgttgttttttttacaaatgaaaggtttttggtaaccctgtgttgagcaagcctaacagcaccattttcccaataatacgtgctcacttcatgtctctgcatcacattttggtaattctcacaatatttcaaacgttttcattattgttacatctgttatggtgatctgtgatcagtgatctttgatgtcactattgtaattgttttggggcgccatgaaccatgcacacataaaatggagaacttaattgataaatgttgtgtgtgttctgactgctacaccaactggccattccttgtctatctccctctccttgagtgcccctattccctgagacccaccaatattgaaattaggccagttaatagccctatgatgtcctctaagtgttcaagtgaaatgaagagttgtgtctctcactttaaatcaaaagctaggaatgattaaaagcttagtgaggaaggcatgtcggaagctgagacagccctaaagctaagcctcttgaatcaaacaattagtgaaattgtgaatgcaaaggaaaagttcctgcaggaaattagaagggctgcttccgtgaatacatgaataagaaaatgaaacagccttattgccaacatggagaaagtttgagtaagtctttattgtagggggctgtcctgtgcattgtaggacgtttagcatcgtccttggcatccacctaccatggaaggtaggtagatctggacagaagatcaaaccagccacaatattcccttaagccaaagcctaatccagagcaaggccctgaccctcttcaattctatgaaggctgagagagttgaggaagctgcagaagaaaagtacaagcaagcagaggttggcttatgacgtttaaggaaagaggccatttctataacataaaagtacaaggtgaagcagcaagtgctgatgtggaagctatagcaagttatccagaagatctagctaagctaattgatgaaggtggctactctaaacaacagattttaaaggtagaaaaaacagccttttttttttttttttttttttttgagacagagtcttgctctgtcaccaggctggagtacagtggcaccatctcagctcactgcaacctcctccacctcccaggttcaagcaattcccctgcctcagcctcccgagtagctgggactacaggtgcacaccaccacgcctggctaatttttttgtattttagtagagatggggtttcaccatgttggccaggatggtctgaatctcctgatcttgtgatccacctgcctcggcctcccaaagtgctgggattacacgcatgagccaccgacagccttctatttgaagaagatgccatccaggactttcatagctagagagaagtcaatgcctggcttcaaaatttcaaaagactgaatgactctcttgttagggatgaatgcagctggtgattttaactgggagccaatgctcatttacccattctgaaaatcctagggcccttaagaattattccaaatctgctctgcttgtgctctataaatggaacaacaaagcctggatgacagcgcatctgtttatagcatggtttattgaacattttaagcccgctgttgagacctactgctcagaaaaaagagattcctttcaaaataatactgctcattgacaatgcacctggtcagccaagtgctaaatgatgaagagctcctgtacatcagaactggagatgtacaggaattgaatgttgtttccatgtctgctaacacaacatccattctgcagcccatggatcaagaaataattttgactttcaagtcttattatgtaagaaatacatttcataaggctatagcttccacagatagtgtattcctctgatggatctgggcagagtatattgaaaaccttctggaaaggattaatcattctagatgccattaagaagatttgtgattcatgggaggaggtccaaatatcaacattaacaggagtttggaaaaagctgattgcacccctcacacatgacttggaggggttcaagacttcagtggaggaggtcactgcagatgtggtaaaagtagcaagagaactagaattagaagtggagcctgaagatgtgactgaattactgaaatctcatgaccaatctcaaacagatgagaagctgcttcttgtggatgagcaaagaaagtggtttcctgagaagaatcaggaaactacttttggtgaaaatgctgtgaacattgttgaaacagcaataaaggatttagaacttcacatgaagttagttgataaagtggcagcaggatttgagaagactgactgcaattttgaaaggcattatactgtgtaggtaaaatgctatcaaacagcagcatacgctacagagaaacctttcatgaaaggaagagtcaatccatgtggcagacttcactgttgtcttatttcaagaaattgccacagccacaccagccttcaccaccccgatcagtttgcagtcatcaacattgaggcaaagtctccaccagcgaagagtatgacttgctaagggctcagatgattgttagtattttttagcaataaagtatttttaattaaggtgtgcatattttttgacatgatactactgcacacttagattatactggaaaactaaaaaatttgtgtgacttattttattgcgatttttgctttattgcagtagtctgggactggacttgcaatatctccaatgtatgcctctatattaatatatatacctattagtaatatcaacagcaacattaacaggagtttggagtaagctgattctaaccctcatgcatgactttgatgggttcaagacttcattggaggatctcactcctccactgaagcagcatcaagagaaccagaattagagcagcaagagaaccagaattagaagaggagcctgaatatgtgactgaattaactttagagaaaacaagcattgggacaaaaagttaatatggatagggtcactttattatgataaaagctgcattttactagaagaaaaaacaatttgagtccactaggggctgtgactctcagctggcaccactgtacacaggtggtgtccatttctgaccccaaactatttgctggtcataaatgggattggatggccaggccagagttctcaagcgaggaaaatacaagcagtgagcagctataccaggctcctgttagacctacagccacgagggcgtaaaaaaatgcagttgtccagactggagggcctacaaaatgtatataatctgccaaaggtaggtggactgctgcatggccttaactgcatatctattactccctcttgagtgcatcttcacctttgcttcttggaagatgggggagagagaaatctatgtggattcacctttaggaaacagaggggagagcaggaaaccaaggggttgctcttctcttaaggacgtgtaaggccagggaccagatgtcaggtgatatggtttggctgtgtccccacccaaaccacatcttgaattgtagttcccataatctccacgtgttgtgggagagacccggtgggaggtaattgaatcatgggggcagttaccttcatgctattctcatgatagtgagtgagttttcataagatctgatggttttatacggggcttttccccaactttgctcattcttctctcccctgccaccatgtgaagaaggacatgtttgcttctccttccaccatgattgtaagtttcctgaggcctccccagccctgtgaaactgtgagtcaattaaacctctttcctttataaattacccagtcttgggcagttctttatagcagtgggagaacagactaatacatcaggattctgagcacctccccaaccccttttaaaaaaccagttgtccccaattcttttcctaacaataattaatgtggtcattgtttattgagtagctactatgtaccagatactatgctgggacttttaatagattttgtttcccctttaatcctctaataaccctatggaataggtactggcatcatttttatagatgaagaaactgacgctctgagaggttagtgaatttttcccaaaccacactacttgttcagtagcaaagccagaattccagtccaagttggtctgcctccagagtctgtgacctctctgcttcagtcctttaaagggaaggggttcatgtgctgtgtttctggaagggcaaggaaaaggtaaagttgggagatgatgtcccgcgaggcagccagttctgaaaaaagggaactctgtaagctgaagagggtggtaactagagaggaaagggaccaggcctctagctaggaaagtgagaacacaaaaattggtatggaagtcacccaacagaggctcaagaaggaatctgaaatcccaggagtagccagagtgactgtcaccataaggcaactcatacatgtgcagacacacacacacacacacacacacacacacacacacacacacatgcacagaggggaggactgttctttgacacgggccaccccatcagtcattttgagcaggtgacatctacttacagagacactgggggcggggacggtcccatgtgccatctccctggcagctgagcactggggtgcccaggaggtagaagccgtggttgcaccggtaagacacagtggtgccgaagctgaacctgtgcgggccgctggcgtggacctgacgaacactattttcttggtgtccaggatctgtacagttgatgactgcaattgaacagaagtccaaacaggcatggattcccagtatagtaaaatcttccgagcaaaactaggcaatgaagcagaccctgtcgggagggtgagctggtcccaaggttgctggacttctcccctcaccttggttacctggtcagaagagtcatccttccatgtccagctagacatcacctccttagagaactcctcccacctcttcccagattgattactctctttctggtactcccttgcacaaatcgctattgctgactttaccagcctgtgctgtgacttgtttgaacacacgagtcccttgagggcatgaatgtctagtctccatatatctgatcgtagcacaatgtgcctcccacagcaaagcttgtcaattgtaaaactgacgcatttgaactgacttgaacagggttgggctcttttgaaaatggttttaatcacttttatgagtatttcagggacatattaatatcctgggggatatatttgactttaaaatcttaaaagtgtttccaaagcagcttaactcaaaatcaggataagattttagaataatgacaacattattcataacccatgactatacttttctttccaaacatcttcaaatccattatcttacctgagtctcaaacttatcatatgaagtgggcaggaaggtattttttaaaaatctttgataagcctttaaggatttttacttttgatgaggctctctgaggcttcactgctgtcaaaagcctctaaaagcgttagaagctatttcctaaatactccaaatagagccaggacattctgtattctctctgccttttgagtctttggcttcctctctgtgtgttttcccccagccctcaccccctttatctcaactcttaggctctctgctttttaaccctctgctttttcatcaagaatggggatctcttaagagtggttccaaaggagctgcagcagccattttgcaaccacaaggaaagaccaagatattgctcctgatctcgtggagcagctgcagaaataatattacttctagatctcttgtttatgtgagaaaaataaacctctgttaaaaaataacggggctttataagataatgatacattatttgttcaatgaaaggtaaaaaagacgacttgaaagataaaacttaagttttgctttccttatataacccatgatgatgaaattttatgtggctctttatctaagggttgagaaagtcctcatttatgacccttctctgctccatcttccctatctggatcagaatgatgccagaatgaattcactggcttctttttctgagctacagaaccacatatagcagagatggtggggactggattgggagagaaagggtgactcacttctgcaggtgggcagcatgtcactccattgcccgctggccaggcattgggacctagcagccccctcagccatatacccagggttgcaaacaaacttgaccacatcgttgaggttaaactggttaccctgagtgaggccgttgacagggttgcctgggtgtccacaggtaattgctgtaaccaaaacagaagataggtaagccctcctactattccacacccctcagaatttatccacctctcacctggcatctcttaggccatcagtgaagttcagccctaagtctaacttcaatctcttttgctgtaaaacctttataaactgaaattgtcaggggaacattctgtctgccttgaagatatgtctgtagcttggacaacttgagatcaatcattctatgacttcccatagggtgttaggactggactgtggttctctgtggtctgagcggtcagtgctatcttactttccttgcctctgatgccctcggctccccagatccattcttaattgctgggtatactgatggccaactgtcagctggtttaggcccatcctcattcctgagccaaccttgtagaaccagagtgaatactaaccaagactggtgcagagttcagtcactctgctagatcaatagcccaggtaaactggggaagcagagctgctgtttggagagaacccactacctccaattccttccatggcaagggagttcagttagtgcactttgatctgtgcaacttgggagtaatgagctggcatgtttggctcagcatcccttctttttctagggacctagttgtctgcagggagcaatgttctcggctgctctcagctgttgaggagggaggctatccccaacattgcagggctgcatgccccactgcagtgttgcctctgtgggtgggtgaatccatctcattctgggttcatgtagcagcctccatctgactgtcacattaagctccattttccaacttagcctttattagtaagcgaggtaatatttgggcctccacctaccagtctgttttactattttgttcagacatgagcagggaagagaaaagggatgtggtatttgcaggccaccatgcttatccctgcatccctctgattccccctttctcccagtggtatagctcactctatttggctgcactggcctcttggaggtttcatgaatatacaaagcaagttcctgcctcagggcctttgcacttgcttttttctctacttaggacattgttcctgcagatatcccttaactcctgccctcttcttctcaggtctctcctcaaattaaccatgtcagtgaggccttcccttagtccctagttggccagcatggccagtactgccaggtcccttgctctgctcaacctctctccatagcactgtcagcaaccaacacaccacagcacttctgtatttgtttattgcttatcacccttcagctgaatgcaagctccttgaggtcagggacttggttttgcttattgctgcatccttggtgtatgtaccagtgcctgacattcagcaggagtgtgataaatatttgctgagtgaatcagcgaatgagtaagtgcatgaatggatggatgcctaggcttctgctttgatccttagtccttagttctatttcgtcccagcctggcaccctggtctcatggagttgaactcccacctgatgcttttgccaggcctctcgctttgttctgggttttaatttgtgggaagattaggaactataagggatgttctctttgtccaatacttaaatccatgaggatcccacctaagacccaaatggtgataatggggacgggggtgtaagaagaggaagcacccagtccttggtgtggccagatctggtgttttctgggctagttctcttctgtaaatctcagtagtagcaaccctgactccagtggagggagccaggaagagcaggggacatgctgttagtggaccacaggggttcaaagcagcctggcatagtgagatgagaatgagctatgaaggccagcagaccaggatttcggctcagctctgccccttcctgactttgggtctaaggataattcactttgagccttggtttctatagctgcaaagtaagaattttgatatgcatttcacagggttgctttgaaaatagattcaattcacataattatttataatcaaatgtctactgagtgccttttatgagctaggtactctgctatggagtggaatatacaaagaagaatataaaatgttctctgacctcaggaagctcattttacagacttgtaggagggcaggcagggaagcggctgttaaacccagtgggctggtgctgagatagagcccagcgcagtggaccgtggcttttaccctcctctggggagagagtgggtcaaagagggtcccacagggagtggcatgaggtctgatctaggtctcaagggtgagtagggcttcgccaggtcaagaaggtggtgggagagcagggataagcatcgcagcatctgtaaacccctgaaattatatgcaaggcactgggtgtttgcagccagctcgggagagggtccattactttcaccggatttggaaaaggtcgtgatgccccttccctgaaggcggaaatcactcatataaagagagagaagaatgttgaggattaaaacccttgggaataccactttttgaagggcagatgttaaaaaagaaaaaacctataggaaactgaggagtgatcaaaaaagtagtaaagcaaaaagctctacaggagggggtagttgtcacagagccaagagcctcaagaattgtcagatatccctgatagatcaaataagataaagatgaaaatgtgttcatcggattcatcaataggaccactggtgacttgcaagtgtcccctgcctggttcaggctcttacccactgcttcccacatattcccaagccacaggccctggaccaggatcagcaggagaagaagctgctgcgaccaggtgtcatctctggtgcccccatataagttcttcttgctctctttaggtcccaggctttctggctgcttggaagctttggctggcacttctcagattcctgctctgcagctcttgggtagcagaggctctgagcattctagaacatggcctaggaccagagatactgttgactgggatggaagttctttctggctagagcagagaagtggcctttgctgctaatgagaggggagaggtggaggcaattagtgtaggcaaccgtctcaagcagcatggccatgtgatggttaacttcacgtgtcagcttggttaggccgtgatacctagacatatggccaaacattagtccacattattctagatgtttctgtgaaggggtatgttttagatgagataacatttcaatcaggaggctttgagtgaaatagattatgaggccctccataatgtgggtgggcctcatccaatcagttgaaggccttgagagaaaaggcagcctgctatccctggaagaagagggaattcggctagcagcctgccttcagacttgaactgtgattctttcctgggtctctaccctgccagcctatgctggtgattttggacttgccagcctccacaattgtgtgagccagttccttaaaataaattgcactctctctctatacacacctcctatttgttctgtttctctggaggactctgaactaatacaggctgccatgggcagaagaataaggcatcattaggaggaaagtagaggtcctgatgaggcttgagcacttaatgggcttttgagcacatttcaggacaactagacctagtttcctaagggcagagatgatgtatgacacattcaattcatgttgatcctcagcacctaacacagggtctggcatatagtagatgctaagggaatctttattgaatatggtcttagaagctgagggaaacagaaagggaaggtccatggtaacataggagaggattaagaatagactaacctcactaaggaggcaggagggaaggagatccagagactggtggagggattaaccatgggctgggagagagattcttctactgaggtgggagagaaggggcaaggatggatgtacacagagcagatgtgtgggtggggaagctgaaagtaggagaagctattttctgatggcttctatcatctctgcagaatagaaagtgatattatatgattagctaacaattgttggggctcgcagtcattgtctcacttaatcctcacaaccctatgaggtaggcaccaccactatacccacagaaaacagaatttcagaggactcaagatatttgttcaagggtcacagtttctaaatgtctcatctgaattttgaacccagcttctctgattccaggccatcttaactgtttaacttagttatttgctgagaacgtaggtaggggcgatggaatataagtcttcagaaaggaggcagaattgtcaaacagctgtatggagaaagggcaagggaactgactgaggaaatgaagaggacagctggaaaattttgagagtctggttgacattggaaaccttgactttgtatgtactggcagctaacacagtgcttagcacagagtaaacacttacaaatatttgttcttttattcttgctttcctcctccagataattcccaaacctctgtgctccaagagagaatgggccttagtgtaagagatcctggattctgtaatgtgatggtggcagcattactaccaccactaccatcatcttcatcatcatcatcatcacacaacagcagcagcagcagcagcaactgctgcttaacatctggatcagacaccggtctaactatcttatgtgtattaatttatttaatgctcccagtagtctttgaggtgcctgctttttacaggtgacaagactgagacctaatgaggtaaatcgacctacctagagttacatagccacagcagatctgatggtagagctgagatgtaaacccaggcaatctgggtccacacctgagtgcctaactacttcactcactgcctttgaatatggtccagtctaacgttcaatgtctttaggccaggcagacattctccacccagaccccgacagtctctattatttattacctaaatctctttgtatacatcgtgcaccaatttcctgagggcatctgcatgttcttctgggtgaaactaaacatgttttatttagacacatctgaaagagtgactgaatacagatggaactttattttttattatttttgagatgggatctcattatgttgcccaggcttgtttcaaattcccaggctcaatggatcctccgacctcagcctcctgaatagctgggactacaagcacaagctacaatatctggcttgggtcttgctttctgtaacccttaagaagttattaagactaatttcaggcattgttttttgagaagttctcattattttatggccccatcccatatataaaaagccaaaagaagaattaaaataaaaaaactgccttacaaaaattaagaaggaaaacttgcactttacataaaggctcactttagggaaatttaaaaagtgaagaattatccaaattacttccaggcagctaagcataacagtgattgcctaaatcaaaaaaatgcagattaaccagaagaataaataatagaaaacccaggcctgcagcctaactagaagccagagagtgctacaaactttaaattacatgtaagagaaatatacactaagcccaggcagagttacttctcatggttctgttgcaagcttttgtggagagcaagactgtatgagaaagagaagagaggagcaggtgaagggcttaacactgatctaaaatcactgccagaaggagaaaatccatctcatatatgaatatactgaaaacaaatcttggtatgtcaatgtacaaccacagaaaagggacataaaagtgtgtgtgattctccctcattgcttctggaagaaaagaaagtgacatcctctgagtgataaagggaataagaagcaatgatgggaaaacctggggttctgcaagacaaaagaaaaacacgcaaacaaacaaaaatgaaggacacacaacctcttccttaccacacacaaaaccttatattaaaaaaaataaataaacaaaacaaaggcaaacatccaagataatcaaaatgagataaagaagtaaaaacaatcagagagaaagactttgtaacactgacagaagagggtactactaaaccacactaaagccataaaatgaatagaagacatcaacctaaatgtatacgaagctactttaagaaaaaaatagaaaagaattcaagaatttcatctgatgaaaacctcctcaccaaaaacaaaacatgtgaagcgtaagaaaaatgtagcagcattctaaactgaactaaatattctcaaataagcatctggagatattttaaaaaccaccatgaaaatcagaaaatcaaaaactaaacagcacaaatggacaaaaggtggaagaatataaaagataactgattgtatgctttaaagagataaaagaaaaagacaaaaccatctgagaaatgaagactaaattataagaggcccaagaaagaatattctcaaatgataatttaataagagttactcaagaaagtcaggcaaaaaaccaagggaattaaaatgagataaagaggtgaaaataatgagagagaggctgagagagaagataggcaaagaagattcaacatacacataatcagagctgatgaagaagaaaaaaaaaacagtgggaaacaaagcaatatcagtgtttaaaaccataatccaagaaaagtctttggaaataaagaaagacctgaatctatatattcaaagacccatagaatacctaaggaaattgtcttggaataattaactctgaagcatgtcctagtaaaaatattagactttaggataaagggaaaaataatcaggaacctcaaaaaaaaaaaacaaccaaataacctataagaaaaatagaattaaactaatattataattccaaaagtcaaatacgtagaaacagagagcagaatggtggttaccatgggtggagaagtgggggaaatgggagacggcaaaattaagaccgaacatatcagtcatattaatatatgtgaatgagtttaactaaccaactaaaagaaaaagatggttaagttagcttataaggcaatttatactgcatacaagaatcacacctaagagaagcagaaggctaaaatagaatggtcaaaggtgcatcaggcaaaagaattaaagcaggggttgtaagcctaatatcaagcaaagtacaattctagctaaaaaatgttaaaagtgacaaaaaagtaatctttaaaggctaaaaaccacaatgtgcaatggagatactagttatgaatatctatgcaccaaataagacagcaaccatctttatagaacagaaactacaggaagtgcaaggaaaaacagaaacacactaataatagaaaactttaaacacatctctcagaataaaacagattgagtgggtgaaaagtaagaatgtaaaggacatagacaacataatcaatcagatatatctcatgaatatataaataaaacatgacatcctaatatcctttcttctcaagtgcacatgggacattcataacaactgaccaactattaggtcacaaagaaagcttcagtcaattccatgaagtagaaatattacatacaatgcaataaaattagaaatgaataacacaatgaaaaaaaagggccttccacctagaaacaaatccttctattaaaaattttctatgtaaaaggggaaatcaataccaaaattacagaatttctaataaataataaacatttattattagactctataggatacaattaaagcagtgatcagaggaaatttcatagtcttaagcacttatagcaataaaactcaatagaaatgaaagaatgaaaataaatgaattaaattcctactcaaaagctagaaaatgaacaaaaatgtaaaccaaaagaaatcacaaggaaggaaataataaaggtgaaaacagtgattaatgatgcagagaactgaaaacattagatcaacaatgctttcagttttgaaaaaaaaaatagcaatcatatatatatatatatatttaaaacaaacctctagctaatctaattaagagacagggagaaagtccatgttgaatctgagccccatgactagggagagtggatgacatacttacgcacacagaaaggggtcttgcccgaccagtgatgatcctgctggcagatgcgcacagacatgccgatcaggcggaagccagcattgcattggtacaccacactgccccggtagctgtagttctccccattgatgtgtccgttgacaatgggctcaggagtcccacagtgtccagctttggtgagggatggggaagagagtacatcgaagaggagcttatagaaaatggagtggagcttggtctgagtggctagagacagggatggtggggaaaaggaccaactatcccacaactcattacttttcccacctctccctgagagtagcaatctaggagtgacttcaggaaccctcagcatgacaaaaatagtgttgaggacttggcaccccaaatcccaaggttgtaccccaaatggccactcacttctgagcttcagtttctgtgtctctacacagatgtgtgcaaaatgatcagttacctcactgtccccaggatcatcccccactttttcttaccaaccagatacaaaaaagccttctataaaaaaacaaacaaacaaacaagaaacgcccccaaaaactcaaactcaggagcatcttttttttttttttttgagacaagatcttgctctgtctgccaggctggactgcagtggcacgatcttggctcactgcaatgtccacctcctaggttcaagggattctcctgccttagcctcccaagtagctgggactacaggcatccaccaccatacccagctaatttttgtatttttagtagagatggatttcaccatgttggccaggctggtctcgaactcctggcctcaaatgatccacccgcctttgcttcccaaagtgctgggattacaggcgtgagccaccacacctagcctgggcatcttgtttttcaccgagcatctgctgcatggagggcaccattgtctacattaaggcagtcaaaacctggctgtgttgaaacaactatgtaaaaacagatggtttggctaaattcatctttccttccttctccttgagtagcacctaggtgaattctttttattatatgggatttgggtagaatatattcctggcatttctaccagcttcctttggctctctgtggaaataacctgtgactgtgtccttaatgggcctgagacagtggcaagacagcactgttcaccccaggacagaccattcaatctatcctattaggtttatgtggctggggccctcttttagactccaggggtccaagaaaggtgtgagaggagacagaaccatagaaccagggagtggattagccatggaggaaatgataactttgtcctttggaagccaggttgttttatgtttctgtaatttgcttagtatatatgtatagatctatatgttgtgtgtaaaatttgctaatagataatataaaaggtattttaggtgtgttacaggaatgcgtctgcaaatttgccaaaaatggagactggggcttcactcattatacaaaggccaataggaagggattgtctttctaaccagaatgagaacccctcaaaagcttgtctctttagatctgaggttcttctccttcttttgggtggcccaggagaagctgttccagggttttagtcatgcctgatggccaatagttggtgtttggattaagcattttatgtcaataggtgaaatgatactgtttaaagactggatctcagctttggaaagatctaatctatctcaaggagaaaaactgggcaggataggcctgcagaggtcacttaccaaggcagcggacttcagagccactccagagcccattggccatgcactcacgcaccctggagcccaccagtgtgtatccggaattgcaggagaagatggctgttgccccgtagacagacagtgttccgatgcggtggccattggggggaatcgggagctctccacaggagatgactaaaatgatcacaagatgctcagtaagccagccccaagaggagggacatggctgcttctgcttagcaagaactgtgacaaaaataagacctgtttaaccttactctgctggaattcctgaccagaatatgggttgtgttgctgacttgtgtgatgtggcacctcaactggaggtgtctccagaagcccctgaaggttatttaaaatgcccggctccactgcaggtgcctgactcaccagctttgcagatagcgccctggcctgtgtatttttttaatcctcctcaggtggctgagatgtgcactgtggttaggaagagatggcgattctgtggtatgctcctgagtgccctgggcagacactgctaatcaatttccttgcccttcttttctgagcccagcagcctcacactctttgtcaacagagcactgctgagagcctctggctgatgtatgaggtgaggcctaatcgccaaggctgcactgaaatgtgagtggctgcattgtagtgaggctgccaaacgcttgggactactctgccacatatgtggttacatcccactgtgcagtctgcaccacagtgtgcaaagacaacagtgtcatgaatcacggacattggctttttttttttttttttttgagacggagtcttgcacagtcgtccaggctggagtgcagtggcacagtcttggctccctgcaacctctgcctcctaggttcaaacaattcttttgcctcagcctcccaagtagctgggattacaggtgggcaccaccatgctggctaattttttttttttttttttttagtagagacagggtttcaccatgtcggccaggctggtctcgaactcctgacctcaagtgatccacccacttcagcctctcaaatgctgggatctatgcccaacctggatcacaggcattggaagacaccatttctcctccttcccagtttcaaactcccacttctcactgaccacttccttctacctctttacaatcacttgcctcctctgtgacatctgcattggtcacataaatatgatgagcatatccctatcgtagtgcatgctgcgatgagctactcagagccccttttaggaccgagggacttatttccccagctgctggaaaacaacccttggctggcagcccttttcagattgctgtggttgaggagtcctcccacctaggaaggtcatgtcccattcctaggccagcctgcatccagtggctggtcagtgtggcagtataacagttcccttgctccaacttgtgacaattctgaagggccatccagagctccctggggggtgagctaaggctttcatggatactgcatcagagctcaattctccttctgcccagtcctgcttccttccctcctttcccttctgtaggtggtgttctcaagagcaccccctaataagcctctgtctcagagtgtcttcccagagattccgacctttgaaagtgtattaaagaaccaaagaaaaacaattgacaatggagaaggcaggcaggtttaggtgacctgtcgcctgtgctaccctcattcctcctatatacactcccatttcaggtcttatcgcaccacattatcatcacttctttatgtgtctgcctctccagtagactataaagtccttgtgggcaggaaccaaaatcttttatcttcaaacctctacagtgtctggcatatagtaagagcctaagaatattaaagaaatgaattagtgcatgctcatctggacaaaagcagcttttgataagatgagaagatgctaagaaatacttccttaaaggagtaaaggagtaggcattttcccagctcctgattctactagatgagagtttaaaaagcagtacactgcaatccctggtgatacccctttttcccccaccccagttcactccatgcatgagacagcttaggtaggagggaccctgctaaacttgcccaccctcccttcctgggcttacttcggcaggtgggcgtagagtccccgaggctccatttgccattggcctgacagcggatgaccctttggccagtatagtagtagccagggtcacagatgagcatcagctgggcctggaactgatactgtgtctcaaagataagcctccatcggccatgctccacgctgatgctactgacatcaggacaagtcacagctggggaaatgaggaaaagaaaggaggattaattacttgattaattctggaagaccttgtaagagcccagatctagggacttggagaccttaatgcaataatgaagaatccaggaatcttcagttctcaggcaggtttggtaaatgaacaggtgggttgggtgggggatgtggcaaactggggagtacagttctgctaaaaaattaaaaattaaaaaagggaaatagtactcagtcaaggttgactattgaatgtttgagttgcatttgattagattttcatttttcaagagaagacagaaatctggattttaatgtaaaatttcttgattttaaaagattgtggagtaattcaaaatttgttataaagcaccgtgtaggccaaaaaacaaaacaaaacaaaaacctctgtctttggatgggacatagtcgaggaggttgccattttgtgatctggcctaaaagttgttgtttttagagctttggaatcaagggacattcatgcaaactttctgacaggttttccatctaaaagggagtggaccaggccattcctaagttccatggtggtttgtggaaacatcttagggcacaatggttatcaatgctgagagcagtttcagcacctgcctcctcttctgaaatcctccaacctccatgtccatgtttttttttttttttccccctcattactttgcttttagctcactccttgcaggaatctttccagctgcctacctagcccttccttacacccgcctccattgcccgaggactcacggacacactgtggtgggacattgcggttgctccataggcctgtgtccagacactctgcagtggcctcagcgcctgcctggaggtggtagccttcactgcagctgtacatggccttggttcccactgtgtactccttgccaaacaccattccattcttgggggcctcaggaagcccacaggaaagagctagcaaaaggaaaacaatgtcatgagcatttgttttaagatggtattctgagaaactatttttatccttcctcccctcccaaggtccttttattagtaaaaactaattaaagggtaaagtatcataataaaaaagaaaatgggaggatcatcagcagaagagttttttcttctttttttttttaagtttggaagaaggaataaagatagaagtgcaaagaagctgtagctcaaaatatatgggagggagcctcagggtgaaaccagttctccgccatctgttcccacaaacacagtgtagacacattcaagtatctactctccaaacgaaagagagaattttcttttccactgaggggggatctctcttaggatgaattagggctgttatggtgggagttggcatcccagaggaaagctcttttaattctaggatttatggtctcttggcctaaaggctgccccattgcctactcaggtctgccacatactcaactcaacctctcactgataggagagactttgtggaccaagatatctgtatataaaaataacaaacgtaatccacatctcatagctggaaaaatcaacctggcccttacttttaaaatacgatcaaggatcattatacatgtgaagaaaatcagcagtgcgaacaagacaaaccaagataaagtttaaaataaatgtccccttaggaaacagagctaatttagaaaacagaagatacacaatctttaaacttctgatcagtagtatcttgagaaagtcaaggtgacatacggtactcataaaataaaatcagtgtgctctgaaggaaaaaaaaacaaacaaaaaaaaaacaaggacaaactctttgaaatgaaaaatatgattgccgaaataagcattataggattagagatgaaaagtaaatttctcagaatatagaaaaaaaagagaccgaaaatgagagaaaatgacagaaaacacggatcaatcctcaatacagaaggtccagcatccaactgttcagagctccaaaaagagagaacacaaaaagtggatgggatggaattatcatagatgaaaatttctcagagctgaagagagacacaagtcttcagatggaaagggagccaaaggaatgcaaagagaatccctcttagattcaccatcacggaattttgtgtatctaagaagtccagagacacacaggcattcctccaaattactagaaagagggaaaaaaaaatgacataactgtgaaggaacgagaatcaaactggcataagacttcccatcagcagtgagtgttcaaagataatggaacaaagctttaaacctctgaagaaaatgatttataaactagaattttacccagtcaactgaccaaacatgtgtgagggcaaaaagatagacactttcagacatgtaaagtctcagaaaatgcacctcttgtgaaccctttctgaggaatttacttaaggatataccccatgaaaaagagggtgaaaaccaggaaaggacaatatatgagatatgaaaaatgacagaactaactcaagaatacaaagaaaaggaatctcaaagggacaactcaggagagaaatgtttgcagcaacatggccaggattattattttataaggagtagggtcgacattatgtttataggaggaataggaattacttaggcaagagtagactgtttggtctttgaaagaaagtaatacttataaatcatccttgctctttgacagctcagggggtattacagatggaaagattaatccgtcaaagtacccactactgcctccatccactatcccctctggctactagtctagagctcagaactttttcgcttagagccagaataagcttgggcagagtcccattgagattgcctaacaagatgcttgatgctataagaatttccagaaccaataagaggcatcaggctggggctccattatgaatggaggagggtagactgttcagagggagagaagttggaataccaagatggaagaaggatctaagtgtgggactttccagaagaggaggatcaggaacacagaaggaatgagaaataagagagtgtttaaacatgagactcttaatgactaatcagaaaggctatgagctccttcagtggaactaggttagctaagctgtcatattacatcaactacctgcccagcttccttaaatcctttgggaagaaatacttggatctccactggtgtcttgcatggagagtcaatccagggagggcagtgaaggaagtgggcggcagccacttctcacaggccctggcctggccttgctcttgtagataactaaggggacagaagataatactccagcctgagatactaaaagcctgtgtctcatgatctccatgccaaaatgcagtccccaaaacccggtggtaagagggacacttcctgtgggtaggaggaggaggggatacaatcacaaagtatttgaggcttgtggtggaatgagatctctgagggagagagacacaggtgagagagtgggctggggaaggagagagaaggcattaggaggcatagagtctctaaaggaagagtggaaaagtcatggtttggaaacagcagtagagaagtggaataatgccaggcccttcctggcccagaattctgtgggaagtaggaggtgggtggagggggattaacaatccacttgaaagggccacagcatacgtgctctcagaggacagccatggtctccatggagggaggaagtgaagacagccagctgggtagggactgagggtgtacgcttgctggccacggaactaggattccagagaacacagtgggaggcttagaggaagggcatcagtgggaggcaaggggtgcagtggggagaagacatgcacagtagtatggggatgggtcaactgaagtctggtggaggcttaattttgggtggtgatgtaaggtaacagaaatgagaggcttagtaggttccaactggcgctccggaaaaaagacttgtccttgttaatgcagttagagacgcagagaccaaagccaaatgccatttgccatttgtggacagccagttcactgtgacctttgcttaggggtagagtagattattaatagcacattgtttttgttctttgagaaagcacaggcacaggcgagaaggttgtgaggattagagatgagagatgtcattaaaaagtacttcaccactactgggaaccaaaggaaaaatcaaatagcaatgtgatttcctgtttttgtctatgtagttggcaatgttttcttctttttttaaatgcagtgcctaacgttgagactgtgggagaaaagacagttctcacatgctgctatacatgaggacaaactttctgggaggcaatcagtatcgacagctgtcaatcgcatacgttatgatgcgagaatctcatttctgagaatttgccttaaggaaatatgtaatattcataaagatggaattataagtttatcgtcacaaagaatatagaaatccaaatgaccaacaagagaatgatacttaaatgaatgacaattttctcataatgctgtgcaactattgaaaataatggtgacgaagtataatattaacaatagagtccaggcgcggtggctcacacctgtaatcacagcactctgggagaccgaggtgggcggatcacctgaggtcagcagtttgagaccagccggaccaatatggtgaaaccctgtctctactaaaagtacaaaaattagccaggcatggtggcgggtgactgtaatcccagctactcgggaggctgagacaggagaattgcttgaacccaggaggcagaggttgcagtgagctgagatcatgccactggactccagcctgggcgacagagggagactctgtctcaaaaaatagtatatagttaaatatacttcctcaccatgattttcagtggttgcacagcattatgggaaacaaaatctataagagctttgtacacggatgatcctatttttataatcaatacataaaagaccaaaggaaatgtgctgaaatgttaacagtggtgatctcaggtttattgttcattttcactttttttcttttgcattatctaccgtttttttttttcttcttcagatttttagtttgaatgtatattacttgaagggaaaaaactgtcataaatcataaaatcataaatcataaaaggtaatgcatgcaaattgactgacacatttcaagtgtttgatcaacccacttgctctatgagccggaacccaagcatcccctctgctgggagccctccccagctggccaggaggaagcagatcctttctcacctctgggctcccacaacactgattatgctcctgacacgacacttccttcctctgccactttgcattgatgtgctcacatacccatctcccccatggatctcaaaacactgagattgctacgcactacagatcttgtaaatgcttgtggaaagaatgaaataattatcaaagaggaaacccacatttggaagtgactagtcctgggacaaacccaagatatgagttggatccgagctaccttgtgaccccctttccacctgcttctcaccttgacagagagggatggcttcgctccacaggtggtagccctgggggtgccgggtacagatggccatgctgtgtcccaccaggcggtagccggcgttgcagccaaagtggatggagcccccgggctgggtgctggtctggcctaggatgaagccatggagtggagccctgggcaggctgcagtaaggggctgaacaacaagatgaggttcagggaactggcaccagcaggaagacagacatggtctttcatgcaggcccctttccctttcgtctcccccccatccccttgtctttgccactgccacatcctctgctgttgaggaaagtctgaatggtggatattgaaaaacacccagtcaggttggtaaagccgaaacaaaacaacggaaacaaaacaaaacaaaacaaaaaaaaccagcttcatgaagcactgggtcccttttgcggtccaaaggtagatctggtgtatggctaagttcaggctctcaaatcccttcagctccgaaacagacttagaaagtagaacccaatggggttggttccagaaagctgcgactgcgggggtgtggactttgaccttagtgagggctgggctccagtcccgtttctgatctgaccagtttctgtaacttggggcaaatcacttcagctccaatttcctcgcctgtaaattgggactggtaatacccacctcacagatttttgggcaatttaagctgtatatgtagattgcgtacataaagcccccagcacagcatggggcactcactgttcaatgctcagtaagtggtcattgtccttctttgtgctgtgtgggggaatgtgctgagactgacctgtggcaacctgggacacacatttccctacagtgctcatttcccctccacatatggcttcaacttatttcattcatttattcaacaaatagacatcaagtatctattatcttccagatattgttctaagtgcttgcaatacaacagtgaagaaaacagaccaaaaccctggcctgggctcacgccagtaatcccagcactttgtgaggctgaggccagtggatcacttgaggccaggagttcaagaccaacctggccaaaatggtgaaacctcatctctactaacaatataaaaattggccaggcgtggtggtgcgtgcccgtagtcccagctactcgggaggctaaggcaggagaatcacttgaacccaggaggtggaggctgcagggagatgagctcatgccattgcactccagcgtgggtgacagagtgagactctgtctcaaaaaacaagcaaacaaaaaaaacaaaacaaaaaatcccagcctgaaaggactcacattataaagcctgccagggatcctcagggggagttctgtgaggccaggaaagagggatgaccaaaggagcaggcagataattctctttgtttgccctaggagtccctggtggggtcttccaggcagagatggataaggcaggatgcgcgtgtggggcccttacagccacccctggtgaggtccccggcctctttcttggtgatcatatccgtctgccggtgaaatggttgttttaaatagctgccttccaagccgaatttgtttccctactcctgctttgcccgctgtgtcctatgtgtgctgtatccacatggttacctccctcaggaacaagaatctcggttgtaaaatatacttagtcacagtgacagacgcaggtgcaaattacactcatctactcgatctgaattattaagtactaattgttgcgccatgtaattaactcactttctacgtggcatatgtattgtaattacaactgactcattatccccaaacacgttagaacatcaaggaaagggtaactccttaataacgttcagttcctaatttagcaaccagcatagtgaaatgctaccaaactgctatatttcctgtttgagtgagcagctgccaggaactcagccctaagaggcaccttaaagtttcttttccatcatgcggacactgaagcctgaagtggttaagtaccttgcctaataatcccacagctagtaggtgagagagctggtcactgacattggggcactcagtcattgcagccacccagacccctctccgtgtgcaccagggaaaggagaggttggatggactttgcagaggatatgggctctgagacagtcaagacccaccttctcccaggggccctcagcttcctctggttggctctcccctgaaagctacacccagggattctttaagactgtccacccactgagtatgggctggtcttgcaagtaggagacccatgagaagagatggactgtggcaagtgggacttcaggcactgaatttgacattccttccaaccaagattctttttttttaattttttttttttttgagacagagtttcactcttgttgcccaggctggagtgcagtagcgtgatctcggctcactgcaacctccacctcccaggttcaagtgattctcctgcctcagcctcccaagtagctgaaattacaggtgcatgccaccatgcctggctaatttttgtatttttagtagagatggggtttcactatgttggtcaggctggtctcaaactcctgacctcaggtgatctgcccgccttggcatcccaaagtgctgagattacaggcgtgagccactgcacctagcccccaaccaatattctttagaaatttgttcattgtttgcctggaatgtaggccaaaggtagccaggggaaagagtgctgaaagggaactggtgtgtgatggaaccccccatggtcttaagtaattcatttctgcctccaagcttgcggagcccagtcagcagttcactgaacccacctctcttcaaagtgggcatcaagcaccttgtgaagttttcttccaaccacagacagtaatccccatgacgagagatcagataaattcaattttctccatctcattatattcccaggattatttttttcagtccttatagattgttgcctgggtcagtctttggccttttgatctgactctgtttataagatatggcttgcagagcagaagaaaggcacctggccttgaaatatagcccatcctttgctgcatgcttaacatctgccagtcagagatctatgccttagggctttttagttttaagaaacttttattagcatttcctaactttcctaaagggacaggatcactgttaggcattatcagatcatataaaattgttaaacttatcctgaagacaaaggctggcagtatgagaaaagagggaagaggttcaagaggggaatggaatagaaaaataggaggtaggggaatggcaaagaccacttagcttcaggtgaggcagatttaggaggggaatggccgcccggtctccacagaggagcttgaggcttcgatgaggagagggcctgtggcttatttgtgtttttttcactcacctgaatagcggatcttgaagcccttccgattgtaggcgtgatcagatgaccaacgcaggtacacagagttgcttgagctggtgacaatcaggggagctgagtaattcccactgagggctttcagcagaggactctgtcctgatggacctggggtgagaaggacgcaggattacagaccatgggagccatcacagggagcctccagggaagacctcagggctcagagggtggggtgacttgttcagagtcagcaaaatcatttgtacttgcactcctctctctgcatccacaggcattgctcaaggtgctcttttctcctaagcccagctctaaagcagtgctctaggaagtccctgcctacctctaggggctggcaggtaagatgaaattgatttgcattttgagacttgacaaggtcaagtagctggttaatggaagagctggttttcaaactgggaacttcttccacttggccaccctacttctcttgtgtgtatttaagctcatgtctgtaatcccagcattttgggaaggtgaggcaggtggatcacttgagcccaggagtttgagaccagcttggcaagcaagaccccatctttactaaaaaaaaaaaaaaaaaaaaaaaaaaatacaaaaattatctggtcatggtggtgcatgcctgtagtcccagctactggggaggctaaggcacgagaatcgcttgaacccaggaggtggtgagccaagatcgcaccactgtgctccagcctgggtgacagagaaagactcagtctcaaaaaaaaaaaaaaaaaaaaaaaaagaaaagaaaaaaagctcagtgcctgccatatagaaaaaaatatttatggaatgaatacatagcaataaagctagaggaaaatgtcatgtctcggggtcataagtaacagagctccctaatactgcttttgaaagctctttgagaaagacctccctcttcttttgtcctaccttaaatgtctgagattgcatcccgagggggctggttgaaggggcgcagaatataaagctggataacccataacacaggatttatcactctggaaaaggccctgaatgatggctctactatgccactgagacagctcttagaagcttggaaaaattaatggatcatattaaacaaagtagagtcaccagaactgccatgcaaactgtgaagggaaaggctgggagaagtggcatgctgggctaggtctgctgtgtaaaagttgaccatagttctcaggaagacctggaggacactccatttactaaagcaatcaggaggtgaggagctccagccttcctggagcgggtgagcaccagcattgctgaaaacctgagtaactaatggctatcctctgtgggtcaaaactgatggggagagacactgggctccctagcagtaatggggatgagaaggtcctagaacacagaggccaggtggaattacttaacagtcagaagcaaagttggcataattactaaaatgggaagcaaggctggaatggcagctgggagagcctggcctacgggatctacgaagatggctcatagagcatgatgttcctaagggcaaggtaaataggaagccaagaagagcagccaaaacaagtataactatatgaacaaaacagatcattagtagctaactgcaggatgagaaaagctgcccccagcagaaaggtgcaatcctttgcccagtttgcagacttgagccaggtttcatttcccaagaggctgggtccctatgaaaaaagaccccgcacaatgacaataattgtatatagtagttgttcctaccgttcttcccccaaaagacctactactgtttactcagaaaacagaatattatagaaaatggaatgttcagatatatcaaagacttctggatacaggatgttaattgatgctgatgactgggggtccaaagcactatcatagctactctgccagaggagtggtgtatgaagggtggttttgggaataaatggagtcctggcccaggtccgtctcacagtacacacttaacaaagtaggagcctcaattgtagcagctgtgtgaggcgcatatctttattagaacagattaacacagccttggttacatagaatgtagctgttgatctggccatgtagtcttttccatacccttcagaaatgaggatcagaagcactttgcattcacatgaggtagacaacagtatacattcatggtttcccccagagctatgttacttctcctgctctctgtcataaccgagtataaagggatgtggaccatctggacatcttgcagaatataacatattggttcactctattgaggacatcatattaattagacctgatgagtgagaagggacaattagtgctttggcaagatgacttttcaagatgcatgtgctccagagggtaagaggtaaatcctacaaagttctgctatgaatttttagggtccagtggtctgaagcatgctgagacatgccctccaaattaaagagcaaattattgcacattttccctcttaaagccaaagaggcagcacaatgtttggtagatctctgggttttggaggaagcacactcttcacttgggaatactgtttgacccatttatctgctgacatgaacaggaatggctttgagtgggagctagagtaagaaaaggttcggtaacaggttcaagttgcagtacaagcagctctgctgcttgggccatgccacccctcaggtcccatggccttggggttgctgtggtagggaaggacatcctgtggagcttctggcaagccctgataggaaaactgcagcacagactcctcgggttctggagcaagtccatgtcttctgcagcagagaactgtgaggcatttgactgacttaccatcaaaaatctcaaactcatcatattgcttctcgctgaggaagtactccactgtgagggagatgttatagtcgggctccactctcaccagccaagagcaggtctggaactggggatagcttccagggtagctctggctcaggatcacgcctgtggagtctgtcagaagctcatttgttggacagtgcacttggagaaagaaagagaaacaccaagtacgtgggggtggagatggaactacggccaatacatttgcttttcccaatactaaagacaacccctagaaaatcagtatttgagcacattcagataagatcccacatccatcactgtgctgctccatgacatgaggtgggcttagatcctgtgtcaatattgcagtatttctgggacttgagctttgccagttggttggaatcacttcctagataagttgtgggttctactacctggctttgagtaggggaggatggaacatacatacagacaacagtaaggcttccccagatccaaaggagataatctataaaatgggttttatttgaacaaagattgtactgtatagggcagaggtaagtacatgggattttgagtcaaatacacctggattcatagcccacctctgccacttactaatggtgtggtcttgaacaagttatctcctctctgtgtgatggcttctctatctccaacacagagataacacagaccttacagggctgttgtgagcattatataaaatattacatgctgggtgcggaggctcatgcctgtaatcccagcgctgtgggaggccggggcgggtgaatcatgaggtcaagaactcaagaccatcctggccaacatggtgaagccccatttctactaaaaatacaaaaattagctgggtgtggtggcatgtgcctgtagtcccagctactcaggaggctgaggcaggagaattgcttcccaggaggcggaggttgcagtgagctgagattgcaccactgccctccagcctggcgacagagtgagactccatctcaaaaaaaatatatctatatacatatatgtatatatatatattatgaaataatatatgtaaagcatgcaacatagtgcttcaataaattgtagagggaatgatgaaaactgcatcttgaacagaaaggtctcagaacttggctgtggcttaattagtactatttatatagctaaagaaaaaaatgtcattctaaggaagacattgagcttggaacttagaaaaggaggagctggaggagcaggattcgttatttcgtcatcaccatgagtgggagggaagctgctggttcagagaggcccttccccagcactgaggagatgctgtgtcctggggcacaggcaagcatcacagcatgaaagcaatttcaggaccatccacctccatttgtttgggttgcggacgccaaagcaaagttctgaggactaaatcaacttcttcagtacattgttctttcagtacaaaggtgtgcattgacaatagttgtaagtattcttatcactgcacacggagaaatcagtgttttgcagtagatgtgcctttagacaggcttcctgggtctgctggattctgggacactgctaaaagggaggttctggaacgggaactgcaagaccaaaaattaatcccaggattacaatttcaggtaatgctattttgggtacaagactttgccatgggctgttcacccatctcacctctgccttcagagaagtggggcttggtaatcagcacgggggctgggctcctagagtcttgctgtggcccagaatttcacaggacgcatccaggattctgcctgagtagctttgaaaggtactcactgacttttcccaatagagcttcctttttaattttaagaggagaaggaaaactaatgtcttctaagaggaaactcgcttagctttgacatgttcctgatttcactaatccgatgaccagcacagggcactgagatgtggtgatacttaagttctctcaggcctcgtggtcctctcctgcctctaccaggtctgctattccttactgacagtccatattgcaggttcttcctactcttgctttcccagaagtgggggaaaggctgacctgtttccccataggctactgaatatttgcaggtagcagtagttctagaaacagtagtcgcactaatgataatattaacacaaatatggagcaattactgcatgccaggcatcattctaaactggtttatgttattaacccatttaataccgccatggcataagtactatcattatcctcagtttatagaagggaaggctgagggcaggacaatcaggtaccttgccttaggtcagatgcctgatgagtggagactattttttgatcttaattggggtgactcgctgaagcgaattcatttctgtcaaggcatggtacactggaataaagactgctgtggtctctcagttgcctggtttggcacacagcaccttgagtgcatccgcgcatcagtaaagcagggatggtgtgtgagcccacgcccacaccagggagggacttcctccttccagtactcagtatgcaattccaagaaattcccaggaatgaaaaaaaggcagatgaaaataaatgtggccactgtggccaattcacaggttcagatatcagaacagggcagagaacctatctagagtgatcactcactcattcctcatgcacttactcatccatcagacaacatttaccaagtgacctttcatgttatggggcagtgactgagctgagaactgggaatagaaagaggagcaaaacaagagctttgttcaggaggaacttctaggccccatacagatgcggctccatgcaattaccttcacatatcgggggtggtccttcaaactgcaggtaggttccaagtttgcaggtcagaatttcattccccactaaggtaaagccagggaggcatctgtagcgtacgatgtcacctgtcaaagaaagaccaacatgtagaccctcttaagaagtccagtcattagtaccttgaacccacttccaggtgagataatcagaggcgggtcatgttctgttcagacttaaataactagctcagctcccatcaaatggcccagacgactgctcccctctcacaactcagccttgtgtgagcctcagaatgtttcatattccaggacattttatactgtcttgcatggatttatttctcaaaaagatgctgacttgaaccaaaaaaagaaaactatttttctgcctccccttttgattttattttgggtgtaaactcagtgggcagaaccctctggcacagggcctactgtttctctctccacagacaggagcaggggataaggtccactggcccgacagctccccccgccaccttcccttccttccccagtcctgggttcacagtccttgctggcttgggaggtggtacctatattgaattcttcattctctgtgacgacttcggcgttggggaggatggtgggaggagggcatttggtgagtggataagctgaaaagataaaagcaggcaagtcagggtaagatcatcattctccaggtacaccgtcattcatttgttcaattcttcactttctcatccctcatttattcacacacagatattcatgagtacttatctgtaaacagggcaagtttagccaagtcctttttgcttatcttctgtcatccttattgaaattaataataacaaaagaggggcaatctaaggagtcagtgacaccatcaccagcactgaagggtgggagaggagcgttttctgagtgcctcgtggatattaggcgttttataggctgccactctaaccctcacaacatctgaccatgctgtgaggtgctcttactctactcgtgagcaagtgagattcagaaaggtgaagtaagttcctcaaggtcacacaggaattaggtggcacaggtaggatttgaatgcaggtctggctgttcccaaaccctgtattcttcccaccactgagcatctacatgctgcatgtggcttttgcgagtacctactgaagtcagctgacaagctgacccttctgatctttgaccagatacttctggattcacaaattttctaggctggaattcatccctatgggcagagactggatgatgctagaggcaggatgctatttactgaggctaagttcagtgtgggctcataacctggcttttattactaacacagagtcaagtgctatacaagtgttagctgctcctgctgccactgctgctgttatcgttactatttccaatcaccccaatccttgctatattaaaaaagtgttctttaataaatacaaatatagtacattatcattaaagaaaatttgaggtattctatggaacagtaggaagaaatcaaacttatccattgccctctcagagataacgactgttaaccaattacagtacgttcctggagtgtttattctctgcaaatataaatatttttgttttatacaacttgcattatatgttatatagcttgtgttgatccttgcacacttattattatattgcaagaatttcccatataattacatttcttagaaaatatgattgaaataacttcataggatttaatcatacagatttactagaatgtatttaacagatactctgttaaccatttaggtttccaaagttttgcaatttaaaataaagctgcaatgaaatctttttttatatatgcatcttttacgtttttttctttttcttttttaactaggaagattcaagtacatgacccttttgaaagtacagatatctcctgctgaatgtcagtaatcctttcctggaaatcaaatgttctgtgtaaagatattaactaggagcctatatcccattattttaagtgggaaaaaattatactgtgttgtacttcaacccaaaatccaaaaagtaattaagacaaaataaaatacctaaatatatgcaacaaaccattatgttagagaagttaaatacttaaaacatcacgatcacccaacaacatggtgtgacaaaacagcgcctctgtgcattgcatactgtaccatccacatccagtgcgccatgaaatcttgcagcttgagacattataaaactctaggcagaaagaaggtctagctatgaaagactcagtgggaatgcattcaggactggcactaggtggtagagtacagtttacaatgaacagcatggagtgacacctcagagccagcagcctctgagacacacatccccgccatggaattggagcccctttccaaaagtccgcatgggattctgacattttaccaactgtagttggaatgcagcttgagactttccctgcatatagatttattgaaaatggtgtactatgttttgggggatctaactgtaaatgttttctatagacgcactcgctgaaatgtatcgtactgagagatacgtaagctctatgaaatgtgggtgttaaaactaagaggcactcttgaggtaaccaagtgggtttacctttgatttaacataagcctgggaaggccacgtccacacttgctgcatgcttccactttgccctccaggaaaatggttcccattgatactgtcaacagagtgactgttcctccagcactgggtgccatcattcttctttcacccagttcatgtaatgattgtctatggagggctcaccctgggtcaggcactgtgtcaggtgatgaggttacaagaacaaccaaaacaaatacatcccttgccctcacagaacttaggccccactgggagagatagtcgtctgttttaatctttgttaacttgctaaacaaaaaagcagcatttattttattttaattggcatttgataactaattaggctaagcatttttcacgttaatggcctatttgcatttctctttttaactgtctattaaaagagttgtgatgaaccaatatgttagaagtttaaatacttaaaacatcacttcatgatcacccaacaatatggcgtgacaaaacagtgcctctgtgcattgcatactgtaccatccacatccagtgcacggtgaaaccccgcagcttgacacattataaaactctaggcagaaagaaggtctagctatgaaagactttctttgcccctatttttcttataaatttgaagaactctgaatattcaaggttgaccttagccgttaattatattttcccagtttatcatttgcttagttttatttatggcacttttgatttgtagaagtattaagtttttatgtagccaattataatttttcttaataagttaaaaaaattggtgccttccattctcagtgtcatacttatcttcaaaacttctaaggcatactaaacttttccaggaaaaaaaaatgaataaaaacaaatccccacttaaatacagcctgggtactttatattttgtgattactgttttgattggggtgattttccattacattttaaaactaggttttttttttttcagggtcttgctctgtcacccagactggagtacagtggcacaatcatggttcactgcagccttgacctcctgggcttaagctatcctctcacctctgcctcccaagtagctgggactacagactcatgccaccacacctggctaattaaaattttttttttttttttttttttttgtagagatcgggtttcaagatattgctcaggctggtctcaaactcctgggctcaagtgatcctcccaccttgacctcccaaagtgctgggattacaggtgtgagtcactgtgcctggccataaaattacaaatttctgtttaatgcgggaagctcatgggatactaaaaagcaacaaaacaaaaatttcccaaatctcaccatctaggcataagcattgtgaagattttgctgtaggatcttgggtcttttacagacacgccctccctatttcccatcacacacacacacacacacacacacacacacacacacacatatactcttaccacattgatggtatcccactgtatccaccatgttattgctacagaactctagggcaggggacattcaaggcagactcttccatttcattttgtgaatacccttcttcttcccctgaggggaagagggtgaggtgttgagagagcatagccagattctggtgtgtgtgaacatgttaactcgtgaacggtgggggcaattgctttattaatgttaagcagcagttggctcagcagcagccattgtgagcaatggtccctgtcgtcttcctgggaatgttattcctcaagctgctgggtgtgctgaattggcctttcatttgaagcttttatttatcttttttttttttttttttttttttgagatggagttttgctcttgttgcccaggctggatcacaatggtgcgatctcggctcatggcaacctccacctcctggtttcaagtgattctcctgcctcaccctcccgagtagctgggattacaggcatgcgccaccacgtctggctaattttgtatttttaatagagacggggtttctccatgttggtcaggctggtctagaactgccaacctcaggtgatccgcccaccttggcctcccaaagtgctgggattataggcgtgagccaccatgctcggcctcatttgcagcctttaaaaccaaattagcttagaaaaaaatgtgagctcacatggttcatttgagcttaccaaaggactcaggctctgcttttgaatctggggtccatgcccagctaatattgaaatgccttcctttgcctttgtttcttgtctgtatctctttttcagaacatcacaaggagtggtgagtgtggtctagggtgggagtccataatcactgcattttcttgtgataccatcacctgagtttttaaaatcacctgctttttttgcactgaacaatataaaataaacattttcctaaatcagtgaattgtattctacatgagtgattctttttattttctttttagagacaggttctcattctgtcacccaggctggagtgcagtaccacaatcatagctctcactgtaacctcaaactcttgggctcaactgatcctcccacattaaccttctgagtatctgggactacaggcatgcaccaccacacccagctaatttttttttttttttggtagaggcagagtctcactatgttgcccaggttcatacatgaatgatttgtaatgactgtatctttccctatctctctctctctgagtatacactttaaatttataatacctaatctcttactatttttacatttagattatttctaatttccctgttataacatatcaagcaatatcttcatgcacatatctttgcataattcccagaagtaggattgctgggtcctaggttgttgtattccttgggaacctttggatgtaaataaatcaattcaggctagaataagcaaaaaagcctctcagagaagagagaacccaagggtgggtttgcagccagacttcacaaaggtagaggacgaggaactgaagggccatcagaaaccaaggaaatttttccacttctcaatcattctctttctgcacataggattgttctactttttggtccacatggaaagtagaagagcagcaatccattgcacttggatttttatcttttcaggagatgggtccaggcaaaagtagaatctcttgggtcctatttcaacttcccaagagagaacatctgattgcccctgctgcagtcagctcaggtgtccacctctggtccaagcttctgtggctggggggcagatgtgtgcgtggaggggtgtcacaatgtacaaacagctgccaagtgccctgaggagcagttaaagagaacattatgagtggcacaggcaccacaaagtgattggaatgtgtagctaatcatattgtgttaaggttttggatctgcaattctcaaactacctatcactaagtgggcatctttctgcaaccttcctaattggataatcactttaaaaattatcatgacggccgggcgcggtggctcacacctataatcccagcagttttggaggccgaggtgggcggatcacaaggtcaggatatcgagaccatcctggctaacacggtgaaaccccgtctctactgaatgtacaaaaaattagctgggcgaggtggtgggtgcctgtagtcccagctactcgggaggctgaggcaggagaatggtgccaacctgggaggcggagcttgcagtgaaccaagatcacgccactgcactccagcctgggcaacagagcaagactctgtctcaaaaaaaaaaaaaaaattatcatgacatatgtgtacactcatgatcttagcagcattattcacaaaagctaaaaggtagaagccacacaaatgtccatagagggatgaacagataaacaaaatgtggtctgtactaacgttattaataaatatataccacatgtgtggaatgttattcagccttaaaaaggaaggaaactctgacacatgctataacatggaaccttgaagacattatgaattctgcatttttctttgattgttactgttgttgtttatgtttgcccaatataatctctggccacccttttatctttaaactgtgtcacattgtcttagttatgttcctggtatagaaaatatagttgaatgttatttaggttaatctaaatatattagtccattttcatgctgctgataaaaacaaacctgagactgggcaatttacaaaagaaagaggtttattggacttacaattccacgtggctggggaggcctcataatcatggtggaagttgaaaggcatgtctcacatggtggcagacaagacaagacagagcttgtgcagggaaactcccattttttaaaaccatcagatcttgtgagacttactgactatcatgagactagcacaggaaagacccacccccataattcaggttcttcccacaacatgggaattgtgggagttacaattcaagatgagatttgggtggagatacagccaaaccagatcattaagagtctttgttttttaacaggaaattgaattttagtaaatttgcatttttcattacaattgaatgattttattctactgctgtatcttattttgtgcttgctgtatctttgtccctacatagtttcctttgttctctgccttttatatttggattatgttttacatgttttttcttttagtgatttagaagtactatactttattttaaatatattagtgactaaagtatatgttcaaaatccttatttctctagtgatcaaagtcaacaattggataatatatattgattccaccgtcacaaaagataaggacattctcttatcccttttccaccttcttgcacatttattaatataaaataattatttgtagtcttttaagaattattgtatttgcactgctttgaatccatatgttccattattatttagctttaagtctgtgcttaactagtatcaacactccatttttatcttttctttcatacatcttctctattttgagttactggttcatctggagttcatccggagttacagccacctggagttacagccccgcttgagatagagtggcaataattgtaaattcttgaatccctgcaaataacaatttcttgcattcacacatgaagcccctaactttttctcctccttaaacatcacctccttcattttctgtaatctaacgtcaaaaattagcctgagaattgtctgattttggttcatttaaggtaactttctcagcctggattcttgtagatttcccctactcctcacccttacaagttgaaaaaattgccagcctcttttttatttctcttggtatccagagagctcctttatatacacaggttttctttcatctcagaaaagttttatcatttccatttggttcctttcttcctgaatgcttgttatcagtgtcttggctctttgtccactgggtctccttatttcttatcttctatcttctctctaccattttcacgcctctgcccttctccctatttgggttgagattttcaggtttgtcctcctcatctttgcattgtttttctacagtgttgcttctgctctcgctgattcttgtgatgatgaaaattacgctattttgtttcttttcagtcttgctattttttagtatctagcttcccttggaaataaaagttttaatttggagcagccacaaaggtataggagaagttggaagtatagtacaaaaatctttttccatgaaccgtttgcaagtaagtcgccaacatgttgccctgtaaccccagaatatcttagtgtatttcctacaaactagcacattctctcacataaccacaaaacaaccatcaacattgggaaattaacactgacacattactgccatcgaatcttcacatctcattcaagtttcacctgtttttccgataaattccttgataatttattgatccagttcagaatcacatgttgcatttcattgtcatgtctctttggtctcctttagtctggaatggttccagtgtctttacttgaccttcagaacttttatatttttgaagactgcctgccagggagttgacagtccgtccctcaagttaggtttgcctggtgtttcctcctgattatgttcagcttgtcttctgcaactggataatcatggaagtgatgctggcttcttctcactgcatcctctcacctggagtatgatttcaatttgtcccattattgatgaggtgggcgtgtcttccagtcttctccacttctttttccctttgttattattgtgtgtggagtggggtgggggaaggggtagtttgaagttatgtaaatatccccttccttataaaaacttgtaattatttaatgtctgcgtggatatacatagtgttctgtttgattcaataggtcaccaccatttgttactattttaaacaactttgattctcaaattatccccaatatggtcaatgagaacccctccaagccagattctatgtccctttgacatgtctccatcatgccttgggcatttccttagtttctgccataagatattcctggcttgtcttctactttctctgccccaggcttgggattagccatttcttcaaggagccctggtccattttagtggaaaatgttatttaggaaccaatatctggtgctagatgtgctcattactattgaagaatcactgctctgaagccttctcagtagaaagagctaagaaatgtatgtgcaaacacacatgtactcaaacatgccccactcacacactattttcttccatatctctacatattgaaaaccataagctcacactgatacatccaattcaaatttaacaccattgggtatattataatttttgctctatccatagttctaaccctcttctctgacagtgagacacctgccttctattgtccttgacgtattaacgtattcgatcagtcacccatctggaaccaaggtttcatttctgctgacccctccctcctcaccctacttgggctctgacttcctttcctgggctgaaccttctctgtgtggctgtccgccttcctctgcttgggctccaataccctacatgggtgtctgctcatcctgcgcagagctctgacaccctgtgccagctccatccctgtacagatacctaagctccagctgcccatgccaggcagcccatcagtgtggctccccctgacaccccggcctgggctacaatggttcacactccctcttgcctgacaggtatggatgctgtattagtctgttctcacactgctaataaaaacatacctgagattgggtattttataaaggaaagaggtttagttgactcacagttcagcatggctggggaggccttaggaaatttacaatcatgggagaaggggaagcaaacacgtctttcttcacatggcagcaagaaggagaagaatgagagcccagtgaagagggaagccccttataaaaccaccagatctcgtgagaactaactcactatcatgagaacaggatggaggaaactggcccccatgattcaattatctccacctggtccctcccatgacatatggggattatgggaactacaattcaagatgagatttgggtggggacacagccaaaccatatcagatgtctttgctttgtcccatctcacagctttaggactgaattattcaagtggggaagggaagagatttagctttcgttttatttatctcttggccagatctttcttttcatttgtgtgctgtctgaacatttcacctgttatttggagtccatgttatctagacttatattagaagaagatgcttcccaaaatttatttctattacttctagttcctaaaccatgtttttttttcaagggcatttttctctgtaattcaaacttcatgttctaacttttaatgttataaaatctttcacaggtctccttaaggtatttttcctttttcttattgatcctcatatgaaaagaaagttccttagggctgcttgcctggagaaaggcaaaaattctttcccccactcccttccactgtccactttttgcaagtctagctcctttttttttctttagttcttatcttgaatatcctctcttaggttttccacaattactttgcatggaattctacaactttttgtttgctatcttatccttttatgtctttcgaagcatttgttacaatttgcaaaaattttgtcctcttggttactcattatctctttctccttggagcaggaaagctgtctggggagcagacatttcacagagcaggaagcatgaacactcagtaacacaggaaaggatgctctgcctcatcacaagcatacaagtgaaatgccatctcatgcacctaccagactggtagaaatgtaaagtctgctaaaacccagtgtttgcaaggatgtacagcaaaaggaactctacttcagttgctgggaagagtgtaaatggttataactgcttctaagataaattgagcattacctagtgaaactaaatatgtggatatttacaacctcacaactccacacagacatgtactcaagagaaacccttgtacatgttcacaataaggaataagcaacaatgttcttattgcttgaaatgaaacaacttaagtgttaacagtagactaaataaattgctatattttcatgcaatgaaatcatacagcattgaaaaatgagttaagtgcagtcacgtgcatcaacatgaatttcaaaaacttaattttgagtgagaagagcaggtcacagaagaacatttatagaatgattgtctttacataacagaaataacatgcaaaattaaacaacatatttttggagactcacatatggagtaaaataaaaagaaaagcaatgaatattaaccaaaagtacaggatcatggttaactctcagggtagggtaggggaatgtgctgaggaaggaacagagcttcaaaggcttaggtgttctttttcttaggctcaatgatggtgttcattttattactctttaaactgcacatacatgttacatacatttttatatgtaggatatattccacaacttaccaaaagttctatgaggcatggaatgtgcctctcttgctcactcatcccctagtccagtgcctctcccacttgagcctgccgatctgggcacagcagttcctcctctcttgccccagacccttgcctgctcctgtggtcagtgaagccttgggctctggtctgagctgggactgaatggctgtcttaatccattcaggctgctgtaacaaattaccatagactgggtgacttctaaacaacagaaatttatttatcacagttctagaggctgggaagtccaagttcaagggactggcaattttgatgtctggtatgggccttcttactggttcatggacagctgtctttatgctgtgtcctcatgtggtaaaagcagcaaatgagtttcctgtgtttttttttttttttttttttttgagatggagtttcacacttgttgcccaggctggagtgcaatggcgtgatcttggctcactgcaacctccgcctcccaggttcaaccgattcttctgcctcagcctcctgagtagctgggattacaggcatgcgccaccacgcccatctaattttgtatttttagtagagacagggtttctccatgttggtcaggctggtcttgaactcctcacctcaggcgatccgcccacctcggcctctgtgtttcctgtgcttcttagctctttccactgagaaggcttcagtgtggtgattctgtgggtctcttttataaaggcactaatcccattcatgagggctctgttgtctgacctaattgcctcccaaggccccacctcctaataccatcaccttgggggttaggatgtcagcatatgaattctaggggggcctaagcatttacaccatagcaagggccttgtgtctcatctgagaggcagaaggagcattgtgcccttaggcaagcactctcaatgaaagaccttgctgagaagaacttggaaataaggatggcctggggctgtgctgagcctcctttgcctggttctggtacaggtgaaggctcaggaacaggaacaagagacctggcctaccaccaaggtaactttacaccaagcctgtcaatatctagatataataaaaataatcatgacaatgatgactattagaactataatttattgatcaccttttatactctgtgcctggagctaaggatttccaagcattgtttcatttaactttaggaggttaggtacttatatgattcctattttgtgcataataacattgaggctcagaagggtgaaatgacagacaaagttacatagcttgcatgtgtcagagccaaggtttgaacccgtctgtgactctgaagtccatactcttatcactctatgggaaagtcacaagtcaaaatgacagagccttaaagcctggatttcattagtggagcgacaggtgtgcccaatgagaggggcatgggaactgagcagatggagagggcggagtctcattcccacattgcactcaccctggacgatagctcctgggaatggcagtcacagctgcttaggttctttacatccttgtttctctctgttgcttcctgtttctttcactacctctttcacagtcttagtgtgtttctgcaagtgcacgcatgatgtaataacactgtatagtcacaccagagcagatactgtagcagatactgcagcagatactgcggaggctgggttctgtttccagttctatccacatggttttgggcaagtacttgagccttcctttgccctatttcttcatttgtaaagtgggggttagaatatttgccttactacctcacagaattcttacaggtcacaaactccaagccggtaattctacaggtgaagaaactgaagtctcaagtggggaagggacctgtgcaaggttttacacagctggcccaaggtggagctgggagtaaaatccagctttcctgatttctggttaaaatatctgcagtgatctgtaaattgcaaatatgtgcatcattccatagataggcacaagtccacagagaacattctataagtttctctaggcaattccactataataaaaatgaggaaatatccagatccctaacttgggacttgtagaagaaaacaggctgccaataaaggcatacctactctgaattgttcatactcttcctactcaaaatcacaatatcttcatttgtgcacaaaaacacagtgctccttgagaggtcagcagaagccctagatccctttggagaaggagaacccgctagaaagtgctaagggataagctggggcacaggtatagggatgatccagccagtgagttgatgtgaatgagtggacttggcaccaaggtttgggcttctgtgcctctctgccctggcagtgtggaataggaggaaaacttgcatttacagaaccctgcactgagagctctcacataggctaatacatttaattctcataactctgaagacactgaggctccaagaggttatacaactcactcaaggtcacatgatccgcaaatggtggagacgggagtcaagctcagccttgacttgaaagcctggcccttcccaccaggccaggcttccatactgaccggagaaagctatggcgaagatcccccctgtggctgcatcacggtggaacttgagcaggacctggttggatgaactctgcactgttttcttggccatgctccgggtgaagacgccgagccgtggtgctgtttgctgtggcccatccctgtacacaggaaacaaggtcctggcatgtcactagtcaccatggctgcctgctccacttggtgccatcagtggccttaagacagacctggagtgggaggctatgattctttttgtaccaacacttccccacaccatgccctaaatacctctcccaaccgttcccaacttggtctcccaacatagttgatagaattggtgaagctcacactgattcctcatccacctgattcttcaccagcccaatgggctcctgggcaaatttaggctccatggagcaggggtgtgggtcttaccacaggtcctctcagtctggggcagcactaggacagggctgaggagctggtgtgaaaacctgctgctatgcatatcggctccatgctccattgccttgtcttccaagcaaagagtatacccacaatgccttttgggacaaaagatttcttccctgaaaccttatctaacccctcctgtctgttcctagccattgcttggaaatcatgctggaaattaacccagggcagtctggttacagttatccaagccctgggaattttggaagagaattcccctaaccccgatgattctcagaatggcagtaaccaccaaacaaaggaattttaaaattatttgctcttccaaagatccagtggtttgggaagaaactgtccaggaaactgcacatatcaaatgctaatttgtattcccaatgtaaaattaactcttgttgtatataactacataactcagagctgagctgtccaattcagccactgccagccacacatggctatttacatttaaattatcaagattaaataacatttaaaaatcagaccctcagtcatatccaagtactctgtagccagtggctaccatattgggcagcatagacatagaacagttccatcactgcagaaagttctgctggaaagtgctggctcagcaccagatgaccaacgggacatcacaaaattccacctcaaatctcttccattagtctgggtggcttagcccaggtacatgtagaatgttggtttgaactctggaaataccgaggaaagtctgtgtacccacacctactcccattaacacacccactggtactttccctggccctggcagggttgcaggctgggagccactgccctcccattcctctccctttaaggagccataatggccagttggagctgagccccattccactatgtttatttgaaacccaggaggctgacagcctttaaaaaccattcacctcttggtttttctaaaccaataggtaactgactggtaacccagtgtagaaccccagtaatgctcctttctaattggctgttgacatggcacctggcctaccagatggtgatgaaatctccagagggctctgtctgcagcaggctgaggttgaggcggacgccatggccaatgggcacggtgatcagccagacacagtcctgggagctggagtacgggctagggaaccccggggagtacacagtgccgttggaagaagtgatgttcccgccacaagggactgccagggagggaacacaaacgtaagtgcagggcctcggtacccacctgagaattcagatgccttcctgaggaaatcccagctcccagaactaatcatcctgtcagggaggttgggtgggatgcggaaggggaggccaagctgaggatggctgcacctggttctacccaccagtccccacacagaacaccctggctggctctcaatcatcactgcaggcccctctgtgggtctgcctcagcctccctctttctctttcttatgaagagaactgccaagaagaaaggatgccctgaagctgtcccctctcccttcccaggaatgggagggagcagacgttagggtcagagctgcagtgcttttgctgggaagagctaagaaattaggaaagtctttctttcttcctctttgatctgctctttctagagtggtacttgtggtctagacttcgagttgagggttcctggggtgaggctaaggttgggttcaaatcatagctgaacgatgtattgagcagatagtcttagataagtagtttagcctccctgagtctccatttcctcacctgtaaaatggaactaagaatacctcccccataggattgtggtggtgatgaggtgaaacgatgcaggcaaaatgttcagcccaggccctggaagaggacgcatttgctatgtagataagatcctctctccttatcttcctgttccccaaaagcaatactcaattttagtctcactgatttaggcctcaggcaggaggatgaaaagactttgacatcttcatggtattcagaatcagtcaccatggaggaaaatagatggggatggtggacaaaaatccccaaacaccatggtccagaataatgagtgttgtagctgacatggggcatcaagcagacatctggttggggcagaccagactgaggagagagaatcccaacagattccaagcagaggccaggggtcctgtgaatgcacgtacatcctgaaagtggtgcacaggtacacgccatccctgctacataagctgaatatctcctgggtgccagccatggcctgggagacagtggggaacaaggtactctagttctgtcccaggcacacacaccactgggacacagccaaacacaccagcatctgtagcacaggctggaccatgtcatcatcatgaatgccacgggggtgtttgggggagccctgcatctggttttgtgagagtaagaaaggactccttctagaattcatatttatactcagacctaagggatgactagggttaagtaggcaaggtaagagagaggaatgctgtatgggaaaggaacaacatatgctaagacccagaggcaagaaaacatggcacattggaaaacaaagtatttcagcttaggctggaacataaaatctgcaagactggagaatatgggaggtcagcagggactaggccctaacctaagggtcatgtgtgctatattaaggggcttaaaatttgccattagggacatgggagaaagcaagagagtatggtgtcagagaagccaagggaagaaggcttctgaggaggaagaacagcttctggctcaagctagcagactgagaaagcgctgctcttttctctctcctgtgatgccacaaaaagacaaacaaggtgtgagaatggaagaaagcccaggatgaggcttgttgcacagcacgtgatgggccaacaattgcggaatgaccaactggttacgcagagcagagctctgaaaatctgaaaaactaactgaggctataatagttttagaaatcatggttttacattccaacaccagaacggctcagtttcgcaaacaaggtcctctttccatcgagagttaaactgagagtttgagtctgagagtgagccatctgtgaagtcctccagctcttgtgaaataaagatgagaagtcccactttactgaggaagaacctgaagcttagagaggcaaaggggtttgagttggagcctggggtgatctgatcctagagctggggcactctttcctggattactgcccttgctaaggcttcctttttcaagacaaatttctgccactcctccaggaaaatgatgggatgccagaatgaagagggaaggcaaatggaactgaagtgtgcagatgagggtggaggcagcacaagctcttggtcaccttccttcctggttctgggtaaggaagaagacccaagaaagtgccacctccagctccctgatagatcaactcaggtctctccagccctgtgtagaaggagagtataatggagcagggagggggaagatgaagaggggagcaagagagttcttataaagaggcttcatgctcttctccctttgggcaggtgcctggattaactctacctctctagctctcagcataccactgggctcccactccctcacatggagccttcccttccaatgggagtcctccagtctgtcagggtggatcttcccaagggctgggtgtgtcttcctcttggctgtggcccacatctcctccaggtcctccctagtgctggcccggagccctgtcaccaggaccctctccctggagaggctgggccacaccatgtgaaaacaggatggaccacagtttgcctggacctccagccctggagatcccacagagcaggtaggtggaacatgggattgctctggaccagtctccacgagtaccccaggaagaactgctggggatgagggagcgacataccttcacacttgggcagggggtggtcccagttccggttggtgccatgttgacacgtgaggacagggtggccagtcaattgataccccgggaggcactcgaaggtcactgattgtcccacgttgtagccagctcccctcacaatgccattggcaaagggctctgggtctgggcactcttgaagttcataggctggaaaagatccggagaaaaggtcactttattctctctgaccagaaaataggagcggcagaaagcatagtggtgaagcctcaagatttggactcagatggacctttgtcatgtacaagtcattggctttgggtaagtaatttaacttgtgtacgcctcagttttcctgtgtatagaatgattattttgaggactaagtaggataacacatacatagctctttccacagtactggcacatggtgaaagctcagtaaatagtatctattattagtaattccgtaggaaaaggaggctcaaggaagacattgctcaattgaacctctattcactgagtgccactgggggccaggcaccagcctaactcctttcatgttgcttatctcattgaaccttcacaaccaggatcaagatcccagacataggaagcggcgacgggaggagttgagttggttctttccaactccgagagatcaaaacctctcaggaaggaagaaatctggtgggagtaagtcaaatctgtggcaaggagagaagcttttcagagggagtagctgggctaagggacgtgtggctgtcacaaagcaagtccctccaaagggcagggaagctgtttccatgagagtgggtggcctgactccacaggagatgcctccatggaagcagctgaggccagtccattggggagaggctgctgagggattcctgagcaaggcctttgatgaattgggtccacaggacacagaacagccttcgtggcagtaattgcgcccactccactcaggaaattggcagcgggaggagacagaacgttcctacagtgggaatcctcagtggaagtagttgggactggatagatgcttcttagaagtacatgtgtttctcatacgtaataacaacatcaataacgcggatcttgaagataacatttcctgagcactcacgtggctgtgttatgtttccattcagtacctcacagggaagtctcagggggaggaactgggcaggtttccctgggaaatcattgaggtaattgggtgtgccaaaaactgagcaaccacatgggtggggtggctgcttagccccaggacaggcctggccctgcagcacgggggtttgggccgtttggcaacgaaagtctcagcggaagcagggggccttttgcccagggaggcaacccaatgggatgggttgggtctttacagaaaggctcagggtagccacgtggactcagagacggggagagaaggaagggagtggctgtgtgtgggaagccaggagcagccttgatgagagcagctgggcctctcctacaggaatcatctccagtggaaggatctaggctcttcaaaaagacagaaacttcagtgagagtacctcaacactgagagaaacctcagagcctgttcccctgcaagaagcttcaaagggagaggttggccatataaggcagaaataaaccctaagaggaggaaggatgaacttccccaaagaaggactcctcaggaaagcaagtgggtttgttctaaagggacacacctggtgacagtgggaacacacttccaaacaaagtgccataatcaggtagatacaatttcaagcaaaatgccattattttaaaacattaataatgatgatgcctagcatttggggacaattgtacatcttagccattttgctaagttctttataaacagaaccctcctgagaaattgtcatggaacacattaagcatgtcggaccgggaggcctggctaggagttgcttatgctgctactaagaacttgatgggaatctttacttaaagaagagaaaagaagaccctagcatgggaagtgcagagtatcagttggaggaattttgagaaagagtaaagagttggacttctaaggaaagtcgaggggccatagagagctgggtctgacagaaacagcctcagtggggacaaatggctcgttcattgaagctgggtttttccccagaggaaaaacctggggagagtggtcagagcttgcttacgaggtgccgctccgtacggcggaggaaggtgtaaacagagagtgtgggcttatggtcagggagagttatttgggcctatcacaaatgatgaggcctctgtgggaatacttaggcctctggccctagaggcaacctagcccaagaggttgggatcgccccaaacgagaagccttaataggggtggagcccaagtctgaggggagcaggtgccccggcaccatgtgtggctccacaggagtccttgggactgtggcagacaggtgaacgctgagggagtggctgtgcctgggactgaaggggaacatccaggcaagtcctgaaggtcacatgcttgtgggaggagggggcccattatagggtggaagccccattggatgtcgctgtgcctctcacatgttgggccaactcctggtggaggagctgggtgtctgaaggcaactcgctgccccctggcctccctacgcagggaaagttatcagaggaggactgggcctgtggaggctgcaaacctcagtgggagagacaggcccatcccagggagggacactagtcccgaatgttggcttgtcgtccaggaaacctcagggggacagcggggccccttgtgcagggtggccatagtgggagcatttccaaagatgggggctggggaatcaggggcgagtgagcccaaggccagggctctgtgggggtagttaggcctcttctgtcgagggagtcaatggagaatctgaggcggtcacacaggcacaacctttacaaggacaagtgggctcatcacacggggagcacagcgagtggctggtcccatcacagggattcagtggcaggaccgtgcccattgtctagggtgaaggcacagtgcacggggtgggcccagggcagctgtccctggcacaatggtggcactgccattccttatatttatccgagaaggaaggtctcagggagagagcacttgggcctgggaggggtgcaaggggctgaaatatgtctcccaaaattcatatgctgaagacttcactccttgtgaatatgaccttatgggaaatagacaggatctttaccaaacttatggaaattaaaatgaggtcactagggtgggctctgatccaatatgactggtgtctttatagaaggtgggaatttggagacagaggcacatgaagagcaccatgtgaagatgaagccagaggtcggggtgatacttctaagagctgagaatgccaagattgtcatgaactaccagaagccaggggaggggcccggacagagtctccctcatgggcctcagaaggaaccaactctgctgacaccttgatcttgaccatccagccccagagccattggacagtaagtttccgttgtttaagccacccagtttgtggtactttcttatggcagccctaacaaactaagacacaggaaagccttgggggaaggcgttgcatctgtctctgagaggacatatttgggaccaagtccctcctgtgacatcacggccatccgacgcgtcatgacctgtttgacaggtacacacctcccagataataggcacagacatccttgggcaaggctggcctctgtgatgagcctgcacacaccttccctgggtgtggcagctgtgctaacaccagtgaagtggctctgtctgggtgcaaggcccagcttctcctgaggctccctctagatgacaagcccagccgcacttaccaaagctttccctgagatggaccccggaaccctgaagtctcctgcagaactgattcagttgcacccacctcgtgggatgccctttaaggctttccctaaatgagaagcccagtaccccctcagtattcttctctggcaagggaggagctccatccccaccatattatttccagaataaagaagtcaactctcagaaagctgcatataggatggtactatttatatagaaaacgtggtcaaaaaattttataaaatgttacatatttttcacaggtacatgtagcatacatatatccaggcctggaaaggtcacaactaaacaatagtagccgtttctggagaataatcctgggtttggaggctatagacaaagagagctttggccttacttgtaaggttttaatttctttcttgtatttttctttttttaaaagataaatatgtttgtaaattgtttgtgtaattaaaaattaactttaaaaaacaaaattggaaaactatagtacgatccaattttggctaaaaatatagctacagcaatatatataccgagaaaagcggggaatacatattgaattgttgaaagtgtgtatctctgcatagggtagtgacaggatgggattatgggaggattttgacttcctgtgacgggtgttagggcctgaatatttctgtcccatcaaatccctatgttgaaacctaatccctcatgtgagggtatttggaggcagggcatttggtggcccaccctcctaaatgggattagttcccttataaaagaggcctgagagagctcttttgccccttccaccatgtgaggacgcagtgagaagatactgtctatgaactagaaagtgggtcttcaccagacacggaatctgctggcactgtgatcttggacttcctagccctcagaactgtgagaaataaatttctgctgtttgtaaggcacttggcttatggtattttgttacagcagcctgagctaacacaatgtgctcacaaaattatctacagtgtttagatttttttttttttttttacaaacatgaattagtattggaaaaaaaatctaaaaatatttttaaaaattcagtggaagaatctgggaaagggattagaacaaatgcttcggtcagtcacaataagggaagcatccaagggcgaggttgggcttactcaggaccatgtacagctgcacaggttgggcacaatctccacatccacaggtgatggatggtctacaacacaggggaacctgagtgtagatggggctctttccagggaatgtcccagaatgagtggggccggtcacgggatcccacttcagagaggtggagctgtggtgagtgtggttgggcctcacaggaaaacctgctccttgtgcaaggcttagaggtgcccttgggactgttactagaatcctccatcctgtcataggaagagctttgctgagagtaattgggcttgatgtgcagggaaggaccctggggaagtaattcagtttatcaagcccgaggggaagtgactggctggacagtttgggacacctgagaaggcacagatgggccacttgcccagggacagctgtacagagtgggagcctcagagggtgctgttgggcctgccactcttgaaaaggctgtgggagaacttaagctgacaaatggggtccggagagatctgccaccaaaaggaagcttccctgactgggcctgccaccgcaacccaccccttatggtgttctgttttcccccacatggaaggctgggaaggtgggtggctggggcaagagatggagatagacagagaagcaaaggcggtgctccttgtccttaccctgatactccagcttgaatcctggccgattctgggagtggtcgctgtggaaatacacggtggtctcgtgggacgtggagaggagggagcttggaagctcgcttccactgaatcttcccatcatgcggctggtctcataggggccattccggatttctatgtagtcgtggttgggctcggtggagaagttcaggaactggatgtgagctcctgggagcaagacagaggcagacagtgcccaaagcaacacagtcctgcctcaagtgtgctgcctcatgaaagcagctcctgccagagccatgagtccctgctactgatttcccacccagccaaggctcctagaactggctttgggaattgcccgtccagccaagtctcttgtctttgacagggctgaacttaaaagtgtattattcattcaaaaataaaggcatcagtcatttcagagctccactggagttcattttattttgttgaaaacaaagttcagggtcaacacttgtttaaatttatgattcatatgtccaatatcagcataaagatagttttgctagaataaacttttcatttaaaaataacacccccaatacttaatcaaaagacaagaccttcaatactgctgttttctagaactcttatgataattcagaaacgtagggcttagaagtatacattgtcccctctgttccataaagaagccaaataaagtttctactttgggatcttagtgagttaatcaagacattctagcaacctgacaggttaaataaatctaattaagttcttaatgtacatagtaatatactctttcaagaacgaaggtgggaacatttatgtttgtttactgataagatttttcaaaattagatcaccatggaaaatgttattgaagaaatatatttactgagcataggaaaaagcccatattgcattgataattgtaaaaatcagatgacaaatagtatgctgtatacaattctaatttttgtattataaaacatggaagaatattaatttgcctgctaggaatatttgctgggcatttgctgtacatcagggctgtgctaggcattgtacaggatgagcaagatcaagaaggtccttgtcttcatgagacttacatggtaacgctgggagactaagccattagtgattatcgctgcacgatgagattatagatggattttcatttttaaaattggcttatctgtgctatcaaataagctcagaataagcacgagtataattctttttgcatctgatcatttaaagaataaaataaagactcgacacttaatgttgaagatctttcatctcctgccctgttccattcctttcctgccctccacagaagcaatcacatgaatttggaagctatccttccagttcatggttttggattcttaaatatgtatctgggtttatgtgttttcaagatttacataaatgatattatactgtacatacagttttttacataatattgtgtttttcaaggtctatccatgttaatatacaaaaatatagttcattcattttaactgcatgttaattccattttatgaattatccaaccatacagttcactccccaactcatgaacatgcagattgtttccaagttgcagataattttgtgatggtttttttttttttttttgagacagagtcttgttcggtcgcccgggctggagtgcagtggcacgatcttggctcactgcaagctccgcctcccgggttcacaccattctcctgcctcagcctcccaagtagctgggactacaggcacccgccaccaggcccagctaattttttgtattttagtagagacgggttttcaccgtgttaggctgtgatgacatctttgtatacattatctgaggagcctgtgctttccattccactgcccaggcatcgtcccctcatataggagccctgcgggctgcaggcccacagaaggggctctttaaggatggcggaatttctgacttgaactccaaggaaagaactggactgtgaccgccatctagtggagcagcatgtagctgcagcagctctttacacgctgagaccaggtaccaagttagggacctcggcagaatccaacattaacttgaaagcaagggatcccgggcctttgcaactggacccagcagtagcttcttccctgaaacctgaattagcacccagaatttagaggtgaaaatggtggctgaacataaggacttacagggaaagccacctcattcaaacttctgtttgcctttggatgttgccctccccaccttctatcatcttggttctgcctcaagactggatgcagaggtacagggtctcccagatcctcttaatgtctcaaagtctggagtctcctaagactgccgagggcgtcatcgctttgctcccagtttccttcagaagatggtactgaacacccagtttccttcagaagatggtactgaacagaaaataacatctttcagagggccaccaagctctctcctcccctccaaccggatttagagaaggccagttagactgctttctcccaaaagccccttccctaatctctaatcacactccaggctgaataatgaaggataaaatgggagatcttcatttctgaggctcacagactggcattcagggctatgcaggcataatccccttgggacatttcattcctagaagcagtgcaatggcttgggcaagatgacccgtgcgtacggcccatcagttccatgtcagcacaaagccctcatcccttcaacagagacatttgggttaaatgatattcccagtgcataatatgtggatcaccagcaattacattttgtacccacactgatgtcctccacaccctgacaacctcccatgcctagcatactccagctccaaaaacaaaacaaaacaaaaataaccccccaaaaccaaaaaaacaaccttcccagtctctaggccagctagaatgtgcatacgaagaagaatgcaaactcgatttctcattgatttggctcaatttaattaggatgataaattagacactggggttaaaagtacaacttgaggtccagtctctgtacgacagatttccgccccacccccgcctttttttttaagtccctgagtaatttatttttattttttatttttaatatcaagtgatacagtgttagttaggtataatccgagtaatttctcattccacattcctggattttagtttatggctcaaataataataatggcaacccctaagatttttctcccccctatatgttaatctctgccattcttaattggtcttcacaattgtacaagaggtcaacagatgagaaaacagagaggcagagtactaaacagacttggcccaagtttgtgctaagagattttggcggacagtagttttaagctcaagggtctgggcttgaagcctgtctcctctgggggctgcagagacttaccaaagcccacgggcagtgctattttccaggagcagtccatgttactggggtagttgcctgggaagccggggctcaggatcaccccctccatctcctccactgttcccccacactgtgctgtgacaatgagatgagacagagggtcaggacaacatcaaggggtgtacagggccctgccaatgtttggaagctcccttcaagcagcagtttttaagctttcatgagtcatatagccccttgagaatccaaaggaatcttcttaaaagactaagcccacgggcaacattcaatatgtacattcaggaagggaggtacattctaggacagcctaaaagtccacaaacccaagttatggactcttgaccttgaacatgcccttcacaggtcagttccctggtgaggatgtccaggaaaagtgaggaagttctgtgccaaaagaagtccaaccatttcttaccgtatcccccaaatctccctctcctcactgcccaatctactctttcaagactgcagaaaaaggatgaaggaaggggactggcatgcatcaagtccccactctgtgcccggcaccatgccaggctcttctcaaatatatatttcagggggcagggtgggcggcaggggaggctcaccacgagcccatcctcagaaaagtgacggtgatcagcatcccacaggagccaaccaccaggctgtctgagtgacccaggggcttagggacatctgatatgccaatcaaggtgaattcagagtcatctgaggatgcagggctggggcacccctgcagtctggtcagttgacatcagttcttttcttttgcatcttattaggaaaaggttgtgtgaacagaaaggggctagccagtcttagagacccagggaaaggatcatagaacagggattggcaggtccaggcaagtgctttctggggagaggacagcttggcaaacagacccgaaaacagtgcagagtaggctccagcctcgactgcctgtgtcacaatcccaccttcacttccgatgggaccgtgggcaagttcaaaaccctccagaactcggtttcccacaactgtaaaatggaactagtgacagcacccttctaatggggttgttgtgaggtcatatcagaaaggactgcatttacttgggacaaggctggcacatgttgtaaacccctaatgaacagcagctgccgttaaatgaatggtttccatagcaaggtctttgtagtctctaatgggggaaagtgccttgggctgaccgttcacatttctgacctgctccacagatgcctatgccctacaccgtggtgaaaccacagaagagaaatgccatcgtgcttgagtgtcactcccttacctccctgccccaaggtcagccttgaggggcacctcacaatcgactgggcaccagagaaccttaggtttccgttcctgactctgccacttcctttttaatcctaaaagactgagatttcctgtttgcaaattgagggtaatggtacctcccctgcagggctgatctgaggaaatatgaagctccatgcctagcatatagtagatattaaataaatgtgcctttcttctttgcctaactggaccagaagcttctgaaggggagatgctgtcttttcttgtgtctgctgatctgctcatcactgccgtagcacagggtaagggacgaagccaagtccttgtttcgcacgtagccctcagcatttcttttccttttttcttgtctttcgttttttttttgggacggagttgtgctctatcacccaggctggagtacagtggtgcagtctcagctcactgcaacctccgcctcctgggttcaagtgattctcctgcctcagcctcctgagtagctgagattacaagtgtgtgccaccacatctgcctaatttttgtatttttagtagagatggggtttcaccatgttggccaggctggtctcgaactcctgacttcaagtgatccgcctgactcggcctcccaaagtgctgggattacaggcatgagccactgcacccggccaacctcatcatttctttattagatttgtctgtctgtcccacaagaagtcacgggggaagcccaaagtgcctagaaattccatctgggatctggttgattaactagagccagaacggtcatcatcatgttttcaaatgggcagacctcctgtaacttttcatttggtggggcagagtttccaaaagtgatgactgcattaaatgggagttagagattataaaaacatcagtttaaaatgactgacttggaacaaatccagaatatcaaactttcttctgatttgaacttgaactcaatgatacactactgagctaagatccctgagagaaaattggttggaatgaattgtaaagtctgggctgtcttaccaatacagagtggaggagggtagttccatcgccgcactgttccgggcatgcaggagatgtgggcgtggccctggaggaatcaggaacagggatgggctagctgtccccgtgggcacaattgtatgtacaaccaggggctgtacaggggtctggttcaggggcctcatgttaaggaacaagatacacaaagacacacagatccactgtgggatgggagtgaggtagagggagagagaatttggggaaggacaattattaacaacgattactaaagaattctcattattagaggtttccttgtgagagtcctttaattactaaattccctgatggccttcaaagggaaattaaatttccctaaagccgaatcaaacccaactttgcaggaacacattggaggttggcttgtgccaaattgttaaagtcagcagagtttatcttttgcatgaacagctccaggagaggataatggtacccgggggacctgggggctgctccctgttctttggtgactgtagctctgctggtgtaaggctggccaaccacatctcaggggacacctgtttcctgctctagggtgtcaggggaggtacctggagggcatatcccggctcacactggaaagacaccacatcattcaccaagtagcgctcgccagtcttcaccccgttactgggcacagcaggttccggacaactgctcaggcccaccgctagacaagacagagacagaaggaaaggagaatggactagcccagcaggtcaacgtggcggtaggctggggtgagatgctggtggcagggagaaggggtgcttctaatttgtgctttctctcatcctgtaggctagttcttcccaactctcttcaccttgcagcacacagagaaaaagagtatatttacatggcacggaggctcaacagaccaaagctccttgagaaggtgggtgtgatcccaggggatgctggctgtcctgtccactcactgagctcttagctagggggcttagctagggagacttctctgcatgctctcctcccacatccctcctgcttcttactcttaactcccctctgtcttccttaccctaagaagacagatcctgtgggctaagacagagagacagagagagagagagggaaaagaaggtcaagaaggaaggagagcagggagggacacatcagcgatgctcaggggctcagttagagtccgactttccaagactctgagaaaagtgtgttagcagataagactctccactgccttatttctcctgttgtgttttcaaggtcaggccagcccctttctgggagcagcactggtggcctctcacacttcaactcccgtgttcagctctggcctcactgagcactggccccgctaaaaccctccttcatcccctaccccaagccactgctagtccagtccaccctgcactcacaggcaactcgtgttgcttaaaatctctccttgaattgtgggacctccttgctcagtgatttgaagcaggtcctcatggcctataatatggaatccaactttctcatcctgatgttctaaggactttcatgatcttggcctagtcctctttcaagatcacctccacaggatctcaaatgctcctccttcagtctcctttcttgacttttcaaattcaacctgcactcatttattcctcattacatgcctggcattgcacacaatgttttgctagagcacccagcttaatcttcctcctcctcctttctgccagtccataccatcttcccaagagaagtgctcactgagcacttccatgagcaaggctggggcccattggtgagggtatcccctcatacccttcaagcaggtcttcacatcccatttcacagatgaggacacaggccataggaggcactgaaacatttccttagtaagccacagacccaggattcagaccaagcccagtctgaccccaggtcggccaagcagaagccaagccctgaggccacatgagcccatgtctgaccctgtcccctgctctccctgcctcccctcctaaaacagtcctcatcctgctttgaatccctccctggctgcctcccacacagcaaatgggagtgtagcatttccagacagggggcttcctgcctctcctgtgctctgcaggagtccatgtacaggtgcaggcacttcacatgcactaaaaagtttctgtgtcttgctggactggacttggagggcacttgtccaggggcaagggccagaagactcatgaggaggcggagaggtagctgtaaactctaaagtggtcttcctaaccaaggcggcagaaatggaaggatggcagaccgtatctgggtggcatggcccagagaatgtgggagatggcagccttggcccttctggaggctcccttgggggatacaggctcctttgggggatacaggctccctgaggagcccacgtgtatccagtgcccacaggcagctaggggctcatggaaaagaaacaggaaaggaccaatcagcctagaccatcagccaccaacccatcttcccaggcagcagctaatgagtcctcatgccacattcagagatgagactctgataactacatgtgctttttttccctctgagggaaactcacatataacaaaatgcaaaaactgtgcatgaacatggtaataatcaagtaaacatcataatcttgagtgtacatgtgctgagttttgacaaatgcctgtacctttgtaacccaaacacctgtcaaaaccacagaacgttgctatcactctggaaattcctcacacttttcccaggcaattcctgtcccacatgtgcttttaagatatgagtgtgatatttggaaatgaaaactctttgagccttgtccaaaactctcagcagctgagacaaaagaccccaaggacaagcattaaaaaaaacccatcaaactgagtttcaagtgtttcacttgtcatcttgtctatttctccccattcctctccacactccaagtagaacaaaactcactatttagtgcagtagttgcaactaactagacctacttattggaaagacctacttactgtccagtgatggagagaagagcagaatgaggacaaaaaagcgtggtaggaagaaaaatggaatgggagaaagatgaggctgaagagaaaaatggagggggatatagaaaagtccattctaacttatcttatgctacacagattgattttatttaagccatgcttacaacaaaggaaaaattattttttatcatatgtaatttattacttttgaaagcatattgctccatttccatttaaattaaataaacaattatgaatcatagcagtggatgtgacttttcagtacccttcaaaaccatttgcctgtacaatagcagttaattctctattgtctgtgagctctttgtagattatcctacaaaataaaatataactacagggccctggctcctaggaattccagtctccaaataccagtgggaagctctgtttctccgtagctcttcccatcatgaggggacaacacatgaaatgtcagctactgggaaaactgccagtccccttggacgaagaaaattgagaagaggtggatttttttcctgggaatgaggcagtagaatggcaaagtgatttacaaagaaaatgtatctttggaagaagaaagaacagagaagattctagggaacatttaagagctcaaaatattggatagagaaaactggagagaacagagaagaagggatgaaaggaaaaaaatgtgatttagtcgagaaacccaggatatttcactccaccaggggagtgaagccttacatatctgctggaaggagtctcagaggtccctgtcctaccctttaccctgcagggtctgcttctagctgtcctgggtcttttttttttttttttttttttttccaggtgcatgcttcagttctttcaggtgatgagcatcctgggacctgtttaattctttctgaagcagctggatgaagttcatttgtttcacagacccagatgggcatgtgcataacacagttctgacccaatcagacatctagcacccagtgggccttctttctgcacaggcccatgctgtcgcagatggtctagccaaccatgccttcctgcatttttcacttctcattgcaaacttaactcaggcatccccttctgcaaggccttacatggctagctttagctcctttcctttgtactttcttagcatctctcctttcctctgcactttcttaggtttcactaaaatgactgtgcccatgtccatctctccttctagattttgtgcttttgaaggcaggggccttgtcttattgacctttgtactgcggggacctaacacagggcggggcacattgcaggtgctcaatgtttcttcacaacatttgcatctccacccgcccacaaccattctctcccttgaaccatttctctaccatctagagccatccatgagagcacctgtaatgctgtcatgcacctctctgtctatgtgtctacctctctttagtggactttgactgacccatcttaatctttcccaatcgtggcaaaacccagcacagtgcctggcatgttgtaaatgctcaataaatatttgccgaataaaagtgtaaaaaatgctgctgcctacctattctttcctgtacccagtggagaaagggggtagggcaggcagtcccagtatgcaagcagtttccctagaaacctctttctttgttccccagaaggcacatccacaaatctttctctgtgaagagtatttggtagtgaccacttagggatgccagaagccaggatataagggtttgagcctgcagtgagaaatctggtagaagatgagtgaggtagccaatgaaaggaggaacttcaaaaataatcgcatcatagaactaggggttagaaaggccaggttttagacctgggggaggaaagcacaattttcttacatcccaattatatactgggaccttggccaatgcaagtccccttcccattcctggtgtggatactgaacaggcatacaggttttcgagtaacagacacttggacgagaacacagccttgaggaggtttcagaccttctctgggctttagcatcttcacctaggtttgtgggaaggcttaagtgggatggacaatatgcagctccagtttaatccttgctcagaaggggctcagcaacttttaggtcccaccctgaaccctgtaccagccaagaccctggattctcacttttgtactccaagtggaagccagctgcagatacgctgatatctgagtagaaatgaaggtagagctggttggaggtgctgttcagaagggcaggcacggttgttcctagggcaaggacaccagggaaaaccatttaagtttggctcctccaggcccttgcattcctccccattcctctggattttgctacctgctgacattctgctcccaaggcccccagatgtccccagttatgaaactcactaaatgacaaattagcactcctcagagggctaggtctctactggctgagggaggggaaactccaatctgcttcctgtaagatgagcagtggcagagccatgtgcccgcaggagggtgagggatgagttgggtctcctcatagccatcttcaggataactctgacctgtattattctctgggcagtcctgcagtgtggacagtttatctgaagcatgtgactcctctttatctcttggccacctagagttctgggcctaaaagattcagataattgccctggccactgggcacacctatacaccacactcagtcagaagtccattactagaatggcaaaatggtgttgccactttggaaaacaggaagttcctccaaaagttaaacatagagttcccacatgacccagcaattccactcctaggtatatactcaagagaagtgacaatgtgtgttcacaccaagacttgtgcatgagcattattcataacagcacaaaagtggaaacaagccattgactgatgaatggacacacaaaatatgctctgtccttacaatgaagtgctgaaccatactgtgactgggggaactttgaaaacatcacgttaagtgaaagaagccaaacacagaaggcttccatttatatgaaatgcctggaataggcaaatccagagagatagaaagtagattactggttactagaggctaggtgtgggctggggaggggagtgcaaatgggtacctggtttattttggggtggtcaaaatgttctgggattagatagtagtgatggttgcaggacctttcgaatctcctgaaaaccactgatgtgtccacttgaaaatggtgaatttcatggaatataagtgatatctcaataataataatgataataacaatgttcatgatgatgagctctagtactaccctccaaattgaagcccctggaaacccagcttacctgagaaactccccagcatggttacagtgttatctgcaccatcaaatacttccagcgagtcccagttctgctctgtcacaaaactgacaacttggatctgggaagggagaagagtgaattgttggttaggcagcctgcgtccctccctccttctctgctttccctttctgcccttcccgtagttaattcaatttgttgagaatctactctgggcctaacactgtgctagtccctttcaataaaagtaagatgcagaaccgactccaaggagctcgttgtccagtggggaagacagatgtggaaaaaaatgattagaagacagtggatattttgcaaggcagagaatggggaaaagaagttccaggaagtggaaagacagtctcactgactgtctcctcatctctggaatgttccttgggtttccccactttcctgccttgatttcatcagacgtcctgcagcaatgagcccgtaacccactcctgcccagatctgtctgctggactcccagtttgctgcctctctgttggccttgcaggctcctgaccctcttccctgccttgacgccaatgctggggcctccctctgcctggctcttacccctgggtaccagttatgcccccagttcagcttctacagctcatgctgtgcgtggttccctaggtgtgtgcctgggggttctctgtgcttcagctgtgctgggtgctttgctctttcttctcattagcactgcctccccttctaaccctcacaatcttaagaaaatctttagccatttgaggaacaacttctatgaatccttcccacacttcagattccagctccaggcccatttcttcttttagcctcccctcctggccatggccaatcaatgcccacctctcctccttcctgggttacccgactcccaccgcatgtccctgaagctcttggggcctggaacctgctgtgttttctgcatgggagccacatctccacacttggactgagcctccttagccgcaggggcaggtacagggctgatatgtctcttcctggctcaccctgactcaggccttggcaccagccagcacctgtggttgtcacctgtgagctgttacctgggagcagacggccacctgcccgaccgaggcgcccccttgcccctacctggatgccagcgccttcggggaccacgatcttccacacacagttgaggctgttgaggtacggctctgggaagccaggggacaggatggtgcccctgcgctctgtgaggttgcctccacacggcactgggaggagaggccatcgggtcagaggctttgtggcctcccgtgggagccttcccaagctgactcctccctcatggcccccagcctctgtttgtcctcctccccatgggggtgtctccctaatgtccccagtcctgccttctccacggcctctccccatgcaactctgttcggggccctgggcccagctcctctctccacgtgtgccccgtccccagtacaccggctgtcttcacacagcccacagcgccggggactggggttgactgggacaccccacctcagccatgcggtgggaagcggctgctgtgtgtcgtggggcatcactggggctgactgcctcccctacagagaaaggactacgtgccgccccccgcaccctcaacgcccgggtcctggttactcacccacacacgtgggcgctgagacattccattgggccaaggccccaggcacagggaggcactcgatctctggcgacccctgcagggcatagccggagttgcattcgaagcggacgatggcccccaccgagaagtcactgcccagcctcttgccatagcggggttccggcacagagctgcactgcgtggcgctggttcgaggaaccgctgtgggggacaagggcactgaggggaggcctcacccctcagaaactggcccagggacggacatacaacgggtctggaacaaagaccgtctggatgaaaccctgggaggctctggatgctctcccgtagggaagggctcgagggctaactaggaggatgcctgttataccgaattatagttggacacacagcgctacagcacagctcctggaaagcacgggaggtagagccgtggacctcccacagaccttaggcccagttttgttctttgctttcccaacgacgcccctcactcatcagggtcccacgttccctagcaaggagaatgggccttcctcctctaccttcagggcctttgccctgcctctgtcctgttttccccatgtgccttaagatcctgcctggggccctgccctccatgacccccagtctcccctccctcctgccgcccagaatggctgatgggcccgggatggcctcccctgtgataggatcactcctgcaaagagaaacacagctcatcctgggcagagtcgaatgaacaggaccatgcttagaacctgggccctacaaaagtggatgttctcctgggcaagcagaggttgggacctgggggtgaaaaccaggatgctccaaactacctttctgggccaataaggaagggaactaacaccaactggctggttggtaccagctacttcccgaagcctctttgcatcctatcagtgaggcattgtgattgcccgctccttacaggtgagcaaacaggctctgaggcctggcgtagctggagcctagctcgaaggtggggaggtgggattcaaatcgatgtccacggcacttcaaagcctgtgttttccccgcacctttactgtgcctggcagacaaaaccaagctccaggggagtccaggtaagatgcctgggctggtctcttcagtgccatctggaccatgccagacaatgggtggagtggggaaggggaaaaaactggctgcctttgtctgatttccttcctcattaaacacagaacttgtctaagaaatgtctgctgagtaagtgaatgcataaaattaactggatttcagggaattgccctacaaactagtaactgcccccaaacaccctgagaaagggactcagactagaggtcaaagatccctgtcccttcgatcacgagtcccttaagaaccgagatcaccttcctacctccggcgtccatgtcctccataccttggtagacaaagtggaagcctctggctggtgcgaggcctttggcgctgaacttaatgagaacttgattggaggtggccaagggcagtgattctcctgccgagataaggggcaaggaggagagaacagtgagtccagcaggtgggcccagaagataaaatcctggccaggaaggaggggctgccagtaccccatgcagcaattccttccacattccaggccttcctgaaataaaatctcacgtatttttactgcactttacaatttaaagtttatagaaagctttttcattcacggtcttaacttgacctgtggtcactgtgaggttggcatgacagagttcagtaccctcatttaataaagaaggaaagagaggtccagaaagattaaatgacctgtgccggaaaggagaaggctgctagggatgtgtggagcgacagggatggagacagcagctgttaccaagccggctgactggtggtttacttggaaaactgacatcaatctgagtttttaaaaatagcattggcctctaggaaggaggatgatgtgatcatctaggagcaactggtctttcccagacactctcccaccatcctgtgaaatgattaccagagcgatggtgtaatgtattgttcatactagaacatttttgagagtcaaagaaagtgctatcaatagttatggtgggactgtcccaggcaaaccaggatgtactattgccggccaataacacacaaactggggggaacctgcatgggcacaggaaaccagggtagactgacagcttttgtagcagaagacaaaggtatatcttctgcttggtgcagtacagatgggccaggggagagacagcaccaactggacctgcagccaattagtgtagttgccattctggggaagcgcagggagaacatgggtggaggcagcagcatggccactctgcctgctgcccccctgcagcctcagggacccctgagaagcgctgctgaccccagaccccattctcaggacgaagcagggattacagagaaccaggctctatctccactacagtgagggctagagttgggacccacaacggaactactgggaggtccacctgtacttccaggaagctcatgtgatgccaccaatatgggagcagagagcttttgcaaggcaggcttagatgtgtatgtgacccagaaggctgagcctggctaggagtcattgtcccagctaacagttattgcccccagctaacatgtagctgccaaagcagaaagaaactcatgaaggcaaagcatccctttgatatcactgccatctccaactcctcctccagatggatgtgagcagagtgaaactcaacttttctatttggcctgacagatgtggataacgaccctagtgagctctcacagaacccatgtcaactgcagccctgaaggcacacgggcctccatcttcaagggagagcaaatagtaaaatcactggacataagaaaaaatgttaaagttttgaggaaggagatcactctaagaagtcaaagcaaatactttatgtgaaccacaacaaagaacaggcaaaactctcagcagatgttcagtcatggttgtcatgagattaaatctagcattgcatctgtgaagtcagaggaagaaggatctgagatcaataaaggctgcaaagagatgagaaatgctagtgcaagcagctggattccacaaaaactgaacagtgaagtcgagatgaaatttgggaaattctctcagaatccacagaaaaaggataaagagattaaaataacgagagaaatgacaagtgacgtgaaagatgaaaaaaaaatccatatgcatgtatcaggaatttcagaaagagaagacagagaaattgaaggagaaaaaaaatcatttaaggcagggtgaagtagctcacatctgtgatcccaacactttgggaggctgaggcgggcggatcacctgaggtcaggagtttgtgaccagcctgaccaacatggtgaaaatccatctctactaaacatacaaaaattagccgggtatggtggagcacacctggagtctcagctactcggaaggctgaggcaggagaatctcttgagcctgggaggcagaggttgcagtgagctgagattgcaccactacactccagcctgggtgacagagtgagactctgtctcaaaaaaaaaaaaaaaaaaaatcatttaagaaagaagacacttttcctaagatgtgaggtacagattgaaatatttgccaagtgcaaggtagaattagtgagaagagacctccaccacaacacctcccagtgggctttttaattaacaacaacaaaaaaagaaaatcacatagacagaaaagcacaggttacttacaaggacaaagaatcacgttggaccccaatttgtctgtaacagtaaatgttggaatagagtggaataattactgcagttttgaaagataaagtttgacccgtaatttgatttacaatcaaggtgtcatttatatcccatgtcaaaaggaaagcattctcatatatgcatggtacagaaagtactgcagttataagccctactgaaaaaaaaaaaaacaaaacccaaaactaaagtagggaattcagacaccagcagggataaatacaaccagaaaagtataataactattgtcaatgagctaacaaaacaaaatgcaaatgcaaattcaaaaatttgctcttggggaagaagtccacaatttaaaaaataactactataacattaatataaaagtccaaatatatcaagaaaaacttgaaaattagagatgggtcaggtatgtatggaaaagcgaggaagcaaaatcaaaacaacacaaacaaaagcgcagaaagaacaacacaagatgacagatatcagaccaaataattcacttgtaaaataaatgagtcaacttcctcttaaaagagaaagacttggagaaaatgagagaagatatgtcaggaaaacagatgcaaaaattgctagatatacaagaagacaacaaaatatcataactgtaatgggaaatactttcatgcaacattcacaatcattgatacatcaaatagaaaaacaaaatgaagactgttgagtagcggtccttaagctttttctcccccaacgcaactcagggacagggacatagtgcactcccatcagtaccaatggcttgttatcagtgtttctccaaatgaggaataagggactctctgaatatactgatattgatatctacaggttttttttttttcttttgagacggagtctctctctgtcgcccaggctggagtgcaatggcgcgatcttggcttactgctacctccacctcccgggttcaagtgattctcctgcctcagcctcccgagtggctgggattacaggcacccacgaccatgcccagtgaatttttgtatttttagtagagatggggtttcactgtaatcccagcactttgggaggctgaggcaggtagatcacttgaggtcaggagttttatatctacaggtcttatacatctttctctctttctctctcactctctcatcttcctcccccatcttcttccttccttccttccttccttccttgcttccttccttccttacttcctgtttctattggtcctatacacctatatctacatccatatttacatctataggtcttaaatgtagacctctctatagctctttacttgaaaatccttactataactctaaatctatagctatacattatctatctatctgttttgaaaaggcatcctactccaggagttcctgatttacactcttggttgggtgtgtatgtgtgaggtggtggttacaaaaaattcatttggttgagaatcactgatacaatagatctgaataacaaaattgagtaagattgatttaatggcaattacaaaactcatttactcctaacactaactttaggaggtaggactctttttctttgcattttacagaggagaaaactgaagctcagagaggtcaagtattgtgccttaagtcacctagaaaacaaataggagagctaagaaaagagtgtgattgtagagcctgagctcattcgtcttgcttctctaccttacagagaacacacatccttcttaaatatttagaaaactaaaaaaaaaggtccttggctactgaagggacttcaattaatccccaaagaagaaatggtacaggccacattctttcactacatggaaataaaaatataaattaacacaaaagtttaatgcaataagaacaaaatccatattcttaggggaaaagaaaagacattcttagccaacacttgggcaaaaagagtaaacaacaccatgatgagctatttaaaaagtaatgatgatgaacatagtacatatcaaaatttatggcatgaagccaaaactatgcttggaggtgaatacatcgctgtaaacatgttctttattacacagagaaaataatgaacagagctctcaattcaagatgttagaacaagaacaaaataatcagaagaaaaatatgaggaaggaaatgatgaaataaaggcagagattaataaaaaaaagcaacaacaaactgcagaataattgataaattgcagcaataaaaattaaaaaaaacccacaaaaacacaaaacacctggtacagccgagtaaaaaggggatgatgaatgcacgatgcaggataacaaaggcaggaatatcaccactaatacaaagcagggtaaacatcaccatagtacattatatacattgtggtactaaatgtaaatgaaattatgaaatggattttttactaaaagctaaaatatcaacattgatattagagtaatatacctgaatagaccaataaccatggaagaaaataaaagaaaagccactgaaaaggaggagataaaataatgagacaaatttatttgcagatgatattacttcttgcctagaggagccaggagaattagttggcagtgtaagcagtattatgaagagtctgatgactttacaaagcaaatatgccaaaaacaacagtctttgaatatactagtaaagaccagctagaaaacataatgggggaaaaaagacccatttacaacagcaacaaaaatctccatgaaatatctgggaataaagttaacaaacaatgaatactgcctaaataaaaattatagcaccctcccaagggctacagaagataaacaaatggagagacatattgtattcctggatgggaagaagagttaatataaacgtgagttcaccctaatttaacgtgtaagttttattaaatcccagtcaagattctgatgcaatgttttaaacttaacaaaatatttctaaatataatttggaggcaaaagtaagcaacaacagccaataaaaattcaaaacaaagaatggctctggggacttatagtaccatgtatttaaaattattatatagtaaacactattatagtgttataataattaaaactaaaaaaggaataaatagacacttggaagaaatggataaaaagtctaagaacagacccttcataaaaatttagtatatgtaaatttggcattttgaaaattctgctaggacaactgattaactatatttgaaagaatatggttagattccctatatcaaataataaatcaaaataaattccaaaggtattaaagcagtgtgatgaaactaagaagtgaaagaaaacacagaggaatatttatttgaccagcataaaagcaaaggagaaaactatataagaaaacattgatagatttgatagcatgggaaatttacatattctgacattaaagcaccctgaagaaaattatatagcaaaagacaagctggagaggagggctttttatagcatattatatatatttatgtagcttataaaatatggagctctactcaataaataagaaaataagtgcttgtagaaaaatcgacacaaattcacaataaattcacaaataaaaaatgcacaggccaataaacacattataaaaatttaacctaactagtaataaaacaaggcaaattagaaaatgagataccattttcacttttcaaactgatgacgcttttgtttttttaattacctggtttttgtgagaataaaacatgccctctttcttgttggtgatcaaactgacaagatctttctagagggatatttgataatctgcataaaaagccttaaagatctcacatatcctttaacttgacaattccacttctagatattctaaagtaacagaaatgtatataaagatgtatgtacaatacattgcattactattcataagcacaaaacattacaatctaaatgttcaataatagggaattcgttacataaattttaactaactgtatgagagactactatgtagcacttaaaaatcctagcctagaagaaaaaaaatgacagagaaaagctcgtagcgaatatttcaataaaatatgtatattggtttgttgaataaaatatgtaaacgtcgaagtagatacaaagactggaaggaaatccactacatcttgtcagtggctctttcggggtagtctttattttgattctgtatgcaattattttgttttgtcactaagttttctataatgaaaatgcaatacatttatagtaagaaaaaaagttgcatctgaatacgaaccaacaggagaaggctacaccacaagggggcggtgtagacacagtctgggtgagggcagctgctgaaggccccgctagttggagctctcacgagctggctgctgcgttgtagacaagcaccagaacacgacaggcacgcagagccgtagggttccacctgcggccatggggtgcttctagagcctccttcctttagccggacgtgatgcccccggcccacaaccatccccacactggccgagccccggatacctgtatgggagcccgagagggagctgaggagccgcgagtgctggctgtggccgtcgtgaacctccaccacgtcgttgagggccgtgtgaaagaaggcgaactggccaaacaccactgtggaggagacacagtgtggggactgggcaggcacgctgggggcaggagaggggatctaggggtctaggggcccaagccaggaggagggcagccctggggaagttgttggttcctgggctgtggcttgctgcactggttagtgcagtggcacagtctggcagtggccagacacccggcacagggaggcggggagctgggaaggccgggctggccttcacaagggtcaagacaacatggagggctgcacccaaaggtcaggcgggtagaggcgaaatggagccaactttgttcctttcccagatagcagctgcagcagctatctggaggccatcagagggctttgggtaccatccctcattctccatgcgatgtcaggaccccacattcatgcgtcccaacgtcagttagtcagtgtcattgagttgaaaactgtatacagagatctgtagtcagtgctgtgagctccttatcactggagggatccaggcacaaactgcatgcccacctaccaaggattctgctctgggtagcagatcagattggacagcctttcaggacttttctaactgcgatcctgcaggtctgaggcccctgccacctcagtatattggggagtgtgtgtacatgtacataggtgtcctggttctggggcaggagtgggtgtactgatggctggagctatgggtagagatgagactgggaatttatagaggacagagaacatgtctctctcatctctgcaactccaggacccagtaaagtgcgtggcccccaatgggtgcttactaaatgtttggcgaacgcctcaagcatcaggccttgctctgtgcttgcccatcctgtcttggggaataaggagctggctctctgcaggctgctccctccgtcctgctcctcccctgggtggtcgggacatgttgatgtcctttgccacatccaacatcaattgtgtttagatatggttgttagtcctcctacaaagaggagatccaggaagaaagaagccagcctggtcacctggttgcccttcatcttcctgaatgcctccaaggctggcaggactcttgaatgtccccactgccaaccaggtaatgagcctgggttggtttttctgcccacatctcttggaatctggaagtttctctgtcttcccagggcactggtctgcttttcacttttttcttgcttgtcctacctatagcttctggaccaggctttggttctcagatgggacaccagaatgatgtggctcctggtctccctcacctgcactttcaagcccagctccatcccattcctctcctccctcctgctccttggccactcaccctgggttcctaacaggtctagatctgcggcacctcccttaggacttgggccatactgggtagtcccctggggcaccttgccttccctctgtcttggccagtttctcaccaactctgtccccttggttctggcggggctcacttgtgcccttctgccctcttgtgtccggaatgtattctgcagcccgtttgagaaacgtcagcactcggccgtccttttggggagactgttctgcgattcccacaatggggctgtatataattgggaggcgtctgaggaattgctcattttggaatgagggtgaggagtcagaaaacatatgaacaacaacaaccaaaacccataccatagtccttgggcacagtaacaaaatacaagcagatctgtccactggtgtagttctgggggtagttgggggacaagaccactccgtccgaacccacatactgtcccccacagggggctgaaagagaaaccagatagagagtcaggtgaccttgtgggcctcttaccagtgaccatcctctgttctgccccagcctgagcttctggccccagtagggctgccctgaggtgggcaggccctagcttggagaaggcaagtcctgcggaccctgccctgcccaagaacgtgcacccctggcctggcatgtagcctgaaacttgccctgaagctaccgagggccctcttgggcaggtgtcagttcttgccctctacctattaaccctggcattggtccctgaagtcacagccttagggagcacattaggaacctcttctgcttacacgtggagcctagaaatgatctgctgccctggctgacatctaacctggacagtgagtgtcagtgtgaatagggagctgaagcttccccggactaaccccatggggagtggccagcccatgtgacccagccaccttctgttcctctccaaggtgcccaatttccacaaggggcgggtctgagcctgcctctcttaccatgacaaagggggtatgcttggcttttcaatgggtggtcaccaagctcttaaagccctgatactcattcctatctctcttgtcaggacccccatggctcacccagacccacctggaatcagcacaccctgcgggccttacttcaacatatctgatctctcagtgattttccctaggcctaggaactagtccaggagccacctttaaatgacttctccctggtgtgagctccctgatgtggcatgtctgggggcctctgttgagggcatgagcatctatgtgaatgggggtagggacaccatgggttctgagatgataccttgaaaggaactgcacacctagtgaattataagccacttctatacacatccacggcaaacccaggtttgccaggcttggaggagccgggcttgaggaccttgcccccctcccttccccagcccacagcaccctctgcccctggcatgccctcagttcctcagacccctgccatccccaggcttccaccacctgtgcagactggccggggattgttccacacgggcttcccatcaggccccaggatgcagctcagggtcgaggtgccctcaacttcgtagcccccgtggcagtagtaggtgacggaggagcccagcttcaggtcggaccccacccgtgtgccgttcttgatggaaccaggatcaaaacatgactcccgcgggttttctgggaaaaagaaatacaaacacgtgcacacacacagagggctcatgaggaggctattcttgggctccagtgcccatgaggagaacccgactttaattagccacagagcacacggggatgcgtgactgtggctcctattcccctcaggtctagaaacgtctctaaatttgggtagaaattgaaggatggaaatcacattgaagagggcaatttcccctcctccccccatgttcttgccttgacccacagaggaaggaggcccagcaaaatcgctgaggccctctctcatcccctgcttgctcctccccaagggaaacatgtgtttctctggctggtgggggctgacagtccctggaccacatctcagctgccggcagggtcactgtggtaaaggtcagtgcttaggtacagcccatcactttactcatctttgaccccccacactcagcagcctcctggccttttgtgttcacctgagaagcagggcagacagtctgcttttggagatgctctttctcttcctctctcttctgccccatctgtaccactggctggggagtagagctggcatctgttctgcaggcccagtcatacccatctgttgcaggttcttctgagtgcatgggtaccaatacttagattcagggaggaagtacaaaactcacttccacctctgggttgggttacccgaccggtgggataagttgatgtctccagtgcagttttccagggctctgcactgggtattgggtgcttgccagtttatgaaaaccacagtatttttttcatgtggctattgacccttacatgtcttccctatcagtcatacagtttatgaataaacagtcctctactctgtcgctctgcatcaaacaagaccactcttgacattgcctgtggcttgagagtactagtccaagtcccaaatctctggagtaggacactctccagcatccctcaccatcagctggaaatcctgagcagcaactgggagcccatgctcacgcttctatgcatgattacctttcctccgtcctccttgttctaagataactgatggtcaagagggttgtcaccagggctgggcagtaacaggatacagctgaggccagtcagtaccagggagatgcaactgagtatcaggttgactgatgagcattttggaggatacattattggggggcaacagagaggtctagagatggggactcacaaaagggtgctgacagtccttgcagaaggactcagaaattcaaagagtggagttaaggagggaagaaccagaatagaagggatcagtgttcattcatcagagatgaatggctcaggaggaattttgctgagggccgtccttgtcacctgggtaccttttagattacctacacaggaggcggccactacttgaggctgtcactcagctgccaatcatctggttgactgatgggatggaactctgagagtctcactattgcacaggagcatgtgagaagatcctgcaccttaagtcgttgcccgcagctgagagtggagcagctctggatgcactactgcatttaaacccaagtgggaccgacaacatggccactcgtcacagggcactcctcagtggtttcctcatgtgccccgtgatgcattgccttgacctcctttatcaaatctgtcttctccatatgcctagtgtctctggccagaatagaactggccactgggtgacccatatgtgagtcatagagatccagggacctgtcatcatgtcttttgtttcatctatcctttttataaattcaaagtgggttaaatcttactaaagttcagaaaaattaagtaacttggaatcaaagttcacacagctcataagaggcaaaactagctgtagtccccaataaccactttccccaccttcatccatcaataacagaactccaattttatccagagcttgaaggcatcagctaaattctacatttcccagcctccttgtgtaaacacgagttagatcatgtctgctgaaaacaatccaatagcctcccgtgtcacttggggtaaaaccaaaatccttacaggccttcaaggccctgcacatgtggccccaatagtcccctctgtgacctcagctcctgtcgtctctatgctagctttgctccaacgacactggcctctggtctttgtggctccctgtcttacctctttcaggacttagctcaatttctccttcagtgacactctttgagcagctacttaaaattgcaatactcctctccccaatgcccccaacaccctcctctgctatatttctctccactgcagttaatactctctcatcgactctatattgaccttatttttttctgtcttcctccactagaatatagatttcagaagggcagctgttcagttttgttcacggccatattccagtgtctgtcacatggtgggcacttaacaaatatcttcagtggattattgtggaacttttaaaaagactgtttaagggaagttgactcagctgagggaaatgcttattggcctttccttccttgcatctttcctccttctctcagtctggaactcagacatgatggctggaacctcagttgccatcttggatcggagataacgttgaaatgggatccatggactagcatggtagagtagggagacaaaagcagccaaggtggagctccctcatcaatcctgggcgctgtcctccagatttcttttataggaagtctgataaatgtctaccttgttcaggcaactgtgtttttgggtaactgctgcaccagcattggaccctagctgggaatgactggcccagaactttacagatgtcagaatgtcctttctttccttatttgtgtggcaaaatcctacacttttaatgccaccttctctctggcagaattctgtttttctttccctggttataacatgtatcacgctattttggtaacttgggtaagggtatttctttccagtaggttctgaactcctggaggagaaggttcatcacctgatcttctcataaccctggcaactagcacagaacttggcaccaaggctagccctatttggcacataatagaggcttaataaatggctgctgaattgtttggctgaatactttgaggcttggaaaatcaacaaccacatcaacgattccaactacagactctattctatatttactcacacgtaagagaaagatgagctcatcatcccaagcattaccacattaataataatgacatggataatgacagtgatgatagccccttacataggaatatcacttcataattttcaaggcactttccaagccgttatctcatttgtgtctcacaataccctctgcagaaggcagggccggttatgctcatgttcagtttatagatgaggaatatggtgatcagagaggccaaatgagtcttccaagcctttcagctatttagaggtagaattaagaccaaaatcaggtctttagtcagccaaaccaaagctcagctgtgaatgataacactaaatgactaaaacatcatggtgattataataaataaaacccaagcccttcaaaatgggaaaatgagaagagccagcttctctctggtcctaatagatgaggcttacttccaaaccttataactgcaaaaatctgaatataacccaaacattcaaccagtaaggaactggttacaaagggtggattagggccatctactgaaacactagcagccttttaaaagaatagcactattctttgaatactgatatgggaaggagtccaagatctattcttgggctcacatacaaaaaaatcagattacagatgagtacatatggtgcaatctcattcatatagaacagggatcagcaaactacagcccacaggtcggtggctgcctggttttgtaaataaagttttactggaacacagccatttgtttacatattgtctgtggctgcctttagcattacgaagcagagctgagcagtggcaacagagaccatctggagtaaaaatacttactctctggccctttccagaaaaagtttgccaactcctgatacagactttacattactttatatttatagaaagtatccgaaatgagataccaagctgttaataatggtattgcacgggatgatggtatttgggggcatgctaagtctttaagagtatatcttatatgcttatatattgtttgaatttttccaacaaacatgcattcctttaaaaggaggcagaatataagatagttctaatttgcatttaagaagaatgacccataacagcagcaggtggtgggaataggggtggtagcaggtgtggccgtagcttccaggcccacagtgttacttccaagggcttgaaagagaaaatacatgctttttaggaccttccattaaaaatcgattcactttggtctttcctgtgttctttcagattctctaacacacacttcaaactcttccctctgaaacgcccctggcccccactctggcacagagggcttctacttaacctttagggctctgtctaaatggatcctgctcagagaggccttcacagcaacccttctgatttgtttctcagaggagcctgttgttttctttcctaacttcttatgcttcttacttcttgctgtttccctcactcacctgtaagttacattagggtagggatgatgattactttgctccctgctgtattctcaacacccagcagagggcatggcatgaagtaggagtcatcaagcatttgttgaatgaatgaatatgtcttgcatgtgcgtggatgtttcagcacattcctgcctaggaaaaggctgccacacatgctggtatatgagaataaaggtccttccaccccactggttctgttgatatccgtggcctggagaaagacataaacctccctgtgactccattttggtaactgtatccaaaacacaggatccctgctgttctttgtttccttttagcaaagggtaaagccacccaggaggatgaattcagaatagaagtgcctctgatcaatggtctaatagaaatccacagatgacatgactgcattcagaatcatctcctagaaagtctgcccagagatgactaagacactacagtcacccttcagaagcaactgaacagagacatctaaaaacccacccctctttgccttagaaccaggtgggcttccaacatctcatctacagaagggtccgtcggtctagttgtcacgaggatgtgaactccatggaggcagagactttgtttggttttctggtctgttctcagcccctgtaagaaggtctggcatatggtagctgctcaattcgtatttaccgaatgaataaataaataaaaatgcctgacctgctcttgccccttctgcaaaagcctaatcccatgatgctgctcagtggacacttgaattaagcctgttccctcagatgatcctttgggatctgaaactggaatctaaactgggaagtgattcaaagccaagagtgatctgggcacggtggctcacaccctgtatcacactttgggaggccaaggtgggtggatcactggaggtcaggagttcaaaaccagcttggccaacatggcgaaaccccatctctactaaaaatacaaaaactagccgggtgtggtgatgcatgcctgtaatcccagctactcaggaggctaaggcaagcgaatcacttgaacctgggaggtggaggttgcagtgagctgagattgcgccactgcactccagcctgggtgacagagtgacactctgtctcaaaaaaaaaaaaaaaaaaaggaaagaaaacaacaacaacaaacaaacaaacaaacaaaaaaagtcaggagtgagacagccacatttatcccaggagaatggaaaagcaaggaaaattgatctgcagggaggggagaatgtagcaagtgctcagaaggaggcagggaggagagagaacgattctggagtgcggatgatggtctcagtctgtgcctctgccatcctgattccagtcctttgggagtttatgctttctgcccttgggctcttgtattctaaaagtattttgcttttttgtgtcagagttattgttatctgtattgttaaaatatagaaaccttttagcttaagttacttaggctgttagttgttttctcataatcatgtctcctttttgtgtcagattgttttgagtgggtttctgtttcttgtgtttttataataagttacccctttgtttgcttaagttgctctgagtggttttttgatatttcctaagattctaccaaactgtttctgcttctcacttgggaagctgtgtgtggagaaaggctcctggtctctctgccttgggtcaggggaagggttaatctcagagagtaatttcccctgtgctgagcccaactgagtccagcaacatctctctatgtggggcgctcgtaggcccctttcacctccctaagcaagacccctgaagccacagctcccaggatacccagactctcagttttagcagagccctggatctctctaaaagacatggacacagatgcttcctggatgcagaggccaattctgcttttcctgaggacccagccctgcctccctgtggaggtcctcagtgggctgcctctccatctatggttctctccagacttacagggtgtggaatgtctaaattctttgctatgggctggcaaagcatatgggacacatacgtctatcacaaatattcatgttataaatatcccacacttattacatgtgcaaaacattatgctcacactttacatcttcagtaaacagaaaagaacatgtaccgtgttcccctgggttagccccattctcccttccaaacaaaggcacaacaaatgcaataccagtgacgtaggaaaaaggaggtgggatgaaagtgggtggatcaaagtacatatcaaatacttattggcactgggcactctgcttgatgctgtgcctatgtgctaatcctcacaacaactccttcgtttagtgtcactgtccctttttcatggatgaggaagcaatgctcagaggagttaggcaacttgtttcagggcatacagttatgaagtgatggagcctaccctataaagaaagatagtgtacatgggaaaatatcctcaaagccatgggacctgatagcaaagtagacccattccaggaatccagggatcctggcataggcagaagcagaccagagggtaaggtaggggtccctaggttccaccaaatgggctactagaccagaggcccagggagatagtagagggtgactaatattaggaggtgtgtagtctgggaatgaaggaaggaaggaaggaaggaaggaaggaaggaaggaaggaaggaacaaatgaaataatgaaggatgcttgaggcttccaacaggcaccccctacccctcaaacacacatagttatctttatcttggtacttgcactacagatcctaatagggtgatgggggatacgtctgtaggatgtgcctctcttctcccctctctccagtaattggctgcttggctggctccgatggcagctggggaggtcttattccccgggttatggtttagacctaaagacccctctagatacccaccttgggtcaacaggcaaaagtggaaagaacttcactgggaaagaggttttgaaagtatggctctcggaccatgaatttccttggagaagacctgggggagagatggccacaggcaggtaggcatgaacaaggtgactggagaggaagctcagggggtttctacccaatagcttactgtatccagggaagctgaaatgaaatcatcttataaaaaatgaggctgacggggtgacatttggggtgaattttggaatctctgccaagaagaactcagttgggtcaagtcggaggcagctctggtggttgctaaggcttggctgggggaaaggacatcactcgtagtgactctaagtatcacgtttgtgcagctttgtctgggtgtcctcagctgtgtgggtgtgggttcaacaaagggtacagttttgcaaggtttatgcacttggaggactagcgggcaggacaattgagggtactgatgagaatatgaaggaagagatgaataataagaaatggtgatgatatggcagtggggatggtggtggtgggagcaatggaggtcccagactgggtctaagttgtggcttctgtttgttagaattccaaagtgtctgactgtgctgatatcagtgtgtggaagagggtttgggcccaggaggtttaccaaatggcaggtgcctggaggaagaaaggatggcagaatatccattgcctaggccagccccgtgaggcaagaagactacaagtaaaacattctccattttgcacaccagtcttctagaactgtacccgacaaacaggagataatcaagaactatgaggagtccaatgagttgatggatatagagcacttaggctggtgctggcagtgggaaaacactaagtttgccattgttctaattagtgttatgtgtgagctcatgtgagatattcccaggggtggccggaaatatttaattaggggacactttaaaaggtatctgaggtcttatgttatgcaagtggggaacatgagccagaaaatttttaattttagctggtaatgcgaccccatttgtatgctcaggctgatgaggcctgggtgaacccgggttatagtaacaataacaaaatctatcattcccagagcatctgtagagtgtttagtacatatggagcattatacacacacacacacacacacacacacacacacacacacacacacacacatatataaaatatgcatgtataaaatatcttttaatcttaacctcctgcaacataattattactagcaacaatttgtagatgatgttccaagagataatacttgtcaagctcacaaatcaagcaaggaagggagctgggatttagataatgggatttgggataattagggaagactaaaaggtcaaaaagagataatagcgtagaagacagtggagtgctcgagagcctggaactcctcttactactactaatgatacttgaacattacagaatgcatgatatgtgccaggcactgtaccaaggactttcatgtgtggactcactgatctttacatttctatgaagcaggaattttcctaccatcgttttataaaggaagaaatggaggcttcaagaggttcaatgctttatccaaggtcacgcaaatgttaagtcataaacatgaactttcaatccaattaatttgacagtcaatgctcttaactgggcagggacagcctgtttttgtaagtgaatttttcttcaaatgcagccacgcccatttctttctgttttgtctgtggctgctttagcactacagtagtagggctgagtagttgtgataggtaaacctacaatatttactatttttaggggaaaaattgttgactcttgctctctaccacaacactactgaacttgccttaattagcacagctggaaggatgagcaaatgtgatcaggaggtatcagaaagtgaccagtctatgacgaggtgtcagagtgtggccaaggagtgtccttgggacagaggtctaagcaccatgaccctaggattagatgggctgtccatagggatgttgaagttacccaggatggtgagaagctctgagtggagaggaagattgtgcctcatatcagaatcctctttagtgaagtggagtgaaggaagataccagctgatagctatgaggttgaaatagagttaggaatgaccctcatagaaaaagagaagaggactagtggttggaaatagatgaggtgcaaaaagaatgctggttcccttttttcccacccctggagaatataggggtgaaagactaagcccagatgggggccgcaggaaaggcaggtttctgcaggcggcagcagtgctagggttggtgtgggcttgctgtggtccagcccagggctctcctcactacgctacactacttgccctctgccttgttagctggacctgtcctcagtactctctggcaccagggcccttacctgtatagtcaatgacgaagccagcattgctcacagatgcatcgctgcggaaggcgaggaagaggctgttgctgctgctttcaatgcggcctgggagctgggagccatagaagcttcctatgagagggctgagagagtcccgtccgtcgtagatatggaggaagtcatagccaggctccaggttaaagctggggaacaaaaacatcccacccccaccccactaaggtcaaataaaggcttttgccggggtcttaggctcaaccaaagcatagggcctcccagggagcaagcccaccatcccactggtacccaacccctgaagactggctggtgggaagggagaagatgaggccctgatgacctcagtcaggtgagaagatggaagaggcaggctcaggggcagaggagtcagattccagtcagtgtctaaaaatctggagctgaaaacctaacgtcctccttatacagaagggaaaatgagttgccaactctggacaccaagctgtcaaccaaagtaggtccaaaacccaactctcttacctgacactaatgtccttatactgtgctcttctgaacctcattttctaagagagaatgagccaactatggtgccattctcagggaggaagggacctgttaccatgaaggaccctagctttgtgccttcatcccaagccagtgctccagctctcctcagggtctgctattgccccacgcctagcacccacaaatgtcctaacccttagctattctgaccctggtatgagagaaaaatccattttaaaaacttagttgagcaaattgaatattagagttcatgaatgtaatttatcccactggaatggctcgagtgaaaatgatggaaaatgcatattacgaaaaaattatgcatggagttcaaaagttttttgcaccaaaataaactcacactaacttgttataacatgtctgcacaggatctaatgtgaggcattaagaaggacaagatatcagcttgaaaaaagcctctatcagagcaacatgaattctgctaaaattgaagcaaggaaaaacattaaatttatggtgaagcttgggtagaagaatggtgacatcactgatgctttacaaaaagtttatggggacaatgacccaaagaaatcagcagtttacaaatggataacttgtttcacgaagggaggggatgataatgaagatgaagcctgccaaggcggacctccacatcagttggagaggaaaaaaattaatcttgtttgtgtcctaattgaataggaccaatgattaatagcactaacgaaagccaacaccatagacatctcgactggttcagattacacaattttgactaaaaaattaaggttgatcaaactttctacttgatgggtgtcaaaaccattgtgcctagatcagctgcagacaaaagcagggcttttggccgggcatggtggctcatgcctgtaatcccagcactttgggaggctgaggtgggcggatcacaaggtccggagatcgagaccatcctgactaacacggtgaaaccccgtctctactaaaaatacaaaaaattagccaggcgtggtggtgggcacctgtagtcccaactactcaggaagctgaggcaggagaatggcatgaacccgggaggtggagtttgcagtcagcagagattgtgccactgtactccagtctgggtgacagagcgagactctgtctcaaaaaaaaaaaaaaaaaagcagagctttcagtggaaatttaaaaaatgtgggatcaagatcctgaaacatttctcccaagaacaggagatggaacatggatttaccagtacaatccggaagacaaagcacaatcaaagcaatggctaccagggaatggaagtgtacagtcaaagcaaaagtggagcaaaggtcaaggtaatgggtttttttcttttttatggatgctccagacattttgtggttgattttctgaagggccaaagaatgataacatctgcttcttaggagtttgttttgagaaagttagctaaagctttagcagtaaagtgcctggaaagcttcgagagagactccttctgcccgacaacaatgctcctgatcatttctctcatccaacaagggtaatttttcaagagtttcaatgggaaatcattaggcatccactttacagtcctgatttggctccttcttattgctttttgttttctaatcttaaaaaaatctttaaagagcacccattttttcttccgttaataaagtaaaaaagactacattgacatggttaaattaccaggaccctctgttctttagggatggacaaaatgactggaatagttggttacaaaagtgtcttgaacttgatggagtttatgttgagtaataaagtttatattttttattttcatcttaaattcaatttttccacaaactttttgaagtcccccctgtatgcctgtgctctggtgcagcaattccactcttaagtatatatctaacaaaggcaattgataccaatcaagtgtgcaaagatgaaaacaatagaaaagtaaatgagcttgcagagaatagatttcagatgcaaatttgctcctgcccagccatggtctgggatactcagatacagcaagtcctcagcattgtccacaggctctcagaaaccatgactttaagtgaaatgacatataacaaaaccaattgtttatttctcatcaacatacaggctgggcacagtggctcatgtctgtaatctcagcactttgggaggccaaggtgggcaggtcacttgaggccaggagtttgagaccagcctggccaaaatggcgaaaccctgtctctactaaaaatacaaaaattagctgggtgtggtggcatgcacctgtaatcccagctactcgggaggctgaggcatgagaattgcttaaactcaggaaggaagggttgcagtgagccaagattgtgccactgtactccagcctgggtgacagaatgaaactttgtctcagaaacaaaacaaaacaaaaacaatataatgaaatgacattgaaggaaacatttgaagacctgctatactttgttttacttaaagtcaacagtttccaagaacctgttgatgatactgaggacttactgtactctatttgagattgagagtaaaatgactgttctaccttttggctaagatatatagcagggggaggaggtcatacatctctaggacaaaggagataaggctggctaagagacaggatgggggactgggaggcacggggcacagagccagatgcgcactggcctccttcccacctggcaccttgtcacactggtgtcagttgcggggtcaacacaccatggctgggtgacacggtcttcttgcccctgtaattcagcttcttgacatctgctcttttgaaagtcaccggcgaagggtttcggagggagtgagtcttggtcacaaatgatggcatcaccacttcctaactaactgccttctttctgtctctcccttccatcatcaaattttgagcaccctcgatattccaggcactgtgcaaggtgccaaggacatggggacatgtaagacaccacttctgccttcaaaaattgatggtgctgtaggaagtgacagatatatcaacaacaaaataatgtatgaagtcagcccgaggcagagcagaaacacaaagcaaggttccttggggaggatgaaaaatcaaacatttatggaggaaatcaagcctgaactgagtcttgggagatgagaagacccttacagataggacaaggagggaacaggaagttgctgtgaaggcagaaacagaggcaaagtcataagggcatgaaagaatccgtgaggccctgaaactgcaaggagttccatctggctggagcttagggcttaggatggggtgggcttaggatggggtggggggctgactggagaggtaggcaagcaccagattgtttggaatgaaactccaaagtttgggcctttattataagcaatagagggccatgataggatttaaaaataaaggatctatttgtttgtttctttgtttttgaattgaggtatgatttacaccgtgtgaaatgatcagccctaaggtgtgccactctatcagttttgacacatgcatatcaagacccagaactgtcccaccaccccagagagttccaaatgccccttcccattcaaccttccctaccctcagatgccaacactgattagaattcttcaccagggattagttttgctgatcctacaattttataggagttgaatcatacattatgtacttttttatgtctgtcttctttcactcagcataatatttttgggactcatccacgttgttgcatgtatcagtagttcattcttttttattgctgagcactgtcattagaggatgttaaaatggaaagtagggtggttatttcagcatttttgagtgacacgatcactctgacagctagctaagggagagatcggcatgggaggcaagatggggcagaggaaccagctaggagatgagggcagtaatttagatgggaaatgataggacttaaaccaggacaggagctaggaggatggagaagaggaaatacatgaggagagtgaaggcgatagaggctgcatgccttggttgctgctagtggaagaagccgtgagagcaggtgtcaatgccagccccaaggctcagaacagagctcttctgggggagaaaaaatatgcttgattttgtacatgctcatttgcagtgtctgcaggccccagacagagatgcccaacatctggatagcgatgctgacgctcagaataaagccagggtgggcagcagaatggagtcttccacttataagaggagagtggagacaggaatgaccgaacttgtccaggaaaggggtgtaggggaagaagaggaggttttgacaaagcccggcaaaagaagatggtttaacaagaggtccacgtgaagtcacagaagagcttggagaactgggaagagtaacttcacacaaaccaagggaaaaagcagtctaaggatggaaagggtgatcaagaggtggagtggataaaacacagaaaggcccattttgtttggaaccaggagttcgtgggtggcttttatcagaggagtttccagtagaaccatggaggcagaaaccaggttccagggggttgagagtgaacgggaggtgaggaagtagagaaaggcagaggcagttcttttgaagagcttttctgtagcaggaatggaaaagcaagtgcaggagctagattggggggggtgcctgggacccaagcccgcctgtttatacctctggagtggggtggaaggggccggggaagcagactgggaatgcagagggcagggcaagggcatccaacaaaggcctcctttccaggtcccagtatcttcagaggtagagaggaaataataattgcttcctcacaaattactacaaggattagatgtgatgatatgcatgagaccactgagcacagtgcttggcacgtagatgttcaataaatgctagtttctctctctctcggcttcttcacctccctggagctgagaactctgctacagacctgtgaatactcacctggagacccaggtcccagagcccctagccactctgaacccttcgtctcccacccgggggaaaggtacatacatgttaaataccagggcgatgacgtagtctggtgagacggtcactttccagtcacactccttgcctggcgggtagggttctgggtaatttggtgagaggatgactccagatggtcctgtcaggtctcccccgcagggagctgaggagagaagaagacgagggtgaggctgcctcttcaccctgggctcattttcatgggtgttgctaatgcactattgagagaggagaggctgaggctgacaggctgaagttgaacctggcttagggactcaggagaaggtgaaatgatggacttctactttggagggtgggaatatttcagagatagtggtggtggttgcgcaacatttcgaaagtaccagatgccactgaactgttcattgaaaaacaggtaattttatgttaggtgcatttcacctcaataaattattattattattttttgagacggagtctcgctctgtcccccagccccaggctggattgcagtagcgcgatctcggctcactgcaagctccgcctcccaggttcacaccattctcctgcctcagcctcccaagcagctgggactacaggcgcccgccaccatgcccacctaatttttttttgtatttttagtagatacagggtttcactgtattagccaggatggtcttgatctcctgaccttgtgatccacccatctcagccttccaaagtcacaggatttcaggcgtgagccaccgcgcccggcctaataaattattctttaaaaatacctgaccctgctacttcctagctgtgtgaactcagggaactcatctagcctctctagccctcgatgtctctcccgtatcataaaaagagacaatatcttctctgtggggtggttgtaaagattattggagatgtctgctgaagtatttggtagagagtgaatggttgatagacggagccggcactgtctgtacacctatgaagtacatggccttccttcactgcctcacatcggcttcccggcaagctttgtgggtactgactgtgagttcccgtgcactcaatgtcaggaggagtgggaaacaggctcacattcgcctgccaagcgcagctggtctcctacgctgccagtgctcctggcatctgctcgcggctgcagatactttccaactttccaaaaggccttgtccaagagtatgtgtgtacctcagttgtatggagctattattaatccccaatcagtctacgtggtcgccctcccctgagatgacaggtctctcaagcaggtggggagggagaaagtggccaggtgacacagcaacctatttacctagggaccttctggggcagcttccccagagcctggatcaggtctcttcctccatggctggggctgctgtaccgtggcatgaggactggatagagtaagagctgggaagcgtgtggggtcgttagcaggatggccaagactataggtatggtttggtctggaaaccacagggcaccatcagaggttgtcaacactgagcccacaggaacacagagagccatttaagggctggctagaaaatccaagatgagtctttgtggggggagcaaaagggtatacctgactccaaagttaggagcagcctttggcttgtcatagagctgagcactggtactttagctgtgtcatggagccacctctggctgtggcttttactcagggtgaggcttaaagggctgggtcaatccctaacagggtctcaaacaaatggtaggtcttcaggtcaggccataagagccctaatgtggctgaacataaaatccgagtggtcatgagtagtctgctttttgttccatgggaaaatatatcccaagaaccatcctgagtatcagaaacactcaaataggcatctattacgtattagacttaacaaatcacattttagatacactatctcatttatgtctcattaacaactcaatgagcaatggattattcttcctgatttataaaggaggaaagtgagtctcagaaagcctaagtaacttgcccagagtcactctgagactcaaactcacatgggactggctccaaagtctgttgttttccccctttctacttccatacagtcggtagcagtagccagagtagaggaggcgtgcttctccccgctggccagcagggagagcacagttgttgcaggagcttctgagcgaggtggtgccttaagttgggtctgcttatgtctcacttgtgtctccaccactgaatccttcaggagcagagggctagataagtggggccaagcagaggccagtacaatcagtctagacccttgagcttaacaaagcaagactgtaatgtccagtccatggagcgtggccttgcccaggccagcctagaaacagagtctgatgtggccagtgagagtggaaagccagtgtcatatcagaagtcccaactctggggaaatcttcccaagggggcacaacgaggcctccattctggttcccagcctccacgtccctttgccagctcaggggcttcttcccttaagtttgccacagatggggtgagtctctgtgtttctgaaactgcccctgttactctcccaccaacccccaaagtactatcagtgtctctgggttctaggctgctgtctgggcacagatctcttctagatagttccatggcatcgggcatgggcttccctggctgctgccagttgtgccccaaggccttgcttggatccctgggctgcctcgccaacaggaaggctcctactgctcagggttagtcgaggggtccttttgagcttactaaaccatggttgcccagatgggagtgggtgcaagctgcagatccttctagacagccaagaagtgggcaggttggactgagggtgagagttgtggaaagggcattgatttggaagtcatacaatcctgagcacaaattctgacaatgccactcattggctgtgtgagtttgggccagctgtccacccctctgagcctctatttcctcatctcgaaagtaaaagaataatgatgataatggcttctaacatacacagtgctaactatgagccaggcacagttcttattgctttatagtattttcttttttaatcctcaaaacaatgctagatggtaagtactaccattttcactattttactggtgaggaaattaaggcacagggaagttgggcaatttgtctaaggccacacagcttgctgtggtgaaggcagacctgagccagggagtggaatcccgagctctaacctcaccacagagtgatttcagctgcaataatgtagctaaaatgtttagcccggtgcctatcacggggacagcatccaatgagtatttgttttcttcctttgcttcctccctgtaatgaagggttatcagggccagctagacccgctcatggcagaacgcccagggagctggaaatcagaagcatgtcactgggatttccagttcatttgagagaagaggcaaaggcatttattctgttgcctgaggaacatttcccaaagccgagtgtagaagaacgggtgatgaaaactgaattaacctctccaccctacccactgcacatttattgctctcctcagcttagcacaatcctccttctccacttgggacaatctcatctcaggacctgcttttctgtaaaataagtctaaggaatcacagccttgcagaaggctgaatttggaaggagcctcagaggttcccagattctctcctgggcctcaacagaattcccttgagcagatggaattctggcttagggaaggggaagggagtctgaagacttgaaagaaggaatcgaagaagggaaggatgaaaagaaggaaggaaggaagatagaaaggaaggaaattagtatttcttgagattggggttaggcgtgtcctcaccccacaatgccataagggaagtgtatttaccctcagagataaggaaactcaggctcagagagttgaagtaatttcccaaggtcaccaaagtagtaaatggcagagctagaaagtaaatctggatgtgtctacttcagtatcccatactgttccctacacagcagaatacgtagtgaagaactcagctggatctgaaacccaggtctcaacctcctgccccacatacctatgcggctcctaattcccactgaggagcaggatttagtgtgtcaacttcagggccaggcctcagagccatgactgtcataggccagtcctcagaggcctgggcagcgtactgcctcccattaagcctgagtgagagaggtgcaggccagggcagacgctcctgcaggagctgtctcaggaagccccttacacccatctccagcaggggaggcagtgtgggaggtaggaaaatgagaggctttgcattcagactggcgtgggtgtaaatcttggctctgccatatcctagctctgtgatttgggacaagatatccaaatttgtctaagtttcagtttcaagtgtaaatgaggaaatggtgctaatttcagagagctgttgggaaagttaaatgaggttatctaagtaaatgtccagtatggggcaagtacacagtaaggactcagtgaccatgggttctcttctcttctaacagccagcattgacaggggagataaacactcattatttcacctgagcaaaatagacatgtggaagtgggcacctggagggtttgtctctatctatttacctttctttcccatcccagcctcccttcaagttccctcctcctctcagtctcaagtagttagaggcaggatttttcaggccccaccctttttaagtgatgggaccttagacaagtctcaggtccttcatgtcttcatctctcatacaggaaggttttaagactgaggacagatctaaagaaacaaaacctgtaatcccagcattttgggaggttaaggcaggaggatcacttgagcccaggagttccagaccagcctgagcaacatagtgagactccatctcaacaacaacaacaaaaatacaaaaatttgctgggtgtggtggcacaggcctgcaagcccagctacttgggaggctgaggtaggagtatcacttgagctcaggaggtcaaggctgcagtgagttgtgatggtgccactgcactccagtctgggcgacagagtgagactctatctctaaaacctaaaagaaccaaaacccaggtaaccaataatttccttgagaacagcaaaagcaaggttcttttctttacattctgaggctgtgggtgcccttctattgcttcaggtaatagaagggtcatttcggaatctgttagcctttattacccaagatgacccactgtcctccttctgacctgtacagcctgggccagagagaaagggacagacctgtctgacttggaaatctctgggacaattttagcaagtgaggaatttgtagtgctctgtgtatagagtgtgaacgtgagtgagtgcgtgtggggacacatgcatgcaaagcagggtaaacaatgggttttctgcaacttttgtctgtttcaattctcttggccccaggcccaagatgcagctgctgtgcatggaaggttctggagcacacaactgtgagccccaagagcagagtgcaccctgcagctgctttgtaccgatgcatgttggcgggctgggctgccagaagaacctgttctcgatcttcacacagctgatctctgcacttccctgcagcgcgtagccagggtcacactggaacactgtggagtcgccggcttcccaactgtcaccactccgactcccattctgcgggatcccagggtcattgcaggacgttgctgtggacactggggcaaggaaatagaagagagggtaaggtcgcctgggtgtctgccactcaggaggctcccagctcatcaccctcactgattgccatcatccgtgcattgccacaaccaccagaacctccccatcatcatcatcagctgtagccacagtgccactattctcactcccattactatcactgcctccaccaccaattgtgatcacacttgtcactctcactgatatcaccactaccattcttccagtaccttcaccattactgtcatctgcctgtcatgagatgctatgagttaagcatgattatactgttataattatagaattgaattcagcttaagaatacaagcattgttacataaacaaagcattgcaattttgtataatgtaactaacatgatcagaaggaggaagtgacaagataattaagtctaaactccatgctgccaggtatggtggctcacgcctataattccagcactttgggaggtcaaggcaggaaggtcacttgaggtcaggagctcgagaccagcctgagcaacacagcaagaccctgaccctacaaaaaaataaaaaagattagctgggtgtggtgatagttgcctgttattctagctactctggaggctgaggtgggaggatcctttaagcccaggaggttaaggctgcagtgagccatgatcatgtcactgcactcgagtgtgggtgacagagtaagagctcatctctaaaacaaacaaacaaataaactccatgtattcaattggaagggtttgcaaaggactttgcgagttggcctgcctaaatgctaagcagtggttgtgaggttaccgggagttactgaagttaggtcaagatcatgctctctcttgcaatggcagacaaccaaggatccattagactgaaaccatatttgaagaaaagtcagatatttgtagcaagtgggcagagaagaattcaaaaatagctgagatatattaaaaattcaaaatactcaggaatttgcgacgtcttcgtgtctattacctaacctagtttaacatagagcaggtgttttataagcgaatactgaatgaatgctagatggaaggaatacataaataggagaatgagtgggtgaataaatgaacaaatgtggcatgagaaaacacaccggaggaatgggtgcaagagttagtccagagaaaggaatctcaagagctggaacaaccctggctgcctccacagcccagagctgacagcggggcccggtcccagtccccagctatgtcatccctcatagcctgtgctcagggcactctagggcaaggaggttcttgaaaccacaggataaataatactgatttgattggaatatcagttttctcaacaatttaaggaaaaactacttttatactaaaacaaaagaatttattctggattacaaggtaaaattcatattagtttttaagcaaaaatgtgaagccttaaagatattttgtgcttgctacagccaccagacatcctgaggatgcacacccattctcttctgctatcaggaggacatcagcggaaaagtttgagaagcggcagcctagggcaactgtatacactgatgtcactaattataacctctgggattgtatacgagtcttgagttacacaatctgataccttctactcaataacacctaaggaagcatacagcaaactatggcccacggccatatctgggcctatgcctatttttgtaaataaagttttactggaacacaggcacactcatttgtttacatatcaacatttgacagctactgaacttatttgtaaagtcaaatatgcatcaatctttttccttcccagttaaaatcagacttagctttcatctctagctttatagggcactgtacacatgtaaatgttcccctagaagaaaaatagctcattgttctggccatacttggaaggattatttatatgggaggcaatagagtacaatgattagcagcttaggtttaagaaacagacacatggtttttgctattaactagatgaccttgtatgagaagcctcggagcccacatctgcaacatggagtaataatggtgcccatactgtaagggttttgtgaaaattgtaagagctgatgtagtggagagcttagtgtggcagccactcaataggaatggctgtgattatgcttcccgctcacctttttttttgttctcactttctctctttaatgctcctgaattggagctgcttggcaaagcacccggggaaaggctggatccacgtggtacagacaggatgttagatgttacacagtcatgtttacttaataaagccaagcctgcactaatcgtccctggcatttctgtacaatcccctgtcaaatacacactataaagttaacatggggtgagccgttctctcttccctagagtagtcctggtatttgctaactgatgacagcaacagggaaggtgacctttcccaaaccttggttatgcccataacactgggccaggctgtcatgacctttctggagcccaggctaggtagctttgaccatgctactctgcctaagcaatgctaagggcagcttgcccaaggaaacccttctgttagagaaaaccatccattcatgtgttcatatcttcatgtgcccatttgctcactaagctgtgagtgagcacctgctgcatacatacactatgagagagtcgggaggcatggcatgaccctgtcttctaagagcttttagtgggatgtcaagtaggtgcccagcttcaagacgagacagaatgcctggtattgaataaatagaagtaaagtgccagggtgccgtgggctatagcagttttactctgaatggggagattaggaggcagtggcatctgagatgaaccttgaaggatgaataggacttccatgagctgggcaatgcatgagaaagcagcctgcatacagcataggagagcacccagggactctgtcccgcgtggctacactgagtatgcagtcgaggtcagataatgcaaatctgtgggtgaatttgtcagcataattatgggctttttcttttcttttaagccgcacccatcagcttgggcgcagttggagaaaatatgtctggctttaattattcataatacttctttccccagagagtggatcgagccgtctctttagcattctaccctccttactgctgggagatccttccattgcttattccagcaacttcccaagtttgttccacgaaatgttagtctcttgagatggccttgaaaaaagtcatccatgatggaatatgtttggaaattgtggcctaccagacatcttttgaatttaagggcattagcatagcaaacgttctcagaggccccatattgcagatcatttccttgggtctgcatcagcctgagcacctccccagcatcacttgatcatgcaaacttcttttttcttgcaatatcaattagtattccatggaactcttaggaatagatggaaaatgctagactagaagcatgcatgagtgttaaatggacaaatttataagtataaagcaatgtgatcctggagactctcatctgctccccacgctgctaaatgcttatttccacagagatgacagacgtagcagaaaagagctagaagcaggatttgcaactctgtaacaatctcagtggtgccagggatataccccaaccacccttagctgatacaccaactgggaaagagctcgggggcaaagccacggcacaggtgccacaagaaattgctctggaatcaccatggaaactccccccctccctcccaccacacacacagtggagtaaggagatggtaatgaagacagctgctgtataataaacacgagcagaaaccgaagcagagtcacttgatcagggggaggaatgatggaagaggcacttcagaggagatgagatgatgcattccagggagaggcaggaccaatcatataaattatctcatactgggatttggatgtttgagcattggccattttgggtagctctttgtcatgctcctccataattggctattgcagtgcctaattaattaaatttagatgactcatgttcacttccagtctttgctgagatctgcactcaactaagaacctgagcgtgcagcatgtcccatcagcttattcataaccatgccccaagccaccgtctacttgtacctcccacatccctccttgctccctgtgcttcagccacatggggtagccctccacttccaaagcccacattcctgcatctacacttgttcatgtgttctttgcacctaggatgcccttttctctcttttccatctaataggggtgcacaagtcctccaaagtccatttcagtggcacctttccttgtcatagatgactacttgctccttgaaacactttcttttcttgagtaacttctacttgtccgttgggtctgagcttggacatcatcttttctggaacatcttccttgatgctccaaggtgaccattatggaccgtatgtctccatccagatgcttacctatttgtatgtgtctattaacccacctgtcttccctaccagagtgagctcagcacagacatttgaacaggtgctaaccatgtaccaggcacatagcagatgttcaataactatctttacatggactgagggatgaaggaaagtgagggccagaggaaggtgggtgccatgtgtcaggacatgtggagtggggctggcagagggcacgcacagacctgaaaattgaatggcaaagccctgcttgctggtgaagaagtcagtgctgaactgcaggacgaccgagttgaaggtgctatgcaggtccttgggcagggccgggccactcagctccttcagcagaaccccgctctccacaggcccatcccagatgcgcagcacgtcgtgaacctcctctgtgtcaaacaccaggaagtgtagcctgcacggagagaagaggcagtggtcatctggactcagcccttctttccaggggcttctggtcagaaggtcctaaacctacgaagactggccctaaacctacaaagccctaaacctccgaagcccagcaggaggggagagaaggcagcgtctggcagcatcctcatttcaccaggccagctcctcccactggggcctccagcaatggggacaagggtgcgaggtgtaggttttgtgcatccttttcttattatgagctccatgttgccattgtcagactgcatccctctcctcaaccttacatagcccgcagacctctccctgagcccatattgttaccattctaggttggaaggggaatactgagaaggcaggatctggcttggacaaaggatataggtaaaaaaaaaaaaataattggggctagagggcagggggaactgtggagtctctgagaagctggcccagccatggtgcaggtaggggtgacctcataccttgctttcccagagcagaattctggggatattagctatatgtaggcctggcttagataatctctgcagacctcaggaggccaggtgggagtctccctgtgtgggggtctgcaggacagagatagagctctcagagcaagggagctcaagtagtaacctgaatttttctggaaccaaagattccaacagccaaagataccttggctacaagcctgtgtgactctctctgttaattaattttttttattattgtggaataattttagacttacagaaaagttgcaaagacaatacggtgttcccatagacctttcaccatttcttctattgctaacatcttacatttccacggtgcatttgtcacgactaagaaagcaatgttggcatacttactatgaactacactccagactttatttgaatttcaccagtttctccactgatgtctttttttgtgttccaggatccaatccatttatcactatctctttttaaaaatatctttttaaattttaaaaataagacatactcaaggcagagaaaaggcaaacaatatacagatgtactgaattttaaaaaagtctctctttcacacagccaacctgttctccagagctattcaattaatagtaggtttggtacatatgcttccagagtttttttcaatgagcacgcaaatatattgttccctcaaaatgagacatattttatgtagttttctataactttctttcttcatttaatactatatcatggacaaaaacatcaccctcatttttctgcagaaatggacattgttatataacacaatttcacatgaaattgcaaggaacatttgcatctttatgtagctttgtgcatttctgctaatatttcagttgacttgccaaagtaattctaggggaagaagggcatctatttaaaaattttaggccaggagcggtggctcatgcctgtaatcccagcactttgggaggctgaggtcaggaggtcaggatcacgaggtcaggagatcaagatcatcctaacacagtgaaaccccgtctttactaaaaatacaaaaaattagccgggcgaggtggcgggcgcctgtagtcccagctacttgggaggctgaggcaggagaatgtaatgaacccgggaggtggagcttgcagtgagccaagattgcaccactgcactccagcctgggcgacacagcgagactccgtctcaaaaataaataaataaataaataaaaagaaaataaaataaataaaaattttaaaataaatcttgctaaattatcctctcaagtgattgtttcaatttatattcgcactaatcagtattgatgttactattctctctaaagttcacctcatcagcattagatattataatgttgtaaatatattctttacgaaaatactcccccatctgctagaccacagtggaatctctctggcagttttgagtttagatgatttagtaaggttgggtatctctgcacatatttactgggcatttgtagctttcaaattctttatccatcttaattgatggatgcaaacttttgaaattctacttatatattatgacttttatttaccttatatttttgatttctcttttatatgatatatttgttgctaatcttttctcctagtgtctggtgactttttctcatttaactttggtttgtggtatccattttggtaagaagtgattaattttatgtaaccaaatacgttaatattttcctttaaggatactggatgtcatgttatgcttgggcagacctctccccgacccaacgattcaaaaacaaaacaaaactttaatcaaaactttaatactttcctgggacttgtatagtttctttcttctctcttttttttttttttttttttttttttgcgacagggcctatctggttgcccaggttggagttcagtggtgcaatcgtaactcactacaacctcctgagtagctgggaccacagttaacatgccaccatgtttgactaattttattttttgtagggatggggtttttctgtgttgctcaggctggtcttgaatgctgggattcaagcaatcctcctgcctcagcctccaaaattcctgggattacaggtgtgagccactgcacctggctagtttcattttttgaggctaacaagttcattactcttccaaattgacactcaattctcccaacacctatctaaagtagcctcttccacactttgcctaccaaaacatctgtttactccctccgtagcatctaccagtctatctttagtgtacctatttgtagactatgcttctccctaactagatcataattttcatgagtgtggaaccaggccttgtttgcctaagatgtatctgacattttggatggtgctcatgatacccatggatgatgacacgctcatagctgaagaatcctgattctccctactgatttgaaatatccccttagttgcgggctgtttctggactcttctctcaagtccagtgatctctcctttccctatactagaatctacttgtggtaccaggaacgtagctactcaccttacttgggtttccatattctcaaattttgattttttccctaaaacttactaatttcccaaatttactcttttagataaactttatggttaccaagtcccaaaaaaatgtgattgagattttgattgggattatatacacattgattaatttggagataattgatatctttatgttactaattttccccagccaggaacattgtagataacttagtttatgtactttgcaaagttttatgtttttcatctttgttatggttttcttctttgcacacctcttgttaaatttcctctttggcagtccacaagtttatggttttggttctattgtgaatgagatttaatgtttagttacattttctagttatttattgtcagatatatatatgtgtgtgtgtgtgtgtgtgtgtgtgtttcttactttcggtcactagttagtactattagaaaccaacagaatctcttggatttcctaggtagaatcttttatagatataggaggggattccttaaaaccaggacctgtgtaaggctggggccccacatttgatttgaaaagaggagaaggagatccctaggacagagcacaaacacacatactcactgctgtgccaggctgccccctgccttctctgctttctctgtggtgatcaatgcactgtgaaatcagcagccaagaggagaccgagtgccagccgtgtggtgtggctgtacgtgctctcagaaaagacatcggtgtgggccacactcatcagggaaggcaaaaggaaatgagacctgaagtttaggtggcgtgaaaggagagtgctttctttggatttaataacatgagataagacctggaggcagagaggaggtgaagctgtccgggaagaaaggcaactccatacttgagttcaggtggtattaggatgccatagagaatacagctgattgagagagggaagagaatgagtctcaaaattagctatgggagtttgggctttattgtattctagttagagactgactctagaggccatgtgaaatcctgagggtgaacaactgaatgaatgagtgagtgaatcaatgaatgaacgaatgaaaccccagtctgacacgaagctgagaaaagcaagaatatggggactaaatagacatgaaggaaaacgtgtttccataacaaccactgtgtataaggcactttcacattagcccatggagtccatgcaagcatctttattttgtagctaggactagtctcatctttaacaatgagaatactgaggctctgagagggtaggtaacttgcacaaggtcatgggctggttagacagtaagctggaattgctattatttaatactaatccaggtcagaccttagtgcttctactctctcctaacaatgctgcccacatctctgggaggaagaggctgtggttgagagctaggcaggggctggagaggctctatcaatcatcaacagtttatatgtgagtcatacgtaagctgatatgaattaaaaatgccagttgattgcattcggcttagctgatctgataaacagacaaagtcaaaggcttggcattgatgttgcggagaggagtgcagaagaagggaggagaaggcggggttctctgtgtgcacgaacaatacaagttggcaacggaaaggacagaggctaaagttcaagcccctttcggcactcattcacttaagcgcctcccatatgcggggtgctgctgtataacagtgaagatgacagacagggtgccattctccgggagcttctggagatgggcaataaccccccagacacaaactcactaaaaaattatcagctgtgtctagcacagggcaggacatggcagagtgctgaggcagagcatccactttagacagagtggccggagaagaccttctaaggaagtggcatttaagcaagatgccaagccacatggagagcaggaggggtgagaggtgggaggaagcctgcagtgaataaaggagagcatgtgcaaaggtcacaatggaaaggccatggaggcgacactgggccaggagaggtaggcaggggcagggctggcgggactccgtggatggggggagatgtttggtgtgtactataggagctgagggaagtcattggtatattttaagctgagctctgacaggttccgatttacattttgcgatcactcttggtgcctgggtaagaaaagattgacaagggcaagagtggatgcagggaaattagctaggggctgccacagggggccagtgaccccttttattataaacctttgatgatggccagtaaagacttggtttgccaacccaaccacatttattaagactcttattgaatacttatcttatagaaatcagagtctataaatgctaatgagcagttctgatcgacagagataattccaggccaaaacagccattgtggtttgtgtgagcagctcccctgtaggtgaacactgggtcttcttctggcttttgatatcctgagaacagtttgcagctcccctccccattgtactgtgcccctaggtaggagaaactgaagtggaggaaagaggtgaaaagatcttccttcctattgatgacttgcttgtctgtgtgtgcgtttctttggaccacaaacacaaaacaggccatttccagggaagagaaatgaagcatgttgcatgtcaagctctgtgttgagagctgcagaaatgtgcaaggctctgtgcttgccctggaggaaacttactgaaggagacacccaaaacataataatatgtgcaataggtgctaaagagtggaataaataagatgctatcaaaataaccggaggacaaaaagagctaaacgtttgtagaaaatctcccatgtgccaactgctttatgtacattgctgaatatcctcataaagccctgcagttgagagtgtattctcactattttgctgtggaggaactgaagttccaagggattaacagaggcaactagcaagggtcagagacggtattcaaaccatgtctgtctggtaccaaaggcctttcttttacaccatcttctttttcttttaatttgaagaggcaaggaaagcttcaaggaggcagtgtctttgaaacagttttgaagaaaggaaagtgtggagaaattgagggagagaaagatggcaaaagagggaaaagcaaattaagaggaatcgaaagagtaactggccttcctggatccagttcccctcccatcctttcaatccaccttttccatcaggaccacgtctatctttctgaaccactcctctgacccagtctctcctccttctctacaggataaagtcagacttccgaggggacacaccaagtcccccctgggcttccccagttgccttctcccattcttctaaccctttactgatttccttcttattctcttgcttcagagccttctctctgcctggaagttccccctgcaaatggccccatgccacttgtagcgggttgacttgtgtcccccaaaaggatatgctcaagtccttacccctggtacctgtgtgactgtgaccttatttggaaatagaatcagatgtaatcaagttatgacaagaagggcatactggattagggtgggccgtaaatccaatgactgatatcgtaagagaaaagagagggagatttggatacagagacacaggagagacacagggaaggagaccatgtgatggaggcacagatagaagtaatgtgtctgcaacacaaggaatgcgaagggttcctggcaaccaccagaagctatgagacacatgagacagattcttccccagtatttccagagggatcttggcccattgagaacatgattttggacttctagcctctagaactgtgaacaaaacacatttctgttattttaagctattcagtttgttacagcagccctagtaaattcttctaccccctgactgatgtgtactggtaggtgcctcacatccagtggggagcttttccacaggcttctccttgtcctccccatcccctcagtctagtgagatgctccctctacaggctcctgctctatcagagtcatccattgacttccctgtcttgctgaatcccttaactcttgtgccagtgtctcattcacttctatatctctggtacccagcatgaggcctgacctgtactagccccttggtgaatgttgtctgactgaattgatgaatgaacgaatggctcaccagctttcagggacccctgtggttcatccaaactcacccactgtccttgccaagcatctgtcactctacaagaggcaacttaaacaaatcctatatactaaggaggatacttcctatttctctggaagttctgagctcttcctttaccatccacatctagcccctcggatcttacagctgtatctttggtgctctacactaccaaagacatagaatctagccacacagaacctgggccagagctcactgctgaatctaaatctgggagaaactgggatactgcaaccatggtctcacacttttaaaatccagccctgtaggttccctgagcctacagtgatactgatagtcatactttaaatctataaatagtaagtactaggttcagatagcatactaggcactggtgattcagataagaatatggcatgcttccacccctgcatgtggtacagtctacagtaaaggtatgtacggagaagccccctaacttaggccaagggtatgagaccaggcctcctgggagaggtaactactgagctgagtcttgatatctttataagagaaaagagagatgagagattaacaggatgagtccagatgaagggggtgggtgaggagggtgagaaggggacagaatgcaggcagagaaaatagggtatgcaaagacacagaggggatgtagaggctggcccacccaggaaatgacaagctcttcaggaagacaaagcatgaaatgcgggtggctgagacctgaagccgtggctcagggaatggtgataatgtccaagctgcagaggagtgaggaattcatggtccccattctcctagtgagagcagtttccttggtgctggggcagggctgagggcagtgagggaggggttccaccaaaggagggcttttgagttggtctcatcatcctaagtctggtatctggtttgcctaggttgcatcttgggcactcatgataatctgcagtctaactccagcaagtatgccagctcaggtaactgggtctcactgggcccctggttctccctcccattccttggtggggctgccctgaaattctgcttgctctgcgggggctggatcttgacttcattgctggctgcagggacaccctgggatgtgcagataaccctgttcaagtctgagatctccacatgcctttcctcaaagtgttttcagagttccacctcccactgccacacccacgcccccaccaaccaatagcaggccctagctaagggtggacccacctggccctcactcccgtacctcttcccaccagccccctctgagactccactgtgctttgctgaggctagtgtaaggttcacaacactcagcttcagcaacaggagattttctaccagagcctaaatctaagaagctgggaggacagtggattttcactgcaggggcccgtccctctcaagtgctgcccacaggcaaaacttgcttctgagatcacggtcctcagttcttttactctgaaggaaacttggacacactaggtattttttaaaaacaaaaacaaaaacaaacaaacaaatgattcccacctccctgcttataggcagtttatctctatcccattgcaaattggaaagacatgcaaaggggggtggagccaagatggccaaataggaacagccccagtctacagctcccagcatgagtgatgcagaagacgggtgatttctgcatttccaactgaggtaccgggttcatctcactggggagtgccggacagtgggtgcagtgcaccgtgtgtgagccgaagcagggcgaggcatcgcctcacctgggaagcacaaggggtcaggaaattccctttcctagtcaaagaaaggggtgacagacggcacctggaaaatcgggtcactcccaccctaatactgcgcttttccaatgggcttaacaaacggcacaccaggagattatattccgcacctggctcggagggtcctacgcccacggagccttgctagcacagcagtctgagatcaaactgcaaggcggcagcaaggctgggggaggggcgcctgccattgcccaggcttgagtaggtaaacaaagcagctgggaagctcgaactggatggagcccaccacagctcaaggagccctgcctgcctctataggctccacccctgggggcagggcacagacaatcaaaaggcggcagtaacctctgcagacttaaatgtccctgtctgacagctatgaagagagtagtggttctcccagcacgcagcttgagatctgagaatgggcagactgccgcctcaagtgggtccctgacccccgagtagcctaactgggaggcaacccccagtaggggcggactgacacctcacacggctgggtactcctctgagataaaacttccagaggaacgatcaggcagcagcatttgcagttcaccaatatctgctgttctgcagccaccgctgctgatacccaggcaaacagggtctggagtggacctccagcaaactccaacagacctgcagctgagggtcctgactgttagaaggaaaactaacaaacagaaaggacatccacaccaaaaccccatctgtacgtcaccatcatcaaagaccaaaggtagataaaaccacaaagatggggaaaaaacagagcagaaaaaccagaagctctaaaaatcagagtgcctctcctcctccaaaggaacgcagctcctcaccagcaatggaacaaagctggacggagaatgactttgacgagttgagagaagaaggcttcagaagatcaaactactccaagctaaaggaggaaggttgaaccaatggcaaagaagttaaaaaccttgaaaaaaattagacgaatggctaactagaataaccaattcagagaagtccttaaaggacctgatggtgctgaaaaccacggcacgagaactacgtgacgaatgcacaagcctcagtagctgatgcgttcaactgtaagaaagggtatcagcgatggaagacgaaatgaatgaaatgaagcgagaagagaagtttagagaaaaaagaataaaaagaaatgaacaaagcttccaagaaatatgggactatgtgaaaagaccaaatctacgtctgatcggtgtacctgaaagtgacggggagaatggaaccaagttggaaaacactctgcaggatatgatccaggagaacttccccaatctagcaaggcaggccaacattcaaattcaggaaatacagagagcaccacaaagatactcctcgagaagagcaactccaagacacataattgtcagattcaccaaagttgaaatgaaggaaaaaatgttaagggcagccagagagaaaggtcgggttacccacaaagggaagcccatcagactaacagctgacctctcggcagaaactctgcaagccagaagagagtggggaccaatattcaacattcttaaagaaaagaattttcaacccagaatttcatatccagccaaactagcttcataagtgaaggagaaatgaaatcctttacagacaagcaaatgctgagagattttgtcaccaccaggcctgccctaaaagagctcctgaaggaagcactaaacatggaaaggaacaactggtaacagccgctgcaaaacatgccaaattgtaaagaccatcaaggctaggaagaaactgcatcaactaacgagcaaaataaccagctaacatcatcatgacaggatcaaattcacacataacaatattaaccttaaatgtatatgggctaaatgctccaattaaaagacacagactggcaaattggatagagtcaagacctatcagtgtgctgtattcaggaaacctatctcacgtgcagagacacacataagctcaaaataaagggatgaaggaagatctaccaagcaaatggaaaacaaaaaaaggcaggggttgcaatcctagtctctgataaaacagactttgaaccaacaaagaacaaaagagacaaagaaggccattacataatggtaaagggatcaattcaacaagaggagctaactatcctaaatatatatgcacccaatacaggagcacccagattcataaagcaagtcctgagtgacctacaaagagacttagactctcacacaataataatgggagactttaacaccccactgtcaacattagacagatcaacaagacagaaagttaacaaggatatccaggaattgaactcagctctgcaccaagcagacctaatagacatcttcagaactctccaccccaaatcaacagaatatacattcttttcagcaccacaccacacctattccaaaatggatcacatagttggaagtaaagaactcctcagcaaatgtaaaagaacagaaattataacaaactatctctcagaccacagtgcaatcaaactagaactcagggttaagaaactcactcaaaaccgctcaactacatggaaactgaacaatctgctcctgaatgactactgggtacataacgaaatgaaggcagaaaaaaagatgttctttgaaaccaatgagaacaaagacacaacataccagaatctctgggacacattcaaagcagtgtgtagagggaaatttatagcactaaatgcccacaagagaaagcaggaaagatccaaaattgacatcctaacatcacaattaaaagaactagagaaggaagagcaaacacattcaaaagctagcagaaggcaagaaataactaagatcagggcagaactgaaggaaatagagacacaaaaaacccttcaaaaaatcaatgaatccaggagctagttttttgaaaagatcaacaaaattgatagactgctagcaagactaataaagaagaaaagagagaagaatcaaatagatgcaataaaaaatgataaaggggatatcaccaccgatcccacagaaatacaaactaccatcagagaatactacaaacacctctatgcaaataaactagaaaatctagaaaaaatggataaattcctacaaacatacaccctcccaagactaaaccaggaagaagttgaatctctgaatagaccaataacaggctctgaaattgaggcaataattaatagcttaccaaccaaaaaagtccaggaccagatggattcacagccgaattctaccagaggtacaaggagaagctggtaccattacttctgaaactattccaatcaacagaaaaagagggaatcctccctaactcattttatgaggccagcatcattctgataccaaagcctggcagagacacaacaaaaaaagagaattttagaccaatatccttgatgaacattgatgcaaaaatccacaataaaatactggcaaaccgaatccagcagcacatcaaaaagcttatgcaccatgatcaagtgggcttcatccctgggatgcaagactggttcaacatacgcaaatcaataaacataatccagcatataaacagaaccaaagacaaaaaccagatgattatctcaatagatgcagaaaaggcctttgacaaaattcaacaactcttcatgctaaaaactctcaataaattaggtattgatgggacgtatctcaaaataataagagctatttatgacaaacccaaagccaatgtcatactgaatggataaaaactggaagcattccctttgaaaactggcacaagacagggatgccctctctcaccactcctattcaacatagtgttggaagttctggcctgggcaatcaggcaggagaaggaaataaagggtattcaattaggaaaagaggaaataaaattgtccctgtttgcagatgacatgattgtatatctagaaaaccccatcatctcagcccaaaatctccttaagctgataagcaacttcagcaaagtctcaggatacaaaatcaatgtgcaaaaatcacaagcattcctatacaccaataacagacaaacagagagccaaatcatgagtgaactcccattcacaattgcttcaaagtgagtaaaatagctaggaatccaacttacaagggatgtgaaggacctcttcaaggagaactacaaaccactgctcaaggaaataaaagaggatacaaagaaaagaaagaacattccatgctcatgggtaggaagaatcaatattgtgaaaatggccatactgcccaacgtaatttatagattcaatgccatccccattaagctaccaatgactttcttcacagaattggaaaaaactactttaaagttcatatggcatcaaaaaagagcccgcatcaccaagtcaatcctaagccaaaagaacaaagctggaggcatcacactacctgacttcaaactatactacaaggctacagtaaccaaaacagcatggtactggtaccaaaacagagatatagaccaatagaacagaacagagccctcagaaataatgccacatatttacaaccacctgatctttgacaaacctgagaaaaacaagcaatggggaaaggattccctatttaataaatggtgctgggaaaactggctagccatatgtagaaagctgaaactggatcacttccttacaccttatacaaaaattaattcaagatggattaaagacttacatgttagacctaaaaccataaaaaccctagaagaaaacctaggcaataccatgcaggacataggcatgggcaaggacttcatctctaaaacaccaaaagcaatgggaacaaaagccaaaattgacaaatgggatctaattaaactaaagagcttctgcacagcaaaagaaacgaacatcagagtgaacaggcaacctacagaatgggagaaaattttggcaacctactcatctgacaaagggctaacatccagaatctacagtgaactcaaacaaatttacaagaaaaaaacaaacaaccccatcaaaaagtgggcaacggatatgaacagatacttctcaaaagaagacatttatgcagtcaaaaaacacatgaaaaaatgctcatcatcactggccatcagagaaatgcaaatcaaaaccacaatgagataccatctcacaccagttagaatggcaatcattaagtcaggaaacaacaggtgctggagaggatgtggagaaataggaacacttttacactgttggtgggactgtaaactagttcaaccattgtggaagtcagtgtggcgattcctcagggatctagaactagaaataccatttgattcagccattccattactgggtatatgcccaaaggattataaatcatgcagctataaagacacatgcacatgtatgtttatggcggcactattcacaatagcaaagacttggaaccaacccagatgtccaacaatgatagactggattaagaaaatgtggcacatatacaccatggaatactatgcagccataaaaaatggtgagttcatgtcctttgtagggacatggatgaagctgggaaccatcattctcagcaaactatcacaaggacaaaaaaccaaacaccgcatgttctcactcacaggtgggaattgaacaatgagaacacgtggacacaggaaggggaacatcacacactggggactattgtggggtggggggaggggggagggatagcattaggagatatacctaatgctaaatgatgagttaatgcgtgcagcacaccaacatggcacatgtatacatatgtaacaaacctgcacgttctgcacatataccctaaaacttaaagtataataataataaaattaaaaaaaaaagagcgtggctcctccccgacttctcttgctcattctcttgccatgtgacatgctcgctcccccttctctatccaccatgagtagaagcttactgaggccctcaccaaaaggagatgctggcaccatgcttcttgtacagcttgtagaaccatgagccaaataaacctcttttctttataaattaaaaaaaaaaaaaaagaaagaaagacatgcaaaaatgagaaaataaaaaaaattcatggcaccttgacctgttgatttcacttgccttctgactgggccccagaatatgaaagggctttggatgttcccaaccaacagtcaccactgcaggaacacaataaacccatcgctgatgtgagtcatgatggtggatctttacattaggggaaaatggcatgtgaatgaacagctgctgcagggggaagggggtcagaaatcactcctgtccccacatgagaatgcagctgcaattatccttggtgacatcggaaagggcaataagaaaataatacttgttttatcaaatgcccccctctaagctgaccgagctgcaaaccaacaattaaaccatgatcataatagcagacaataataattaagtatcacgctatccaaagagcaaaaactgagaagacagaccaaagcccaaatccagcattggtgtctatagcaaaataaaaggctcttctcttcagggaccagctggcatgcaaaagaaataaaagattctttggttattttctaaagtggaaaaataaaactgggcttcaggtcactgaaaacgttgcagaatgttccagggtagtgactgctgtcttggacttaagctgtgaccttgtgcttccctctaacgtgctgggtgacctccggccagctgccctctcttcctcatcaccctgtcactggaggctctgagactgcctatcactagacagagtccagagtctgccctgtaggtgtcagggattctgtgaggggccaatgtatctttgtccttggaagaaatgtttccataaagtcaaaacactggctgtggaaccaaagacctgggttcaaattgcagttgtttttttttttttttttttttgagatagagtcttgctctgtcaccaggttggagtgcagtggtgccatcttggctcactgcaatctccgccccctgggttcaagcgattctcctgcctcagcctttcaagtagctgggattacaggctcatgccaccacatccagctaatttttgtatttatagtagagatggggtttcaccatgttggccaggatggtctcaatctcctgacctcgtgatccacccacctcggtctcccaaagtgttgggattacaggcgtgagccactgcgcccagcctcaaatactagttctgagagagctaacttggtgaccttgcagagcctcaatttacccccgtgtaaaatggctgtaatttcaatctatcaagcagcgttgctaagagtattatcataaatgaaatcacatagaaagcatctagcacatagtattaaataatcatcaaatggtaaaatcacctaaaataattccatttttgttcaatttattttattttttacttgactaagagagatgtgctaaagtctcctataaggattgtcaatttctcctcatatttctgacagattttgctttatgttttctcattaggttacttagtgcagattcatgactgttagcattattgtggactatgcattttatcatatgaaagcattccctgtgtctcttttaatgttatttaaccttgaattttactttttttttttttctttttgagatggagtcttgctctgtcacccaggctggagtgcagtggcacaatctcagctcactgcaagctctgcctcccgggttcaagccattctcctgtctcagcctcccgagtagctggggctacaggtgcccgccaccacgcctggctaattttttatttttatttttagtagagacggggtttcaccgtgttagccaggatggcctcgccttttttttttttttttttttttttaacagaaaagcaatattgtgatccctgctttttacttccatgtgttctcatgctattcttttgtcccaaccttttatttttaatattttgttgttcttctgtttagcagcattcttttaaattttatccaacccaagaatctttgccttgcaatatgaatgtttcccatgtgggcaccagctcatagctctttacggctcctgctttccctgccacaggtcagtcagtagttactctacacatcacggtagaggcttcctttccctgtgcaccgtcgtcttggggcctctctctgggatcctgtgtttgctccctttgcagaccctttgctcagcatctgagtcttgcactccgcccaggcacctgactttagctctttgctgatccttcagagaagcctcagacggtagcacttctgtgctctgggccttatatccggtcagcctctcagtctcctgcccatcctgagctcctgtaaccttgatctgctccagaggctgcctcctctccccccattctcttttccctacatgaggcctggagccttgaattactttgtggaacagacacctccagccccacccaggaccctgttccccactgcagactagcactggactgtgaagtgtgtgaaaaattaacctttattgtgttaaaccactgagatttgggggttatctgttatatcagttagccattactgttgactaataatacaagcttatttccatcatcctgttttatgcttttttttttttttttttttttttgagacagaatctcactctggcacccaggctggagtacagtggcatgatctaagcccactataagctccgcctcctgtgttcaagtgattctcatgcctcagcctcctgaatagctgggactacaggtgcatgccaccatgcctggctaatttttctatttttagtaagatggggtttagctgggttgaccatgctggtctcgaactcctggcctcaagtgattcacctccctcagcctcccaaagtgctgggattacaggcatgagacaccacgcctggctgtgttttatgcttttgtttattatattttcttgcttttttgggtaatattccttagtttgtaagttttctttagtgatttgcaaagtacacattttattttaaattctatgggtggttttctttaagcattttcaaaagtactcctaaacttgtattttctctaatcatcaaatttaagaaaaataatatattataccattttacttcttcttatgtaagacagtaaatcttaaaaaggtttcacctttccctatgccctctcccaaccatcaaaccattgacaatataagtagggactagaggcccaagttacacacaatctttcatagtcaccaattcttagtaccgtgtagtttttctaaacatctcagttggctaaaaattgtatgtctgtattagcttcctgtggatgctgtaacatattacaacaaacttggtggcttaaaacactagaaatttggccaggcatgatggctcatgcctgtaatcccagcactttgggaggccgaggcaggtagatcacctgaggtcaggagttctagaccagcctggcaaacatgatgaaaccctgtctctactaaaagtacaaaaattagccaggtgtggtggcaggtgcctttaaccccaggtacttgggaggctgaggtcggagaatcacttgaacccgggaggtggagtttgcagtgagctgaaatcgcaccactgcactccagcctgggcaacagagcgagactccaaatcaaacaaacaaacaaacataaacaaaaccagaaatttattctttcatagttctggaggccagatgtctgaaatcagtattgctgcgcttcaatcaatgtgtcagtagggccatgctccctctggaagctccagaatagactctgttcctgcctcttccaatttctgatgctgctggcattcgttggcttatggctatatcactctaacctctacctctgtctttgaatcaccttctcctctacgtgtataaaatctccctctgtcttcttcttacaaagttgcatgtggtggcatctagggttcacccagataatccaggataaccccttcatttcaaaatccttaatttaatcacacctgcagagaccctttatccaaataaggcaatatttacaggttccacgcattggaacctcacatttttgggggccaccattcaacctactacaatgtttttgtaagttcctcaggaagccgatgagagccaattttatgtggcttttgtgcatatctgaggataatatgttacctttgtaagtgaatcatatttcctggctgaatcaacaattcttgaggccaatagcaccactgactttggactttggtattatggaaaagaaaaggagtcttaggagggttggattagttgtggtggttttgtaaatgaatattttatagaatgagggatgactatgtacttgcctgtgtgagtcggttttgccaaatgcttgtagggattttttataattcatcctgagctcctatacccttggtctgctctagaggttgcctctgcctccccctttcccttctacctcacccaaggtctagagccccgaattactttgtggagtaagcactcccaccccttggaacgatttcatttttcatcacgttgtatctaatttattttttccctggaaattcaacgactcctttcacttcactgagcacattttagccttggtcaacccactccccaccttttccccaggggaggtgatggccttttgtatattattattccttctgctcagtttcattgctcttctgcatttgtgcttcctggattggcactttgtcttccatgtttgtctacttttcattacttagagtctagcttgtctactacttcaatgcttttatttcttacaaggcaaatgctgctattgtggattttagttgttgctgtgtgtttaatttcttcgcattcctttcttaccttaatcactgtctgtctatttcagaatctctcctcctgcatttcatcatccatcttctattgatcatgcatatttcttatatttaaatgagattattatgtctatatccatttaaattttcatgtctattatagtaaaacatgtttagaaaaaaattttgtatttttttagggagatggttctcttttaatgagtggtatgttttaagtggcatcatacaagtttattttatgtactttttgcttatttctttacttatttttggaaagggagagatctatactggttcagtgtggtcaacccacagggaacgtgcatttctttggttgaatagtttattttcctcctaagagatgttggaattcagttttgggatcttaaactggcagtcaagttgatgcattctggccaattcaactactcagtgtagctcggttagattatcgtatgaggataatttgaagtagtttgtgtttctttctctagaggtgttctatgaaaaactgaatggccggagagtgccaccattctcaaagcttcatttataccttccaggctatccacatcctctccttcaaaaaatgtgtacattccttttggctattctccaatttgttgaagacttaaatctgacaaaggaataccccactgtgtgtgtgcttctctgttcagttcctttaggagatcagctcttgcagtgtaagtacacgaaccttctctgtttaaggtttaacttgctataattgctcagaaataaaccctctggaagctgctgaacctgtggccatgattcctggcaagagctgtgaatgcaagcttcacttctggtgccttctgcctcctctgggccagctgcccacttgctggctggagggaggcaacactgaccactgtggggagttgctgccctgtgactgatctgaaacgacagcaagggaatccaggcttcaggcacaaccagatgtttttctagcccagcatcctcccaggaagataagctccactgggcaggggtcctggttaatcaaaaccatgcccgccaatgcctgctgcatggtgaccaaaatccaagaatggagttttcagttttccctgtgtgttaatcattaagaagtatccctgaagttaaaaaacaaggactattagccaaatatgagctttatgggcatagcagaaatccgagtgtccagagtgagaagttctccaccttccatgggtcccagatctctgcagggaaagcacatcggcagaggactgtctcctctcccttcttccttccccctccacgaagccagacaaccgtagcttcaacccgaaccacatttgcgcataagaaatgactcagttcttttgaatataaccaggatccctcaacagtgctcctaggctcctccctggcttcccagccaatttatcctctgcactgctgccacagatcttcctgaagtcctcatatcccccctagacaatgagctcttccagaagcagctgtgtacattcatatcttcctccctttcacatgcctgggagggcctcacctccaccctgcatggtgagctcctactgttctttaaagtgcagctggaaaggtgcttcctccctgtagtccacccccaactgccatacagaattatgatctgtcctcgcagacacttttctattgtgtttcgtgcatacttccactatagcattcatcacattatcttagaatctatagcagaaactgtgggttggatgatctgtgcttcatttccaaacctctcatctctctactattgaggctctaaaagcaaagcaaaattgatttcccactttttccctgccaggcatggcaagttctgactaatgagatgtaggacagtatctctaaggatagtggttcttcccaaatacacaagcaaactttcatcaggagagagctccgtgccctttcctcttccctcttcttttagactggaacacagacataatgtctggagctgcggcagccaactaggtagccacgaggatgaaagcctcaggatggcagaccaagaaggaaggttatggcttcctgagcagcggtaccaagtctggatgggaccttcagattcttgttccaggagaaaaatgaacccccatctgttgaagccagctttagtccgtttttctattttcattcctaactgatataatttctgtctataatactgagaccttcaaggggaaaagctgtttcttatttatatttatacccccgtgcctggcagaatgcccagcactgagtaaatgctccaagtttttaaattgaactgaatgttgttactgtctttaaagtgttccaacagctccttattatactgagaaatccattcagagttcttgtcttggccttcagtgtgtaaagactcctccttacccacacagccttatttgcccacatgcacgcagctccagccacgtcaagtgagtgccctttcgtggccagatcctgtattttcccctatgttcatacctttgctctcttacccctagctggaaagattgcctctacagtcccaggcagaactcctctctctcttctctgttactgaactccgtcacttggcttgcacttatagcatctattttatcttggaggtacctgtctgtttgactatttccccactagaatgtgaactcttggcagacaaggcctggccttggtctggactttgtgtttccgactgcacagcatcacacagtctctggcacagagcaggtaatcattgcatattttgttagatggaatcagaccacagcctgaatggcagatgggaaagagcaaagactgacattagacggaacatgttccaatcccacattactgggtaattgtcagatctcaaggaaggtcattcattctttctgggcctcgatgatctcatctataaaatggggacagtaataactgattcagaacctggtgtgctataggtatttgatgaatgttttagaggggcagaaccaagagcaaagggctttccctccctttcttttccagttttcatctgagctcgcccactgattattaaaaacaaaacaaaacaaaaccctccagctcaacaccagaagctgagaagagtttccactcctataggatgaaacttctgtgttctatgtactgatgacacaggcaagggtgacagggagggagcagctcatgggtctgccctcctgctgtcagctgccaggcctggatggagtgcattggctcatccaccccattcttggcacttaggaagaagcacttgccagatgctgtaggtattaccagggttcaaggaaaggggctgccttccattccactcttgtcacacacatccaggcaggacccattttccagcttggaccacacccaagggtaagcctgactgtagattcctgcagccaactactttgcctcttgggcactcctgggaagggaccatccttgcccagcttgctggagcaaacctggctacagatccctctggtcaccctcagtgctggatcagggctgaagcagggtagggagatgcatctgcaagccttctcctgtctgtgcccctggaaatagcctcatcggctagcctgctgcctagcccatgtcccttcccacctagcacacatgctcccacccacagtacagcacccaccacctgagatcctttaggggtgacttacagcctgctgtgcttaggaatactctgtttgggtaaaatgaacaactatccacctagctccaggtgggagttctcatcatttgggaattacaagccagccacattctaggtgctttatatatgttcactcaatcttcatagcaaccttaaggagggtaccctctttaattaccatcttaaacataagagaactgaggcacagagggcttaaagagttccctgagcaacacagcaaataagagttcaggtaggctggtaccagagtccagcgcttagctatgacttgatagtgaataaacaataaaactcatgggacataaagaatccagctgaataatcaaaccaaatggctcaagtgcaaaatgcagttgacacagggaaaaactgacaaccattgtaaaacaaaacacaaatagtattctcagggatacaagatgataacatattgataaaaacaaaagtaggctgtcaagagcagtctagaaacagaaaattagtttccttgaaataaaaacaaaagcaagatttccaaaacaaaaagagggtaaagaacaggataattactgttgagaactgaattaatgaaaacacaagatcactggcaaaataaaaacaggatatagaactctgaaatcactagaacaaaaagccaattaaagcagatcagctaacaacaggaagagttaacaataaaaaaaagcaatatagaagcataatgtattctgtttgaaagaaagcataatacattttatgtaaaagaaatatagccccttgtactcatttcatattcttcaatgcccatggaacataaataaaacaaaaagtttgaaaagtaaaaaaaggcacaatgcagtcaaaataaaaataatgaaaagcatacaagatctataaaccacttagtaactgaaaaaattcttaaatattattggatttaagagaaacctaaatgagttatagactagaaatgagcccagttgaacactctatatgaaaaagacaaattgtccaaacagaaaacacacaaagaaccagaaacagcaaagacaattaaatatcctattgtccatctaagcggtgaagactgaaagtattgacaatgtctagtgatactgcgtggggtagcaggccttcccatagacttctggtagacttgtaaattgctataatatctagaagaaaatttgaggtcatgtatcaaaatttacctcctaaaaatatatcctaaggaaataaatggacaactgttcgaagattcaggaataagaatgttggagtgaaaagctgaaaagattcacttattcaacaggggaatagttaaataaattatggtggtacatacaatagaattctctgtacccatcaaacaggatgaggtaggtctatagacattgacatgatgagatggtgacatatgattaagaggtaaaacagaaaacaagctactaagccatgcatgtggatgaacttggtttagaaacatgtgcattacatttgctttatgtacatattggcacacaaaatatccaaaagaataagtagagcagacagacattaatagttattttatgtggggtgtgaggaggagtaagattacagagtaagattgtggaaacgtttcatttcgagtttataaatttgtttaaattttgaattttaaaaaaatgattatctggctgggcacagtggctcacacctgtaatcccagcactttgggaggctgaggcaggagaatcacttgaggccaggagttcgagaccagcctggctaacatggtgaaaccctgtctctacaaaaattagccaggcgtgatggcgcttgcctgtaatcccagctacttgggaggctgaggcatgagaactgcttgaacctggaaggtaggggttgcagtgagctgagacagtgccactgtattccagtctgggcaatagaacaagactgtccaaccctcctccaaaaaaaagagtacctaatttgtatatagaaaaattctataaagatatttctaataaaaaagataataactaaataaggactcaaacacaaaggggctttttgtgtttgtctaattatgagtgtgagttatcctaactttgctgctggttattcaagacaggtgtgtgtgtgtgttgggggttgaggcggagggagaggagaaaaagagagagagggagggaaggagaggaagagagggagtgggaaagaaggagggaaggagaggaggagagggagagagggagtgggaaagaagaagggaaggggagagaaagggggaggacggagtgagcacacataaatacagctgtacgtgtgcatgctatgcatactggctgggatggcagactggggtgggagaatgaggaagggacagtgtcttgccactctatctccatctttctgcagctctcagtgaaactgggaagacatcttcttacttcacattagctcctttgaggttgctgtggctccaagaagccatccagactaaggactgatgttatctttaccttctttggacctttactttcttcttcccattttgggatcctcagcatgccccccatgacttcatatttcttgctatgttactctggagaggacgtttcctgtattggttttgatcttgtcttcctgagggctagaaaggcgcctcctgtctcccctccacccccatagccaccattctcatcagtgaaaatggtcctcactactgcccagaaatccattcatcagtttattgtaatttccttgtgccagccacacctagatctgctctgctctccttaattcccagagaattaatgctgtgccttttaggtacattacggccgctatgccatggatgaacacatccttctctttagacgatgtgtgccaaagcatctagaaatgaagtatcatgatgttgacagtgtactttccagcagctcagcaaaaaggaaaacaaaaggatggaaagagaagaacaaagaaagcacataagcatatatggcaaaatagtaacgccatttgggtgtaggcggtaggtacgcgggtacttggtgtattgttgtcacaaacagtagttgagaaaagttggtgtgatcacttgaatgtcccctgaattttctcttcttctccatctccactgccactgcctgacttctggcctcctcgtccccagccacactctggaggcagcttcctcactgcgcttaccggcccagcccgtcccactccgcccattctcctccaaactgccaggagctgtcaaaacgcagcctcatagccccaacgccctctgtgctccccacagcctccaccaccagcttcatctcccatgaatgccgccacccaccaaatcgcaggtgatcatccagctgcgggaaccatttccagctccttgaggctgaccacactgcttcactctgcctagaggcccattaccctcccacccaccttcctccttggctacctggcaacctcctctccttccttcaggactcagctctagggtcaccttttccagaataacttctcccatctcctcctgtcctgctttttcattccccttcctcattgtgccaccaccttgttctggacagacatgtgcgtctgctctttgtgaaccatggccacatctcattcatttatataatgccagcatctggcacaggcacaaccaggtagtaaacaaacagatatttgtgaatatgagggaatgaatgcatcaatgaatgatgctccaagtgaagaaagtgggaaaacctcttgatttgcacatgtgtatactaaagtgaaatagtcattatgttctcgatccactcattgttcaaccactagtcaccgaggaactatcatagatccactaggcatataactacctttatacttgggtcttgcttcattcattctttcattcatcaaacacttgacacttgttgagccgggggcactgtgctaagagctgggagacttgcaaagatgaatcaggcagagaccacagctccaggaggggaggtaaggcatgagcataaataaaggagaaaagtggtcagtgtcatcaggaaaatatatgcaacaggtaatggaagttcaaaagaggcagaaaggactcctaggagccccgcaagagagggggtgagggatgacctcccgggtgagctgacatttgcacttgactttgagggatggataattttagatgtaagcctttggagggaggagggcgttccagaggaagggcagagtagaaacaaaggccctgagctaggccctgagctaggccatgtacaggggtcaccaataattttgctttgccggaatgtcattgaagagaagtggaaaataaggttggggagggaggctgaagtcgctgtagcctcaaaggccagaataaaatgtttagcttttattctgtgagcgtggggtggccatggaatccggtttctgatcagagggtgaattgatcaggtatgctttcagaaggttatcccagcagtgccgtgcaggatgaatgtgcatatttaacttgttccctaacaatgcaaagtccctatgtacactgctgaccttattttcctcagagtttagctaaaaaatttgtacatattaaatacttaatacatttccttaacattaattgaactgtgtacataagtgaatatctatatttcttgcagcaaaacacccattcagccagttcttcttaattggaaactcttacatgcaggaatcttctcctagctatacttctattccttttcttggctcctcactattccaaatccttagcacttacttcctggatcattgtaacagactcctgatggtgtctccccatgagctctctacactgcaaataaccctggtggaccgacgctgctcaagaaccttccatggctccctcttagttactggcatttaagatggtccataaccaggctatactttacccctatctatctcccattccttacccatgtgtttcccctactccagccagactgtttcccccccaattcccttgttctatcctcctttcatacctccgctcatactgctaccccaacctgctcttttcctcctaactcacctgagccatggctcaaggccccgttttgccagcagtgcaatagtgtgaagattcagaaagacctgggttcggatctcagagttttgattccctgtgcaaacttagaaatgctatgcatcctcttggaatctgagttttctcatctataaaatgggaattacaataatgcctatttgttattagggcttactattattatcaatagggctattgcagggagttaataaggtaggctctgtgttcagtaaatggtgatggttctttctcctctgactccttgaaattccaataaggaatgcctggaaggaagttacattttgatggcatacctattttgaaggaatttatcttttgaagaagtacataccactgctggtcttttgctatttacttcctccacaactctaaaatacaagcatttctgtcctcattttaaagatgaggaaacagcctaaaaaagggaagcaatctgccaggggccatacagctaaagctgagttagtgcttgctaactgtcagaaataaccacagcaactgttattaaatatttcactatgttccaaatactatactgagcatattacatgcaatatctcattcaagtgctttatcctgagatccacactctacagaagaggacaatgagatgcagagaggataaggaactttcccaaagtcctgcaaacagtacatggaagggttggattcaaatgggggtctgcatgccttcaatccatgccctcggctactctgctgtaactgtgctatctgggccagtgaggtgtatggacttggcatgaagccctgagaggctgagactgacctttctagattttctaaggcatccagtatagcaaccactattgatcacaaggttctccaggtgaggcaggcaggccaggcactagctggatggcctggtgatgatgctgatgatggctcccctgaacaactggcgatagttactttgtcagccctgacacttacccaatggtgcagccggcctctgcttcgatggtccagatgcagttgagattgtgttcatagggagctggatacccgggtgacagcacctgccccgacacctctcctctcactgtccctccacactcggctgaaagaaatcccaaaagagtgagcttcatggggtggcctgagctgccagcagtcactcagtggctccttttgcctgtttgctcttgagtcccttccctctcccattcatttcaagtgattgagcacagcatattaaaaggtctctggatgagacttatatccagaacctataaagaacccctacaaatcaacaataaaaagacaagtaacccaatttataaaaggcaaaggattcgaataaacatttctccaaagaggatatataaatagccaatacatacatgaaaagatgtttaacattgttagtcattagggaaatacaaatcaaactcacaatgagatatcacttcacacccactgggatgtctatagtcaaaaagactatacaagcgtaggtggggagtggagaaactggaactctcatcattattgatggaaatgtaaaatggtgcagctgctttcaaaaacaagttggtggttcctcaaaatgttaaacatagtcaccatatgacctagcaattctgctcttaggcatatacccaagataaatgaaaacatgttcacataaaaacttgaacatgaatgttcatagcaacgttattcatagttatcaaaaagtggaaacaacccaaatgtctatcaactgatgaatgaataaacaaaatgtggcatagccatacaatggaatagtattcaaccataaaaaggaatcaaggcggccgggcatggtggctcatccctgtaatctcagcattttgtggggctgaggtgggtggcttacctgcggtcgggagtttcagatcagcctgaccaacatggagaaaccccatctctactaaaaatacaaaaaattagccaggcgtggtggtacatgcctgtaatcccagctactcaggaggctgaggtaggagaatcacttgaacccaggaggtggaggttgtggtgaaccgagatcgcaccattgcactccagcctgggcaacaaatgcgaaactccatctcaaaacaataacaacaacaacaacaacaacaaggaatcaaggcttgctacatgctacaatatagatgaacgctgaaaacattagttaagtgaaggaagtcagacacattgtgcgattccacttatgtgaaatacctagaataggcaaatcttggagacagaaggtacgttagtggttgccagggcctggggaaggggacaacggggagtggctgttaatgggcatgggttttctcttgtgggggacaaaatgttcaaaaattagattgtggtgatggctgtacaagcctgtgagtatactactcacatggttaggctttgtgtccctacccaaatttcgtcttgaattgtaatccccagatattgagggaggaacctggtgggaggtgactggatcatggggccagttttccccatactgttctcatgatagtgagtgagctctcacgagatctgatggttttataagttccatcagaacttatgaagttcctccttctctcacttttctctctcctgctgccttgtaaagaaggtgcctgcttccccttccgccatgattgtatgtttcctgaggcttccccagccatgaggaactgtgagtcaattaagcctcttttctttacaaattacctagtctcaggtagtatctttacagcagtgtgagaacagactaatataactacaaacaactgaattgtacactggtaaataaaaatggtccctgagtgtagggctgattgcctgttctgtgaccaacctcctcaaagcctcctagggaggaacatgcaagtacttcaacctgcttcttgatagcaacaggacctctgctggctgccaggacagcagagatcaacaggatactgccctcccctggaagagtttactgtctagtagagaagacagccacactgtgtgctaggtatcctaacaacaagtagcagcagaagtgaccaatctccctgagcaaaggacagcgagggtcagggagggtgctggtcttaaatgaaccttgaaggagaagcaagagttgaccaggtcggttgggtggcaagggtaggatgggaaggagggcactgcagagagagacagaagagtaactgcaaagttcctggaggtgaggaacagcatggcaggctggaggctggggtatgagatagggagatgggggagatgggactggaaaggtgaggaagcatcacaggttgaaggaccttggataccaggctgtcatatattcactgttccaggaaagaattgcagtgattatacatgtgagttaattgactgcatgacacatcagtgaactttgcatgttaggaggagtcactgtggtggcagtatgatggggtacagcaggggtgaaactggaggcagggaggcaggtgaagaggtctacattccccattggagcagtcactgaagtcagaagctgggggttcctgctggtgttctcctccttcctccccgacatctaatctgcctctgagacccagtcgctaaacctgtgtggtattattcatgtttgactctactttgcccacattgctggagtcttgactcaggccctcacaatctctaggctggcagagttgcccacgctctaggcagtgccatcaacggatctttatcaaatgcaaacaagtcactgcttgcattcactccccaaatgaagtctaaacttttcagtagagcccactgagcccaccagagtggctccctttggcctccgtgaactctttggtctaggctgatgaagtccacaagctctatttggatggaggacctgaataaacatcctcgctgtgacatcttttgtgacatacctcccctccccaggtagaactgacactgccctcctttgtgtctgcattacaatgtgaatagatttctactatagcatgtgtaacatgttattaaaatcatgtctatttcctccacaagactaagagctccttggcagcagggaccttgtcttatatctgcacatcaagtacctagtatactgtttggcacattatagatgcttaacgtttattgaattaatggatggctggacaatcaaatgaatggaagcagattattgctttccatgcaaattactataagcgtctgaatcaagggagaatgagtacaaatgaagaggaggatgttcattgcagagctatttaggaaaaggaatagttgattaggcaagatgctagaaataggagaagaagggatcagggtcacagatggaagactgacccctacctgttgctataaaggacacatcaaacatttcatggacccgttggtttcacacaggaccactaaggaagggttgcaggagaggccctctacaagaccctctgctcaagcttcactcttctctccaaggtgctgttggggtgggaggtgccaacctgattgaaagatgccaggctgaatggacccatggcagggagtagggtgctggtgagaggatggactacaattgtggggaggaggcttgactggttccacaaatagaggaagtagctagaaaggtgggagggcattatccatgtccttggttagagcttccttccatattccagacagagaaggacctcctgcttcctgggaagtgaggatttggaggcagcagcactgggaacatgtcatcatggacaactagataccttacctggggcctggcaggtgggcaggagggggctgagtgggccagcatgtagcagattcaacaacattgagaacatgtaagtctactctttctggtcttctcccttcttcccacccttgagtcttggctgctttgtttgggctgcagagtccactcaccgaagaataaaacatttggatgttttaagctatagcagtcatttgtggtagaccatgatgaagtcgaccacaacatgacatatacaaaaatatgcacataatctcaaatacacagcctcaatcccctagcaggctagaggcagtctcaatggggaaggcctccaaggttctagtgtaagtctaagtttaaatgctcttatactgcttgagtgaacccaataagtccagtccaactggcatatttgatattcaaagtaatcttacagtgaatcttttctgcaaagcaaataattatcttgtaatacgagtcatcatccctccttttcattttgtgtgctctggcttgcttgtctgtggcattatacggttgtgtgtttatgcaagcatcacccttcctggcctgagatctgctcttctctgtattcctagtgcctagcatagttcctggcacatgaatgaggggagatataaaaagagatggagggcgaaaggggagatatgcctgaagaccaggtcaaaggcaaagggagaggaagaccctagaggttccataaaggctactgtttcggtctgtccacttgcagagggtccacttagaccctccattgtataacagtgttaaagatcctgtgaaaatgtagtcgtctaggggaaaagcatctgtggcctttaacacttcccaccatgctggttcacactttcacccttgcacgtgctcagtctagaatgtcaacctcccttcctctccctcctgttggtgaattctaatccattcttccaagtctcaattgaaatatcacctcccatgcaaaacattctcatatcctcccaacattttgcacttaactctttttacagtgcttctcttacattatacttatctgtttatgtgtctattctccatgctggagtatgggccctgacaagggcagtgaacaggttttattcttcatttatttctctgcctccacaaatacccagacatacatgtgcaccaattttggcatgtggggcttggtaggcatgtatgtgtttttccagtggaggttttgttcttacaagattagccagtgctggcacagacacgttgaggttgtgggacatggggaagggggtggagagagagacagatctggttttggaaaggtaggaggcaggacgaagcagtatgggggaactcacattagcagggagatgggtggtaagagatgaaaaggccaaacagaacaaccaattttgcctattttgcacttctgcctcagatcactgtctcttgtcctgtgacacatgtgtaaagattctagagaacctctgatgacattctggaagaatcacaggtttaagaagatgcaagttcattattgcattctttatcagtgagagcaatgggtgttctttatcttactatgtcttttgacattcctccagtaaagggagaatgagccccattttacctatagggaaactgagacctaaagtgggtgggagactcatttgagtcttggcgttacgataagccctggaactcaggcaaaagccccatctctccctttctaatggactctcccacctcatcgctatcacccgcgttacaattttgagggcatgacttggctgtggtcccacttgctaaatgtgcgacaaaggcaagccacccgcctgactgcactgctgcatgggtgtaatgaggtgtgaaagtgaggaagtggagaaggggtgcaggtgaaccatgatgcctgttaacaagaggattcagtccaagttgatggcccccaggccctggagcatggggtctaactggaatgagaccaggactagagcttggtattatgggagacccaagggttccctgcagaggaagagccctcctaccgacacaggtgggcagaggccggtcccaggtccggcgctctccactcagacacagcagctcctcactaccccgcaggctgtatccagggtcacagctgaaggacacggagctccctgcaaaatgaccttcatcatgaaccttgtagccaaacttgggggttcctgggtcctcacatttgatgagttcaaagcctggtgaggagagaagaggtagagtgagtaagacctattgtggcagaaaccatgcttcctctcttccctcaaagcccacgtcctcaaggaagctgtctcagccacggaccctgggttctgatggattcaccagtcaggatttcctcatttctatgctcagttgagggtatattaaggaacatccatttctctgttgctatatgtaaatgatttctgcttttaatagttttcaggcctaaggtctgcattttctatttcttttgtttgaccccgtagcatttttgctagcaggagcgttcttttcattttgcttattgagacattctgataagatggtgtaatatggagaagtcactttaaatgtatgtttaaaagctgagttatgacctgcttaaacatacgctgttgaaatgggctggaaaaggaaacagatttatgcagagctcccactctacggcgctatacatgtgttctctctcatttgttattcacaggagtcttacaggtgggtataattatctgcattttacaacggagagcattgatttgggaaggttaaataaattgttccaaacttacacaattttcacatgatagaagtggaattcaaaggtgtctctaatcctcttccactgaacctcttgctgtaacaggcaaggatcctctgccaggcagccttgagcccagacgaggggaaacctgactatactccgtgcatgattttccccaatagctttctttattgagatacaattcacataccatacattctcccacctaatgtgtacaatccaatgtcttttagtagattcagagttgtacagctattgccataatcagttctagaacatttttatcacctcaaaaagaagttccatacacatttttcccccaactccctcagccctaggcaactgccctttactttctggctctatggatttgcctgttctggacagttcatatgatggagctcaaacaatatgtggcctttgagactggattctttcacttactgcaatcttttcaagggtcatccatgtcaaagcatgtatactttactccatttttttttttctttttttagacagtcttgctctgtcacccaggctagagtgcagtggcgcaatctcggctcactgcaacctctgccttccgggttcaagcaattctcctgcctcagcctcccaagtagctgggattacaggcacccgccaccacgcccagctaatttttgtagttttagtagagatggggtttcaccatcttggccaggctggtcttgaactcctgacctcgtgatccacccgccttggcctcccaaagtgctgggattataggcatgaaccactgtgcccggccacttcactcctttttatggacaaatgctattccattgtatgaacatatcacattttgtttacccatgcatccactgatggatacatattggattttaaaacagtcttaagagcacattctttgtatctcgtgagcaagcagaagctcaaataaatgaataaaatgggaaaccctgacttccttgtccacacagatgcaagaaagacttactggaaaagtgcagttcaaagcccttgctggtgttttcagcatcagtgatgaaatcaagccacagactgctggatgtgctgttcaaagtcacccccatcatctcagaatggctaaaaactcccagcaaacgggcggagttgttgttgccatcataaacctggacacaggagagacccccaacccaatgtcgtcagcatggccttatgttgaacaacacctccttaccccacaacccacactcctggagtttagcactggtaacaactatcagaggcacagtgagttatcagatgcaaggaagatggcagagggaagctatcaactgagcaagttatctcgttttcccttgatgtcagttctatgctcagcccatctttagtgtgaatctagtctttgggaactcattgctattctaatctttccagtggagatttgttcttgttcccgcaatgcccatatagcaccagcttactctttagcagcctggggaggccaggtttgggttgcctgcttgtcaaaccatctgtttcttcagagagacaggctgaaagcattcatctctacattgctaaaccctcaatcctgtccttccagtagatgagacagccatcctctcacctgatcccaccccactgtggcagtagcctgtcttgagcactctgctggacatcatccctgggatccagacaccagcatgtcatggtgactttttcttccccaagctcagcctctgccccttccctcctaaaatgagggctccagctagggcctgctgggcttgccaagggtggaatcgtacaggcatctggcttccctcactcccatctgtcccctgaacttcttagtaccagcaaagacaacaatcatcagaataatgaactggctccccaggtttcaaggttgctgctcctttccagataattgtacaaataacaacagaagttgtgattgagtgaaagaccccctggtgcttttgtaaatatcaaagatgggatctctgagtgggtgatgaatatttgtgcatggcacacaatgtgatgccagctgccagcaaattggcacaatatttccattgtactatttatgaagcaaagctttctaaaagaagccatccttcaaactaacagtgttgtatattacagagatttgtttaggctcctgggagcctgaagtctgtttccagatccttgtgtaattgctgtgtatcactgatagactgagtgaattctggggttccaacagacatcaagataatacaagttcaaagagtttagcttaaattgttacaaaaatatttttaatcaccgaaacatatggaaatcaatggaccaaggcatttatcatcaatggactaggaatcatcaattgcaataagaaataataatcatcaattgcagtaagaaagacaatcagacaccatgtgtttctttaataaaagatataccatcacccatggagttatcttgcccaaaaaatcagacctgatcagatcaagccactggatccaatttccaacttacaggcaataaataccgaggacagaggaacatacgaaatgataccctgtgagtgcattcagcaaaatccagagtggaaagttccactgaacaaatgatctgatttcctcaacaagtaagttacaagggggaaaagaaaagagatggagggagaaacctacagattaaaaaacacatcagacaatgaatctaatgtgtggaccttattgaatcctgattcaaataaactataaatttaaaaaatattatgacatctatgagataattggaaatttaaaccctcactggatatatgatgctattaagaaattatggttaattaataaaaagtatgatgggaacaggatattttccttaatttccaagcataattcatcctaattcatcaagaacaaaaatgttacttgcatcattacaatattaattgcagaaaaacttataaaacagaaatgtgcaaataactttcagaacttacaacatgttggtaagtgtccttctagcctttattctatgcatttatttccttgcataaatttatgtttttataattttttataacaataagatcgaattatagatactatagggcaaactgctctttcacttaatataatgtgtatatttttaaagtcattaaatattttttccataacagcatttaaatggtggcaggaatttctataataaaaattaacccaatctgcaagataattatttacatatcagcgcccaaaatatatgctctggcacataaggctcactcagtaaatgtatgataaataaaccaatattttcctctagaattcatgtcgttaaatctacctggaatttattttgggatatgatatacaattctaccttaactccctgatagattagtcatttaaccaaactctgtttgtaaatattccacacactactaatttcaaatcagtctttatcacatatataattaacatataattatatacatttggttttgtttgtcaactttctattctattgcatttgtctatttgtctattcctgtgcatgacccacactgttttagctactgtagctttacaatatatttaaataattagtaggaaaagtcctcatttgtcttcttttaacttaaacaaaattctcccagatgtactcttctaaactcaagaattttcctgaattataaaaagtaaaacaaaaaactccccaacaaaacttgtgtaattctgactgagctacattaaatgtatagacggatttgagaaaaatctatctatgtgatattgagtcttccaatccatatacatggtgtctagctccatttaatcaaaatgtcttttatgtctctcactaccattctgttcttattcctgggtatttttatatttttgattgctattgggaattgggcctttgtatacatttatttcctaacagaatattgcttgatggtccaattcatcattatgtgcaggtgattgagaaatccaagagaatctatgcacatccattacatccaataaagcaggtcagcaagatggctggtttcaaaatgaatatgctaagcagaaagctttctatacacaattacaaacaatgtaagcataatttctatgaatattcctgcatgtccgcttgcacacgtgtgcttgagtttctctagagcatacatctagcatggaaaagctggttgtggggatgacacatcttcaatttggttagatattaccagattgctctttgaaaaggaatagcaatttgctctctcaccagcaacgtctgacagctttcattgctttatatccttgctgatacttggtattttagggcattatgatgttttccaatttgatgagtgtaaagtggtatctcactttaatatgtaaatccttgatcgccattgaagttgagcatctttttatgtttatcaacagttcttacttccttttctgtgaattgcctgccttttcataccctctgtgcatccatgagaatgaaatctccctgcatttattttagttacatcaatatcaaaataaaattttatcttctctcagttaagatcatgcacattttggagggcttatttctaggtgtcttacagtttttgtttctattataaatgagactttccctcctgattgcaagttttatttggttatagaaacaccagaagctttgtgaattttcttattgattttgagtttattagttgattgttttgtatttttgaaacaaaagtcacaattttctatattcctttctaatttttatagttcctttttttctttttctggtataaatgtaatggtttgtctcttcagtacaatgctgcgttctattggtgatagtagaactattgatcttgttcttgactttactgaaaatctttaggaagttttgccattaagtataatgtttgctataggcatttggtagaaatatttttatcaagttaggaaagttctatttgtagttttatgagatgttttcaaaaatcatgagtgggtgttgaacttaatcacatgatgttttggggtgtattagcaggataatgtctttttctttgctaatctgtttataggctattaggttgagccatgaaattgccaatattttaacagttttgacctacaaaaatagcaatttcatatggtttgtctaacaaataacattatgagcttttctaattttgacacatcctcacattcctggaatcaaacctacttggtcgtctttgtttgcttgtttgttttttgagacggagtctctctctgtcacccaggctggagtgcagtggctgcaatcttggctcactgcaagctccaccttccaggttcacgccattctcctgccctagcttcccaagtagctgggactacaggcacccgccatcacgtcccgctaattttttttttttttttgtatttttactagagacagggtttcactgtattaaccaggatggtctcatctttgttttaatacatagccaaattcaatcagatttatactcaaaatttttagatctgtgatcaaaagtgagactgccctaatagtttctgatttctgttctttttaaaatttttattttaaattataaattgataaattatagctgaatatattcatgcagtagaaagtatgttatgatttatgaatacgatgtggaattagtaaatcaaactaacataaccatcacctcaaatacttatctttttctgtggtgagaacatttgaaatttactcttttagtgattttgaaatgtatgatacattattatttgctatattcactgtaacgtgcaatacatctcaaaggaaaaagaaacccttaattcttctgtctaattgatgctttctatactttgaccattatctccccattccctcaatcccctggtaaccataattttactcgttgataccaaagtttctacttgcctcattaagaaaaaatgagttgggagatggttctttatttttctctcttctgaagagtttattgcagggattaattgcttcttgaagttttgttaagcttacctgtaaaatagttaaggcctggggcttttgagagaggatacgggggaatcataattttttaatggtcattgtttttttttcagattttttttaatattagtactttttatctataaaaatttccatttcatctgagctttcagatttcttggcttacagttgttcctaaacattccttctcttttttgaaaaagggtctcactttgtcgcccaggctggagtgcagtggcgtgatccctaaacattttcttatttccataatctctcctatatctttgattatgtcccttttcaattcctaatattacatatttgtggcttctttattccttgatcagttctgctagtattgtctactttattatttaaaaaaaaaaaaaacagttggtttggttgacaattgctattgctttttagttttgtttctctagtcatttctgcctttatctttaaaagtatctttctcctactttcttctgatttattatgttacattattcaagctacccaaatctttatttatcgttaagttaggtgatatgtcacagacttacagaggtatattaaaatcttccatgatggctgtaactttattaaattgttttacatttccagcggtttttatttaatttattcgtgctatgttatttggcacataaagttttactgtggattgattatccattttattaatataaaataatcctctttttcatttccttatgagatgtgggagaaattctcaaatttatcttttaataaactgatttcatttttctgtggtttaccatcttccgttcattgcctccattccattttttaattgggtgatcatgtttttcatctctattcaatctctcctcatctcagattgctctgttttcattattgcctatttttgtgtcataaatataatattctctcaaattctcttaagaatacaaattaggagcttttaaagtatgtctctgttcttcgttgcctacagaggggcaattagctctgattccgaagacatgtcttcttcttctgatctactgaatatttacacatatccagttaattttcttgttggcacaccacaacagagggaaaatggaaattgggaatggaaacactcagcagtctctaagggagagcagaggagctaaactcaaagaggccgtagcaggagcatttcctaccctggtgctaaagagtgtgtgtgtgtgtgcatgtacgtgtgtgtgtgtgcgcgtgcatgtgtttgtgcgtgcgtgtgtatgtgtgtgtgcgtgtgtgcattgtgtgcgtgtgcatgtgtgtgcatgtgtttgtgtatgcgtgtgtgtgtgcacgtatgtgtgtgcactacctgggctcctgcatcctctgttagtcctccctgaactctgacctaggttttatgccccatgtccctcctcctttcttaccctgaccacctcagaaagactctctctgcttatctactgagctgcccacctgaccctgaagccagaaccctgacggtgccgttgagtgtgcacacctgctgactatgtcttaggtgctattctgaatctagacccccttagtgaggaagcatgggcactggccatactccatatgacctccagcaacctgggagccatttctgctggctctatcaggtcacttgcacagaaccactgcttatactcccttcaaaacctgaaaattgtaaactatgcctcaaagctggctttttgtgctaatggccttcatccaagaaagcctctgcattgcccagcttgcgttactccatctgtacctctacagagaggaggtccctctggtgctgctgtactgattgcaccctctgagactcaaatggatggagggaagtgaaggtcaagggtgatgcctaaagacatggttattggaagggcataaaacccttgtcttgtattctcttgttgggagacacacactgtttttatgtggggttggaaagcagagcttaagaagccaatgagattgttctatcccatttcaggcacatccagtcccagccagtgatctcatgagtgaatcttcttgggttcaaaaaggattaggtaagagtgagaaatgcatttcaaacacgcacgcgtgcacacgcgcgcgcgcgcacacacacacacacacacacacacacacacacacacacacacacacaccatacaccccagaggacatatgccccagggggttggccaagagtatccatcatctgtacataaaaaggacagcacatttatcacatctggagataatctgaaagcatggaaatttaatggtttatctttggattttccagagtagtgggctctggttcaactttttccaatgtaaggacttctctggctacaaggaataaaactatattagaaaaagctaaaaaaattccttggcctagaatgaaaatgaacatgctttgtatgaggctttccttatcattcattttattaaggcagctctttaataaattctccacgctcaactctgtgattacacagacatacaccacacattattggaggtactcaatcacatattctttgtatttatgcaaagaaacataagacatatatgctcagtgtcttaacaaatccctctctatgaccttctctgtaatccaagtcctatcatttccttcccttacatatgtctcaaactcactttctttaaccccactgccacaccaggccatcatcgtagtacactgaagctactgcaatagcctgttattcaaccaaaacatacacaatgcacaagtgcacatacacacaatatgctgacacaggtatgcacagacacagatccccaaaaccaaataaatacatggacaccgattcacacacaggtggaaacatatttaaaaaagcatctatatccataaatacatagctacacaaatgaacacacacatgcatatatatacatgttctatgagctcttcatcatccatgttgacggtcagggctcaaaatggaaaactggatccattggctgctccaaccgaacttattattattattattattattattttgagacagggtctgactctgtcacccagtctggagtgcagtggcatgatcatggctcactgtaacctcaacctccctggctcaagtgaccctcccacctcagcctacccagtagctgggactacaggcatgcaccaccacacccagctaatttttgtattttttgtagagatggggctttgccatgttccctaagctaaattattgtcttttattatgcagtcaacccatactcaattacacatgcatttgatagcaggcagcttctaaacaaactctaaaaccatattcttagatacccatatacccctctcttttggtcctctctttctcccagatgagtgaggacagtattttgggactcaggaaggaaggagaaagtttggatcattcacacagagacaaaggagtgagtattgactagactattgcatactataacacacatactctgaaatcgatcaattttaccttgaggacatctccttcggagagttcgaatgccctggctttcagctgaattcccttccctggctgggtctggatggagtagatgcattcatgattgttattgtagttcacaggaaagttgggggacagcaaagtaccctgagtgcctgtgactgaattcccacactcagctggaaagagaatcacaataaccatagattaacccccatcagctgcatccagaaagcaactcacagctctgaagaacctgacaaagatgacaagtcgtttgcctgtctacctgccaaggtgcctgcgtgtctgtccagttgttggactgtctacagaaatgcctctcaaacttaaaaaaaaaatacttccctacctatggtgctgcctgctttgtttctgtctcttgtgctgtttgtctgtctctctcctacagaaacagacgctaacccaccaggcatcctttacaatttctcagtgctataaagcagccgtgccacatacctattcatatagtagcgtagcaacagaaatgaccgaggaggaggtcaggggaagaggggggcagttaagtgaggagagatgaagcctttcagtatcacagaatagaaactaagagggggcaagatcacatcataatcgctaacccttatgtgcaaaacagcacgattgacactttacaaggaccatttcagtcattagtcgcaacagccagccccataatgtaggcacaatgatcatttctggtttaaagataaggaaccaggtactcaaccactgagaccaagcctctctgtggattcacgaggaggagggggctgagaactcaacctcctgggtcctggggaaagtttttagcatagtctcattgcagcctgtttcattcaacagctaatgaaatcacaccctcctctggaaactgcttctcctcctccagaattagtcattctttccccattgttctcatacctttatttatagtagtcatcccattttacttcacttatttgttaacatttctatgtcctctactgcactgtggatcctttggggcttggtcgtgttactgtctccttaacacccacacagtgcgtaggcagggcaggcttagggcatgcacagaggaatgggatctttaataattggggggcccctccctgttccttcctgtatctgagcacctcccatattgcaccttgattgcttgctgcctgtcctgtgtcccccacctaaactgtcagtaacttgagggctagggtcatgctggatgaatctatgaatttccaaggcttagcctggattgtctgtaaaataaatatttactgaatgaatgaatgaatgaatgaatgaatggatatggagtacactgacctcagaagatgtacagtcctaaaaataataattaggttccggaaggatgtaaatacaagtccagatggcaggcctgttattcgtgtggacatatggggaatttggagcatgccttgaatctttcaggcggctggtagcaaatctgctttctctaaaccatccctcagtatccttcagtccaggcacagtctgtggctagaaaagccctggggttgaccaaagggccattgcttgggccttatagttaaccctaattaccctaagccaggagcgtactaggctgaggcagcatagatggagaacatggaaaccttcagaacatggaaacataagctgctcatgggcttagttatacatcttgtgttttatcttgtcctaaggctcctcattagtcctttgaagatgggggccacatgtcccaccaccaagtccctacttttctgaatggaccctcctccctgtgtcctgctcaattcaggaccagcttcagtttcctaagactttatatatggcctcatttatttctcttggaggagaaatctaactttacagtacttttaaacttagtctgtttgcaaaacttccaaatatcatgatgaatgtgctgagatggctcataaaactcaagggacagtggtgggcaggctccctgggggcagtggctgctgataatttacatagacgtttccagcatgtgtacatttctttgatgatctcagatgagggtgagggtgaggatttgtcggggggagggggagttgcttagggccatgcatatgtaaacacttattactcagtcatatcacatgggcagccttctgaagcatctctccattttctctgagattactacctttcccctccatctaggcagaggcctgtggtgcagtgggatgatcatggactttggagttagatacattgtgtcaactcactgaaatttaatctcttcatctgccttcatctggacaataatagcattctcataagactgtagaatcaacgcatgagattttatatataagataggtaaacataggggaatggttagcacatagtagcctctccaccaatgtcccaggtgaatctacatggattacctgcttccatttggaaccctaactgcctggattctgggactggcagaaagcctgagaagcatatgggaagcgtgcattagctgcccgaggctcacagcaccctcatggttcctgatgcctcttgccctctgcctaattctcgacagctggcttcccttaaacatgggcttgggtgtgtttttggacctccttcctggccctgcttcctgcataagagctatgtgccccacctctgccccagcacgagcctctcctccttcccacacgcctgatacctttacgaggaggggctgatagctttagatgtggccagtccttggccaatccccaggtcctgactccctgtcaggcctttgtcctgggcaccagggaggggacaggagggatagagggacggggcacttgcttccgggagagtctccaaagtaacaggggaggtgaacagatgaacttagaagccaaacacaggcacaaatggaaacaaataaatgttccagagaaacaaacagtcacaaccacaggtaagtgctgtggctgattctggcatctgtgacttctgtcgcccccatcagaaggggtctcgttaagggcagaggttgtaccttatccatcagcctggggcttctgaggcagagggttaggtcttctccatcacaccaggattcccaaggacagggccatgtctcttgctgcagactggggtcccctggggtcagggctgtctcttctacatcaaattcaggggcccctgatgtcaggggctatgtcacctccctccccgccacccacgtcacaccatgcattaaagcccagggctgttcatctccttctcggctggaaatgttcctggtagcactatgtggactaaatcatccaatttgcatggcgactgggagcagcccccggtgggcattcctgagatgcctccagcctgagcctcggcagcagggctggtggtaattagaggtgactataactactgtgcattattaataacatgtgaaacagaagacaaatgtaataatgaaaatattgtgaggtgtcatgaacaaacagtaattggaataataagttaaagaatgagtttatgtaatgagatcaatgaggcaagagcttaagggctgtgtgcatctgtggtcctggttaattccattcaaggagaatttcccccagaaccatttagctgaggatgctttcccagagactaaaggagctgctagcagccagacatgaactgaaccttcctggggtgggtggcggggttctatgtgtttctgagtgtgtgtggccagatcagggtgggtggatgcctttggggatggttataggagacggagtaaaccctggggttatttaattgttcagaaatggaattctgtagctctttgttttaatgtttcctttctgagattgtaaaaggttattggcaaaataacaataattggttattgataaatacagataaaaatgttattggcaaaatgctgataattatatgccacctcttggtttatgtaaatgatgtcatctaaggtagagtaaagcctgtgaattggatgctgttatctctgttttataaacaaggaagctgaggttaagggggtttgctggcctgcctgagatctaggcgttggtaagtggcagagcagtgaccccaccttggcctgcatgagtgcacagcctgggcccggctcatcttgccagcctgtctaagctgtcctcggcatagcctgagggctccatggacttgtctcgggcacagctgacctcactggcatttgagatgctggtccctgtttcagtcagtgcagtgctgctttgatctgttttgtatatttttatggggttttatatactatttcactttacgtgaggtccatggctaacagtgagcatggaaaatactccatgaatgcagctagtgttttatccagccctacattataaggattgagcaaacaggcacccaggagcctcatacattagggacagacagcaatcactccgccctggggaaaatacttgcttcccctactacctgggcacagcgctctgaacagacttctttaaagctcttgcaaggaggctggcagggcccacttccaacttccaacagctgcctctaacctccacatctcctgttctccctgccgcttgctccagcttggcctctgagctgttcctcaaatgctgagcatgctcatggtttgggtcttggtcctctgttccctcttctcccagatatctatctctggccaaacgtcaactcatcagagaggccttttctgaccatgataaaagagcaaccctagctccagcactttctaagctgacttaatttttctctgtatgcctcaacactgcctgacacatcacatatctaaatattcacagcttgtgtccccaccaccagaatgtggaccacgagtgaagaatttctctgttttgttcacctttgtaccttcagaacctagcagatgcctgagatgtagtgggtcatctataaatgaccccgcccctgttccttttgtcctcccctgctgaatggatgaagccttcctaaggcgtctctaagagtgagcaccgccattggattagtaaaagcacccatctactcctccagatggggactccccctgggcaaaggtcatatacccctcctacaggcccacctagtgcccatccagattcctcggtaagaggcatccttaagccatgggtctgtgtgctgagggtggggaggtaagagtactgaaatcgacttcatgtgagtgcccactgtggacctaatttgtaaaggtcactgtagtttatacagaactgcctgatgaagcagggattgccatccctattttgcagataaggaggatggagcagaaggaggttaggttacctgccccgggtcccactgcaggtaagtgtggtaagtgtgggctaagtcagcctcttggcctgtgtgccgtccaccacctcacatcaattgactataatctgtcccaccccattagtgaagcaaaatgaaagcacgtgaccacctaccaacacaccttggcagaggcgagctccacaggcgccgtctgccccccaggcacgtgatgcgggcggtgccctccagacggtacccggggaagcaggagaaggtcaaggtgtcgcccacgccaaactgcaagcccttccggatgctgtaggctgggacctcgggctcctcacagggctccaagtcgtactctggaaaggtagcaggagatccgggctcagagacattgcggggagacacaaagcaaaaagatgggaacgcacaggcaaaacaccagggggaaagggccagggacaacgaaagacagagaagagggcatgcgcacactggcccacaaaaggtgacactggcccaaaaagagaagaagtgagagcccgaggggagcagaggcagagagaaacatggggaagcacggggaggcagaggcagagagaagcacggggaggccaggacgggcggtctgcacccactcctgtgagcagtgaaagggcacagcctttcctagacaggcttcccaggaggatttctgaggatcctcaggactcagctcttctctgtgctatccttttatctccattttaaacctgtgccttggggctcacaggctctcctgcttccttgtctctgggcaacaaactagatacattcaaccagcaggttctagaaggtcagaatacatgacttagcctcaggcaactcccactggtgaagacactccaaatgcctgacgagaagccatgtctcagctacgttggcacttgaggcagacggcaagcatgaccaggggcatttatgggccaaagccctgcctggggcctctagtgacagcatagaagtgactagtccctcgtctgcaagggcttctcccttcaggatgcagtcctccagggatgtgtgatgagaaagagggtctctctcataagggttgagtctcactggctggatatgtcccattggccaagtgaatccagggatgtgacaggtgacttctgcattggaggcctggcaggggactaagctgggccacaccccagttcctagaagctggatacctcttgtccatcccaggaggaatccatctgatactcctggccgtggctgagaaaggtggagggaggtactctggggtgctacgggacaagaatggtgaagggctcggtatgagaggagccaagggtcctcttttctccctgaatgccaaataaaagcactttcttttccaaatccctaaacagagagataaatatctattactacaaaattagcattgatgaaaaagatcccaaatgagactaaaccactccaatatgttaatttcaaaccttttttttttttcatattgctggggttggcaatgtggaagtggaatcagaagaaaaatctcgaataactaaggtaggaagggacttttgtgaagtcctctagttcatccagctaggtgggccatgttcagagcaaatcctaaacaccttcatagaataagaatcctcagtgattatgctaactccttccaagaccattataggtaagttcttacttgggtctaacccaagcatcttttgctgaagcactaaggtcaacttcccagggactggagagtggattaatatctatctgctaggaaaaccagagactggtagcagaaggagagagcaaatagcaccatggtctcttcccctcagggaccctcatactctttacctgagaaggtgatgttgaatccttcatatgacatggagaaatcagagatgaagcggacctgggcagtgaagttgccatagagcccagcgctgatgggagctggcagccgagatccagttagctgcctcaggggctgggtgaagctgccgttctcagtgatgaggaggtagtcatggccactttccaggtggaaggtgtggaaagtgaagaacacacctgccaagagaccagagggtcaggttgttgatggcgagatggctggagaacctcagctgcaagacaggatctacacaaacatttccagtttgcaaatgtctatctgtgtgtatgactacaagcatgcattgacaaatcatacaggtgaatctgaatgaaggaacctgaacacacaagtgcccagagattcagtcagggagaagaattttacagttcttcttttacagttctaaaattacagggagaattttacagttctcaaaatttaaaagagagatttatggcttgacctatgagaatgctttagagacattcattaattcatccaacaagcatttgtgtatttgttgagtctttactatgggctaggatccagggttaggtgcaagaggatataccagacattaaacgaatagctgcaatacagagtgctgagtgctggaatgaatgtagacagcatgccatgggggccggaacagaaagcagttgacagcaggaagaggcaggtggaggatggcttcaccaaggagtaaacaattgacatggatcttaaaaggatgcacaggaattaaccaggtaagggaaggaagagtgtcccaggcaggagacccatatgtgtaaagggactgtcaattccaggtttgttgagcagcagctgggtgtggctactcctggaattgaagctggataggtagacgggggccagacccaatatttttctggaggcaatgagaagccatcctatccagagtggaccagatctcagttttagcaagatgttggtggctgtaaggaggatgaagtggagggagagcagggagggagatcagttatattggtggctgctctgcactgggagaggatggggcttggcagaaggagcaagagcaggagatggccatgagccttcaggggtcagggtagggtagccaagacagcaggcacttaatgcaaaggagaaataacatgacatccagtggcacgtccacctgaaggatggtgatgtcttctgttacctagggaagggcacgcaggaggaaggtgtgggttgtagaagagtaatggacttagccttttctgcatgcaagcagtgagagctagtgggccactggaaggacagatttggaagttcaggattaaagggggactacagaggtagatttgagtcaccagcaaatagttgatatctgaagccacaagcaaggagaagagggctaggagagaagagggcagagtgagaatcagagaaggggtgattggaagcatgggcagaagtgacagggagtaggagaccaggtgaagttggagcgatgggggagatggtcaaagagcaatcagagagctggaaagagggaggagggagctccagtaagggggaaggttaagagcataaaataaaatcaaagtaatgatattcattaacatttcaagcactaaatatttactgtcctaactgcttttacttgcactatagtcagcccctgtcccttggaagggagacagaaaaactcatttaattctgccaggaaccctgtggcgtgggtatgttattatcatctccagtttacatccaaggaaacggaggcacaaagagatgaagtcatctgtccaaggtcgcccagctagtatgtggtagagctaggatctgaactaaggcaatccgattgcagaggctgtgctctcagctactccagggtgcggcctctcaggctacagaaagagagcaggtagttaagaacagccaggtagggtaagagatcaggtagtgagggaagttatagagcagcatggtcttaacacccaaagcaattctagaacttgtccagatggcagttgtgtttggtgggcatgtgtgtaagtgcgtggccatgcacatgggccatgccccatgtcggagcttgaatccagatttgatgtgacagatgcacacacaaatacttaacttgaatgaaccatgcagaatcacaccaagtgagtatcctattgggactatgtgttgtggatggtgccaggacaggaactcatgttagactaggacccacctgctactccaagtgtgatcccactttctactcaaagtatggtccatgaaccagcagtgtggtcagcactgggggacttactagaattgcagaatctttggcctccactgaagacctactgaatcagaatctgcatgctcttcagatcccaaatgatttatacacacttacaatttgagaagtacttctctagataattactgctacattttttataaatgatggttggagataagcctctaatgctaaagcattttaaaggtttttatatccttgcatctctgttgatagaggctggtgatcctggaggatttgggcttctatagatagaggtggaggagacagaacccaacagaagcgatgggaccaaagatgcagcttgtaaataccctgttcccaggcaactgagaagcatcaaggcctaagcacctaccaagtgccaggccttgtgctaagcactgagaaagatctcccagtttagtggagaagacagacacatcactactagtgagaattcagagtggggcatggaggaagaatgggaactatgcctcactggttgggaaggcttcacgggggtcaaaatccttgatgtgaaaaggcttgtgggtgcatgtgcccacgtgcatgctctactcctgacatacaaacatgtctgcaaatgagaaaactgttctcagtctatacagcttaggaaatatacgtcctttccctcctacctaggacatggagttgggtggagagcgggtgagacccagtcacaggtggaaacaagttgattaagcatcgcgctttgcactctattcttctagcatgcaaatagagcccttccaaaggggtaaacatttggctgggattctaaggatgagcaaacatctgagctgaaacctctgggtttcccagctgcgctgactgcttggggctttttgggccattgtgtgaaaatgaagacattgttgcagaaatagagaggccccatgttggagtttgaatccagatttgatgtgacagatgcacacacaaatacttcacttgactgaaccaagcaaaatcgtaccaatgacatcaataccacataggagcagaaagagcagggcagtggaaaaggcatggacttgggggtaagaaacacctggatcaaaagcccatttacctgctcaaaggtcttggctaaggttgcttaacacctcaggttccaggttcttcaactgtaatatgtaggcaataatatctctcttacaggtgacatttacccccgaagtgagtcataactgggaaagtatatgcaaagcacacagcatagtggctggcacacagtaggggtgcaacagaaggcattccctttgctcaactcatctaactcccggaaagcctcacgggttaaaaggtgtcagctctggggtctcagcaagggcacattctcaggactcctgaattggctgctcccttggactgggcaggtggcaagttgaactatttcaaatttcacagagttttgagtttcctgagccatactgctgcctcttagggagcaatcacagacagcagcttaataggtctgttaacccgagatactcttagaaacagagaacgaagaatgccctctggagaagggcctgggctcagttcaatttgattcatatcaccaaatgcttcttgagttccttatgtgccgggcatagagccagaagccaagaaaactacaggaaacaagacagacctatctctcacagagctcctagtctgtcagggagactgatgatgaaaatgcaagttctctacagtggagtaaagtctgaaatcatggaggtatagaatgcatgctatgggagcccaggggagaagagcccaacctagatgcagagctggggagagggggtcagggaaggctcattagaggaaggggattcagaaggatgaagggctggccaggcaagggcaacggcagagattcccattccccttgcttggggagacgaagtgttccagagagaagaacattgtacaaatgtgtaaagctctagaggagaagggaagcctggcaagttccagaaactgaaggaagttttgtgtagctagaacttagtttagagggctcagaatgaggctgagacaggtaaggactatgaggctgtgccagctattttattttattttatttcttattttttgagatgaagttttgctcttgttgcccaggctggagtgcaatggcacgatctcggctcaccgcaacctctgcctcctgggtttaagcaattctcctgcctcagcctcctgagtagctgggattacaggcatgtgccacccccgccaaataattttttttgtatttttagtagacacggggtttctccatgttggtcaggctggcctcgaactcccaacctcaggtgatctgcctgccttgacacccaaagtgctgggattacaggcatgagccaccgtgcctggcctagcgattttataatttggggatctatgctaagaattaggtgatgcctttaagtggttctaaggaagaagtgatctggtcattcatccatgatttcttgttgattctctgctgagcacctttcaaccgggctatgtcctgttcatctttgaagaccagctgaagtctcaactccaggacaccttcctaagccctgggctgggcttgggatgttttcacatctctgtctgctctatcacatattggtcatgctatatactgagatcttggtttaggctgtctactaccactaaagcataaacttcctgaaggcaggcactggcagagtggcttgttcagctgttttcctagcaatttgggtagtgcaagtatcaaataaacatttgtaaaatagttggtgagcttgattgacttccaggaaaaaacacacacatagaaactcacagaaaaacatacacctcctgtaatcacagatgcccagacacagagaaaaccacaatgacaggggttgtttctctagggatcgtgaggggctgcttttctttccaatggtctcctctgaccaggcttggtggaaacagctctgcaggatgaacaaggacactgttccagccctcccctccttaggaacaatgttgtgggaagcggacaatcctgggcctcaccctgaccacctggctagtcttgccttgatgcagtaagctccaggccaccctagccctgggtagggcaggcctagtaaaggccaagtgacacacttaagtacatgtggtgggactataaatgacttttctttcaaatcttctttgttatacaaatagtatattttagatgtaatgtgtttactgctcaaaattagaaaaaagccaaaagatgaaaataagagacaacatcttggggtatattttttccaggctgttttctatgcaaacaaggatgtcttttaaactaaatatattcttttggcaaacttattttttttacttaacaaagtattgcaaccacccctgtaggtctttaaatattctttcatgttattccttttaggagctgcctagtattttattctatggccataccctatgtttatttaacatttccttattgatggacattttaatagttcttaatttttcagtataatacataatatcttaggggaaatctttgaagctaaatcttgatgtagagttttacttattttcttcagataaattccagtaagtggaattgctagatgcaaaggcaggtacagttgtccctctgtatctgcaggggatttgttccaggaccacccttggataccaaaatctgcagattcctaagtcccttacaatatattttcgagacttttgattcacatcaccaagtcaccctctggaatgcctgaaccatttcgcacaatgtcagcagtcaatagcatgcaagtgtccacattatcccccagactgttacaattttctttgatgacttaaaaagggaaatggtatttctcttttaaaattacacttgtttcattattaatgaggtccatgattttccatttgtatttcctctgttacaaagtgttactttatagctttgctcattttgcgggctggtttggctaggcatatgtctcctaaaaattttaaagaactctttgtgtgtctggttgctaatccttagtcgatcacatgttgcgatttttttttttctatttagtatttgactttaaatttttatggaactttttttttttaacctaaatcctttcaaagttttttttaattgaatctagcagtctttgcctttatggattctacctttgttgttactctttaaagtacgtgcccacctgaggttagagattcatgttcctctagtgctggagtttatgtgattaaatgcttgagaatgcttgaggtatagacggtttttttttcttttgttccaatggttcaacccactgttttaacaccatttattacataatccatcctttcttcaatggatctgaaatgacactttacttatatactaaagtctgtctctttctcacacgtacacaggcatgtgtgtgcacacacggagggatctatttctggacaattattctccacgtcttatttgtatgtccactcttgtactcataccacattgttaacattaatttagcccataacaacattttaatatccggaaggattaatcttcctttaaaattagttttttggctcttctgcatgttaattcttctagatcagaggttcttaattaaaagcatgcatcaaaattactggcaaagtgttctgaaaacatagatgcctggtttccaccgccaacgtagaaaatcaaaacctctagccttgggcctaagcattagtgtatttgccaaactgcaagaaccatgactctggatgaacttggcaataagcttctgaggctagaagccaaatctgcctggttactgctgatgcccagccccagtgtcagccacatgggtggcaccgaatacatatttgttgagaaaagagtattaatatattaattaacatttatttataaccagcacttttactttgaacttggactcccaaaggtcactcacgttaggggagctgaggcagcagtgcaggctggtgacccatatgaaagatggcatcaggggaggagctgagttatgcaagaaggggatcgctgtgttcagtatctgaagggtgaatgtgaagaagagggagcaggtgtatctgatgctcctccaggatgcaatacaagaaaaacattttcagagacacctaatagactattagaagaaagcatctgtgcaaaaatgatagtaggtgcccatctgttgaacgggttggtggcctccccacatcaggcatgtttaggcagagggtgagctgagctggcgtgttgccatcttgcagggagtgatttagagaaggttcctgtactgagtgagattggacagctggtaacctctaagagctcttccagcagggagattttagaatctcaacaatacttattgaacaagttctaccattcaaagggatgagaagactctggaagttttcttgttggtgagaaaagttcagacgaagcccagaggtcactatctagggagatccccattgaggtcaacttgacctgaggaacttgggtccctgacctcgtcacatcccaatgcctgctatgggctgaaacactcacccttgccatgagatgtttcgataatccaggtgcagttcaagttgttggggtagaagtcagggaaccctggcgacaagatggtcccactggagccttgaatgaagccaccacagagagctacagaaggagtgaagagggcagtgaaagaccagagggcctcaggggagcacccccgtcatcctcctgggaccccatcccccatctctcgaaagcccaaccttcgctgatggggtgagggagtcagtggtcttttgagcacctgtgtttctgtggcaggagaggagtctgctactttagcgccccctcatggtgtccctcaccttcacaactgggcagggcccggctccactggaagttgggctcacactccagaggctccccgtcacttaatgtgtagcccgagtcacagctgaaggtcaccagcgcgcccacgtagaagtcattcccatgacgctgtccatttactgggattcctggatccagacagtggtctgactgcagtgttatagctgaaagagagaggccacagctgggacagacagcttactgtcactacagagggaccccagttgactccaaagagtaagaagagagccctggtttattaaaggcagaagttgccaattactgactcatgaaatgtggccgtcagaatttgctgagagtggcttaggtgctatgctaaggcttaggagtaagaaaatgaccttgtcctcatggtgctcgcagctccagctttctatgttggtctacagagaactgaagtgacaatgatcctttaaatcgaggggatgaatgtgggaggtgatgaggaaggacaagtgtgggtgtgagatgccatcttgggttaacttcatggtcagtcaaatgttctgatcccagagtgcccagcgtggcggcacccaatcacctgccaggaggtctgcacgcaagggcctagcgtgaaggttgtgaacaactctaagctcccatgacctgagggatgctgagagcaacagagtgccttccccagggccttctgaagggcacagcctagccaagaacaccatggggatggggccaagcaggggcctgtggtggagcacagtcctgaggcctttgacccacctgggctgaccttgtcatcccttttcctgagcccactgagactcactctcatagcggagctggaagccgatgtccgagtgactcttgtcggtagagaagaggaggtagaggtagttgctggtgctgatgaggaactggggaacctgggtcccgtggtaaaccccgatcaagggcgctgagtaagtccgcccatcgcgtacttccagggtgtcatagttgacctcggttttgaatctgccaaatgacagaaatgaagccttcttgagaaatccaagcttattaatttgcaaatgacataaagccctgcctgacccagggcttccgaataaccagattttggcaggctgggatcttttaatataatttgcacacattcactagcgatgcagaaggaccttctccactctatttaacatccctcctcctccttccatggttggaaactgctctcatcctctctgtggcctgatctgtgagccagcttaagacctagaggcacaatgactagcctcatggaggtcagaacattctaggctaggggtcagcacactaaagcctcagggccagatctggtctatagcctggagagctaaggatgctttttacatttgtaaagagatcttaaaaaaaaaaaaaggcaaagcagagcatgcatcagagatatgcaagtaggcaagtggcccacaaagcctaaaatatttaccatctggctcttcacacaaaagtttgcagactgctattccaggccaggaacactttgtccggaagaagtttgttttcacatttaggtggctacgttctccacccaaggggcatagccagggtgggagctagaagtggggcacatgagcaggatttggggcagaggtggggggctgccttcccacgttggacatttccaggagaatgctcgtcagataccagagtcatgctttaacatctgatggtgtctatctgcccactccccctccttgggggctggggaggggggagctctaacatcccaaatggtacccaagccttctcttcacccctcctgccatagtcccctaaacagcacaaaccaagcccaagggcagagccagtgaggtctgccccacccagggcaatttggtccagtgttctccaaccttgctgacatttcagcgttggtactggtcccctatccaccctgcattccctcccacgtggctctgtaaaaatctcccccttgccctctcccccaaggctgtggtcacaagcacctgtcgaaggtgattttgatggggtagcctggctgggcctcaatcacccaggcacagctcaaggcatccttgtagaagccaggccagcccggagagaggatggtgccgctgggcgaagtcaggtgaccaccacagggagctggggggacagaaggaagagaggcagctttcttcagggacaaatgagtaaacaaacagaaaatctctctataaaatgtgtcaggcaataagtatagtttttgtttttatggaaaattacataaactataaactgtgagttttgtctactgggacctttatgggtaggtccagttatatcatgtggagtgttattaaaggccagatgggagaaatgaaaagaatcctttaagcaaagtccctttgtcattctagaagggctgaagtacaactaatatttgggccacatggtgtttttccttcgttcctcactcaattgtcaggcctgaggcaggggcatagacccagccaacctcctcacatctggccctggagaaggtcagaaccccaggaccctacaactcagacgttcagctcagggtgccggtactccctgcttcactgtaaactccaggagggcatgggatgtgttaattgtgttacacaactgggtatccccagtattgagcatggtgcttggcacacagttgtttctcaatgattgctggttggatgaatcaatgagttaatgacaggatgaatgaatacagtccaaggcagggaactccacaggacactgggaggcctaggcacagctgctggctgtctctggtcttgcaaagtctgttatttatgcctctgtccacatgtcccatcctgggcttccccattctcagctgcctctttcccaccaccactgtctcttcctgcaaccagaccctcagcccctaaggtagtcattagagctattcctctttcaagggcacatgattggatttcactgcccaccccttttgaagttatgcaaggtcacgtgactgctgtgaccaataaaatgagagcagaagtgctgtacatcatgtctctgtggaaactttataagcctgtgtgtgatctgcacacagtttccttttccggcctcggtaattgtggaagcaagtgtcaagagggaagtctcatcaatctgggcccctaagtgactctaaggagcagacatccctgatgacccatgttaaatatgtagcttcagtggtctgtgtgagatataagctcctgatttttaagccgctgggatttggaggttgtaagttaacaccgtgtagcctagcccacccagactagcacacctccccaaggctgatgatgaggatgatgatgacatccactattactgcttctgtcactgccatcaccactgccattgactgggggttgactccacctcagtcaggcactgagcttacatacgtaatcatgttcactctttgcaaaacaaaatcccctgtgaggttggtgctattattacctcctaggaaagctgaggcttacggaggttgagtaactagccttgggttagcaagttgcagagcttggattcagacctaggcaagacagcgtaaatccagagattttaagctaagccgcctcccatgtcaaaggaacctctgctcctttgtactcccttactatggagctatcagatgccaaaaattccctgaacaagactggggaggaataaagagctacatagcacttctctctctgcaaagttttgtagatttctcgaggtaatcagtttcataaaagatagtctaatatacccaatcctcttttttttttaatgctataaccttcaagaattatctaaaatagttgtcaagtattcttaatagaaacttatattaggaagtttaattaacaaagaagattataataagggtagtagtcgtcaactcttactgatgacttactatgctaattgctacacatgtgttatctcatttaaatgcatgcatttatgaagttattatccctattttatagagaagaaaactaaggccaagtaggttaagagactagatcaaggatacagagctaatgaaattagagctgagattgaatctcaagacttctgtctctaaatcccccgtgacacataatagtgctacaaccacagccaacagtaataagctcatgtgtatcgataacttactatgtgtcagggcttaatgtggattatccttgtgacaatggcaacactaaatggcacgtactattatcatcctcgttttataggcggggattattaccccattttcagtaaattgaggcttagagaaactaaataattacatagagctatatcaaacattgggagagtaaattgtgtatgtgtattgtcacttcctgggtaaccccagttttcaaaacccatccatccatctcactgcaactactaatgctttcctccatttctcaggtggacacatgagaccttagaggtggggaggggcgtgcctattgctacatcccattgttacaatacaggtttgcatctcagcagtgaggagggactctttcttggctccatctcagcacaggcccagcatctctggttgttggactgtgatttccccatttactgcccggggagctacagatcatgcagtctccattgcctgtctaggccactctccactcagtgcatacatatcaacgaaaccccatctacaatctccagagagggaaattcaatcccttcctttggcggtcaccactttgctttctttctctgctgtgttgcttcattagtttggctagttaatctcttcctgtgcacctgtgattgtccagtgacctatttaatcattctgtccttcactttctctgttgttcatcttcatattgcagagtggtagttgcccggcagggatttggaggggaggattctttttttttttttttttaattttttaaaattttattattattatactttaagttttagagtacatgtgcacaatgtgcaggttagttacatatgtatacatgtgccatgctggtgtgctgcacccattaactcgtcatttagcattaggtatatctcctaaagctatccctcccccctccccccaccccacaacagtccccagagtgtgatgttggaggggaggattcttaaatgcaatgtctctttcacatttgaaaagatgattgacctcactcttaaacataaaaatacatattaaaagcacagtgaaatattgtttctcatccatcagataggcaaaatccaaagtttaatgacacatgaggccgtgagaaaccaaggattctaggaccttgctggtgaacgtgcaatatggtacaactgctgtgcagaggaatttggtaatatccaacaaaatgcatatgcatttactctctgacccagcaattctatttctagaactctcccaaagatacactggcaaaaatatgaaatgacatatatgtacaaggttatgcaaggtagcactatttgtgatagcaaatgtatggaaacagcccaaatgttcagtggtagagatctaactgaataaactagggtaatcaacaaaatggactatttatgcagctataaaacaagaatgagggatattctatataatatcatggagtggttcccagactatgttgttaagtgaataaaagcatggtagagattagtaggtatggtatgattctctttatctaagaaaggggcagaggcatacacacatattcactcatattaacaatcactgaaaggataaaccaaaaactaaaagattattcacagaaggacggagggaacagggtagagaagatagggatagaagctaggctttctcagaatataccttttttatatatttagctttggaactatgtaaatattttaaataattaaaatgaaagattaagcaaatcaataaactgataagcaatttctagaaactcagaagcagagtgaaataaatgaatgcaatgctagattagttggtagcataatcccacatgaagaaactagtaaaagagattttaaaacacaataatttgatagcctaccttaataggatacaaaaagaaatgaaaaaaaaaaaaacccttaaactattctctgtaattatattattgttggtagccattggtattactactttgggactcttaggcatgtcctatgaattgggaaattatattaatggtgttgggaactgggattttcagcaagagtgaaaggagatatggatatgatattaaagaagttaagtaaaaaagaaaaagtgtttttacattggaaatgaaataaacccatgacgaattttcttttaaaaactgtttcctagctgtgttcattgaaaaggcttagaaacaggaacgaagtcaataataaaaagtacccctagtgcccaaattttaaatatcagtttccactaaaaggaaccagggtttctaggagaaataactgattctgggtcagagacagaaaatgtacaagatgatgttaggccaacttcaaaaggctcccactagccaatgacacaatttgagcattaattagaacaaactgcagtagatttaaatacataaagtatgtttggattgtaatgatatttaaaaatgtgcaactttggaaggtgttagggaatcaactcattaatacaaaaaccggcaaatacaaataattatttccttgcttttcctttacaaactgtatctcggagtaaccaaatagttgatgaggacaagttttctttaagtgtagcatttcagcttatgaaaaaataaattatagcatgttaccattttgtaattcctagggtatgatcattaatggttcctaatgaccccaaaagagagatacccaaatatcatatgattctgttgaagacattgcctacaagatattctcgctaaaaaaatggaagttcaatctgattaagtttctagatcttactgccaattaaagggaacataaaagagagacaattgtgttaaacaacctcccagggaagcaactggcaaaattccgaatgcaggagactcctcattctgaataattctcatttatctccagataaatgacccgacttctgcaacaacaaaaaaatctcaagggggtggggagtagacacctatagattagaaaagacttgagacatatcagccaattataatgtatgaagctaacaaggatactgacttaaaaatactatcaaagaacgtattagccaatcatggaaatttgattatattaattgtttttaattttttaaaatgatagcaatgtggttatgttttaaagagctagttttatctgttggagacacattactaaaatgtcatagatgaagtgtgatgactgaaatttgctgcgaaataatcccagaaccagcagggtggttgtgggggaatgggtggggatataaatgaaaacaaaataggccatgagtttataattgttgaggttgactgataggtacatgtgggttcattatactattctctctgttttggtatatgtttgaaatttttcatttaaacaaggtgaaggcaaaaacagggaagcacacacatgtctgtgtgcgtgcacatgcacacacacacacacacaaagaaaagaaggaaaaagaaggaaggatcctctcttgaacagggagaagagctcagcaataagacaaaagagggaccctgtgactgtcccagcacctggtactcactagatgttcaatatttgttgaaggaatgaaatactggttgataggcagggatactgggtgttatggatggaattgtgtcctcccaaaatgtagaggttgaaaccctagccaccaatgtgactgcatttggagagagagcctttcaggaggtaaataaggttaaatgaggtcatgaggatagagccctagtccagtaggactggtgtcctcattataagaggaagacaccaggggtgcatgtgcacaggaaaacaggccacgtgagaacacagagaggaagtgggcatctgcaagccaaggagagatgcttcaggagaaaccagccctgccagtaccttgatcttgaacttccagctttcagacctgtgagaaaataaatttatgttgtttaaggcaccaagtctgtggcactgtgttacggcagcccaggctgactgatacactgagcttctgatgaggggttgctgtcccctgtgagggatgagccacttctcctgaccctgatgctaaagttgtgcaaggcaaagaggaatagggaatggtgacagaatagaatacagagaacaaatactcattgagcactgagctctacaacatgccaggctctgaccttcatgtatgcttttgcttcccctgtgtgttagtcttcacagccacctataaggcgggcacagacattaacctcatttcatagctgagggaacatacttgaggtacaaagagcttaggcgactggccaggaacacacactaggaagtcgcagggtcaggatttaaacctgggcagtccagctccagagcctgcatttttaaccactctgggtggacgtgggaatgcccacctcaaccactgcttctgtaacgggatgtaggctgctgctaaggggttttgttgactagctgtccagtgtgagtgaccagaagtagtggaagtcctttcctctgaccagagtgcctctggagttactcagccctgcggctggaagtgttgcctcctactctctagctctgcctccccactacccacctgtgccccttaccacctgtcttccactgttttgtggtagaatataagcagaatgaacttgggactcagacctcacttggaggttaaaagtgatgattctggaatcagaatatctggatttgaaccttgactctctcattcacttagctatggtcttaagcaagttacataaccattttgagcttcagtttcttcatctgtgaagtgaggataacaatacctcctcatgaagagtcaatggggcagtggatgttgatatggttgggctctgtgtccccacccaaatctcacctcgagttataatccccataatccctgcgtgtcaagggcaggaccaggtggaggtaatcggatcatgggggcagtttcccccatgctgctgtcatgatagtgagtcgcaggagatttgatggtttgcatctggcatttcccttgcttgcactcactctgtcctgacgccctgtgaagaaggtgcctgcttctcttttgcctttcaccatgagtgtaagtttcctgaggcctccccagcaatgtgaaactgtgagtcaattaaacctttcctttataaattacccagtcttgggcatttcttcatagcaatgtgagaatggactaatacagatgtaaagcaattggcctggtatttagcacatagtatgtgctcaatgattaccagctgggtgattttgggaacgtcaactcacctcactgtttttgcggattctcatggataaagcacaattacatctttcttgcaagagtggcaagaagattaaatgagagattgctagaaatgcagtaactacccttatagttcttccttaatgccaaaatgagctaccaccaccacttagatttctttgtggtcatgaggagaactgaccttctttctttattacagtacttgcttttttcctgattttaaaagtaacacatttggtgtagatagagaataaatgtggatgtgtttataccaaactgttaaaccattttcctctggggagtgggactgggaaatgagcatttccactttgagctgtattgcacttgtgcatcatttgaaatttttacaaccaccaagtattcctttatttgtttatttgacagagtctagctctgtcgcccaggctggagagcagtagtacaatcatagctcactgcagcctctaattcccaggctcaagcaaccctccgagtatttctttaaaatttaaaaaatgaaaatacaggggccaggtgtggtggctcaagcctgtaatccccgcattttgggaggccgaggctggaagatcatgaggtcaggagtttgagaccagtctggccaacatagtgaaaccccgtctctactaagaatacaaaaattagccaggcatggttgcatacacctgtagtcccagctactcgggaggctgaggcaggagaatcgcttgaacttgggaggcagaggctgcagtgagctgagatcacaccactgcactccagcctggatgacagagcaagattccatctcaaaaaaaaaaaagaaaaaagaaaaagaaaaaagaaaatacacactcactgtagataatttatctttttttgtgtgtatttcttgtaagcagaatattcttaaagctcagctctttgtcttttaatagggagtttaattacttttattatcataactgatatgtttgtcttctgctgtcattttgtttcatgctgtcaatttccgatgtctccatgtgatgtcctgtcttctttgtcttatgcattaggcaatgtatttccttttaattttctacggggatgtcgaaagtagaaatcctgcttttcgttctatttggagatgcttttaagtctttcatagaggtgttggaaactatattctcttcagtgatataattcaagaaaaatacagtaacagggtagccaagagtctggatttgaattctggctccatcatttacaagctgggaagatcctacgcaggtgacttaacctgtctgtgtcctagcagggacaataacgacatctatttcctaggactggtgcaaggttgaaatgaggtgacactgtaagacacttatcctagtggggtatgattatttttcctttaaagagacaaggaagaggtaagtgtaggggagagaaagtcaggcaggtacgccggtgtagctgccttcactacccggaagtctttcttgggaaatttctgattttacacctaagggactcctgtgtcctgtgaactcaagatcacagacttggtcaatctagcccattcacttccgtattgtctaaggctgctgttgcattaggacagcagagttatagcccacacagtcgaaaatacttcctctctggccctttaagaaaaagtttgccgacccctgctttagatcctccagataatcatccttctttctaaatttaggagaagccatcgtctctcttgtcctattatagcctctcaaaagctaagtggctcttagcatatattaaaagattttctaaaagaccattagcttctgcatttaattgtccacaaggtggggacacttaatcaaaaacaaaactagaaaaaaaacggaaaagacaaagatgctgattgcaaagcagagctctaccaaggctcagacaaaaggagggagaggagccaagaagggacaggttcccaggggcttctttagccagctctgtctaaggttttaaggctgggattcagccaccctaagtggcatcaggctctcacactctgcctggcatgcaacttcccagatccctgaaaaccaggctggcatcaaatgcccatcgctctgagaaaaccgagcgggctctccctggggtcagggtctccaatagactgtcccttacttctagtgcctactgccccaaccctacagcatttccccctccagggacagaatgaaaaagacctttttaactttaaaatgaagaccttgcttatgaaatagtgagccgcgggaggctgaggtgggtggatcacgaggtcaggagatcaagaccatcctggctaacacggtgaaaccctgtctctactgaaaatacaaaaaattagctgggtgtggtggtgggcgcctgtagtcccagctacttgggaggctgaggcaggagaatggcgtgaacctgggaggtggagcttgcagtgagccaagatcacgccactgcactccagcctgggcgacagcaagactccgtctcaaagaaaaaaaaaaaatagtgagccacttgaagatccattaacaaaggtcaaattatctcatgtgttcatacatggccttgaaggtttcaatgcatcgcagagctaaagtctaagagcacttgattcaggagggtggcaggtggagaggaggattgtgcagttactaattcctgagggttcctcagagcagtcaactaatttgggactaagcccctgcaggctcaggggcaatgggaatctggccttctgccctgagaccactcacagtcttgttgggcagacaggaccaaggcctgtggaactggtaaatgtaataatggtaagaaccagtatccaagaaagtggtccagtggtggtggcccatgaaaaataatagaaattaggagaaggaagagatcaggtgagctagagacagcagggaagatctcagagatatgaaccaacacaacgaaaactaaagaaattagaagtggtcaatgagtgcaagggaaaatgagggggctggtctgtaggaaggtgaaagaccaccgattcacaaccctccagactgggttctgcatggatgctttgtacggtgacctgtttcaccagcaaataactccatcagatatgcatacttattcccctgttgccagtgagggacctgaggtctaggtctagttacttaacctaagcccattaattctacagctgggaagcatggagactgagtttcgtgttgtttctctaactccaaagcttctgttctttccaaaagtgctgattgcactgaggaagaatggcagatgaggttgtacagaccacactgcgggaagtttggaagtcagaaaaaaatgtctattcatgtcacggttggggcaagttcctggaaggatggaaacgcaccacttgatcccccaaagtggagcaaatattgatctggttggtccaatgaagaaatagttaaaatcaagttaacgctaatggccaacacttattgagtgttacctctcaccaggcactgctccaagaactgtgcatgctcaagacaactcttcaagcgggttcccattatcaacctgcattttacagtggggcaactgaggcacagagaggtcaagttacttccccagggtggcttggatgataagttgcagggtggagacagcaggcagtctggtgagagtcggggctctggaggcctttcattgatatgcgtctcattagggaggctctagcctagttaaaaggccattcattcattcatttattcggtgactcatcaaccagtattgattgagcatctaccaagtatcaaacaacacaccagctgtgggaatatgaggccaaggaagattccctaacctcatggagtttacgtgacagtgaaggcgcagcttatgaggacttactttataccaggactgcctactccatacacatctgataattatcattatccctccttttttttccagctggaaaatacaaaggctcaaggggaaaagtgaattgccaggatcccagcttgggcccctctcactcaaatgcccacctggactgcttgccacctccagtgttctcagtggtcccttgtctcccatcgagccatttgtaagctctgggtaatactctctctcaggcatgctcccttcttcattctcctgtccttcctgttcatggccactatgcccagatttgagtttaggaattgggttaagtcaagaggtctcttaagtctctatcctctttctatcacatgaaatgtgagaagaaggtttctgcctcctaaaaggagagaatcacagccttcgtctccttggatactgtcagtttccccaaggggcccttgggatactcactattcatccattattcacaaatatttattaagcacctattccgtgccaggtaccacggttggtacacaatgcttggtacacaaatttgcctggtgcacaaatgcttggtacaccatgcttggtacacaaatttaacctgactcctgcctcaagaagctttatctgtattttaaatgtctgtagtttggtggaacagatggctggtcttgaaaattgagtcaaaaactgtcttgtgtggcgaggcaggactgaagaactgccatcatcagccgtgtgcctgctgcaagctgtgtttcttctggctggttggccctgagtctcctggagactgaccacaaggatataaagtcagcatttaacagggcacaaaggccgagactgggagacatcccagggaattggggaaaataaacatgtggagaaggaaagagtgacaggcagcttgaaagacccgaaaactcgcagcgctgccaatgctactttgggctgccggagctcccctgggcaggagctggaaacagggatcttaatggctgtgataccgaagagagttctcatttgaaagaagaggtgcttttgatacctgacaatccagagccgtttctctactttaatctctggttataatttaaattcctacgcacagtggccttatgaagcccctgctattccagcatgagggtgagagagtggcccttcgttctgggagaagaggaaggaccaacgcagaaaggaaccaccatggcctgggctgcttgctccccctccccagcctctctggctgacaatggccactgctcccagcctgcaggctcgtaccttcacaccgcagcacagcgctgttccagaccacgctgccctccttcaggacgcaggtgatggtctctgagccctgagtcccaaggaagccttcatcacagaggaaggagatggagctgcccagctggaggctgtccccaaaccgtttgccatttactggaacgccaggatccgggcactcgttgtgtcggaaggctgtgtagatggagttcaaggacatgatcagacattgctggagtagagaagaatccctaaagaaaattagcttccttgggatgggaaaccctagaactccaccacctccccaagaacttgccatgttggcgggagagctaggcattctaggacctcggcattaagcaggtgctcattaaacttgatttcctgccttcccgagcacctaatcccactgcattctaatggacatttatagatcaggcaataagctaagtgtttctgctgttagctcatttacaccacataatgattctatgaagtagctcttgttaccctactttacaaatgaggaaactgaggctcagtgtggttaatgagctgatctgtctcctcaatgtcaaatccattccaagattccctaacttcagacagttatgggatcatttctgcttgaggtgagctggactctaaattctgtgacgctaatagactctaagcatcataaaggaggtgccctagaattaaccctgtctgaagctatttcctttatttccttgcctattgtcagggctgcctctcactctacccaggcaattgataatgcagagtggggagaggacagagtcagaacgctgtagatttaatcatgctttgccttttattcgttacatggtcctggacaacttatgcaattctgatgagccttagtttcctgactgataatatggagatcatccttcacttgcagggtcattctgagatagaaataaaatgaaagttgatgtgaatatgagagtggcaattgttcggtgcggcacgtgacagatggtaagtgctcactgaagatgagttcccttccttcttccctcctctgcatgggaagatactctttcctgctcagtctctaccaagcatgttccctgccttcctccagcaggggcatcacagttctcttactaaatgtctccgaagccaggctctattttcaccccgaagccaggctctattttcacccctgttgttctgaggatggcagctttccagtggagaccaggatccatggctgcatgggtatgggccacttgaaaaaaaaatttcttggcctctgaaattccctagtgatagaaacatttgcacattcagaaacagcagtggccctaggggctgctggatcttgctagaggcaagaggcctgcaaacctgacccttcccattgcagatgaggtaagggagcctctgatgtggagatgactgtgatgatcccatgcagggcttcagttgagtgcccaacacccttccatttgaacgcttaggtcagcccagacttgagtctcccaacctttcttcgttggaaactatgaccacgaagtcaccctgacatttagaaatatggtgtgggaaaaaaaatgatgcttggggcccagaagtccaggcatttttctttcaaatgcatcagtcatacacatgtaggcacagatacatacacccacatatgaacacacacatacacgcgcgcgcgtgcatgcgcacacacacaagcgcaaatgcacatagcaggaatatggagttatttccaacatctgggagcaaaagctctgagtcaaggacccacttctccctgtgtacctttccaaacctcagttttctggcatgtgaaaggggtagatcttgctttatggagtttttgttgtgaggcttccagtgatgactgttgagtgctcagcaccaggttcagcccacaggaggtgcttaatggatggcagctactgtcattgttgttcattatgttccatgtggaagaggaattagccttgttaccgggagttctaggggtggaagtgggaccactgatccttgttacagggacacagatttcaagtcaacataagttgacttgaaatctagagtgcctgctagctatggagagagctgtctggggaggcaagctccctgacactgggcaaattcaagctcagcctcagtgatcatcagttgggatgtaggaggagattaaaatcctatgggagagactacactaattccctgacacttggccatggaggattgtttcactgactgcatccgatcgcctcagaagcctaccaaaaatgtagattctggggccccatccctttagtgattctaattcagcaggtctaggatgcggcccagatttttaaaaattatttctatcaatccatccaactgtctatttgtataaatgcatagaaaactatgtgatatctgtaatagtgtccaccaattgttggcaagaatcatttctggctgggggattttgggtagtggttaacatctctcctttgacctctcccattttttgagtatttacagattggatgtgtatcatttttacaatggtagagaaaccttggaaagaaatacaagtaagagctatcctcaggttagtctgctgccgtcatgatgaagctcagcccctgggccatcagctgcctcctcctcccaagttcccactcagtgtccacacatgctgcaaacccacatgacttcttggccctcaccatcctggataagtgtgctccccaggataccttttatccttgttcttcctactccgccagggcaagagaaagcatttactcattcatggatccttccattccgtaaacatttgctgatccttagcacacaccaggccctgtgcggggccaagggatataaagataaggaaagcatactcgctcctttctagtgtgaagcagcatggtcagtgctagactagggttaggaaagacagaactaggatctccccctgcttcttcctgcccacagcagatgaaacaggaatcccctggaggagacatgccctgagaaggttgattgtgtcctaaacaagagtggtgaggggaatggaatgggctttacctggctggtctcttggaatcgggggacccaaatggcccaccaggtagcatctaatgtcttcagtccaactggactccagagataggtggaaaacggaggcaaggcctttatgccaacggtgggaatgggggttgggagatcagtgtttgtgggcatggagcagagcttgcactggggactcgcccttcacaagcagcctctgggaaaggatctagttaattgctcagatggacccacctccagcctcacttgactgtttgtcatcagccaagtccactggatttatagcttcttacgacctgataaccacttcttgctatctttggtggcttgctatttctagtcaccaagcttctgcccccccccccccaaccccctctgtaaccacgagatacagaaataaaaataatcactgctgagtttaggctgcttctagagaaggggcccaggattgaaactggaggtggcaactttcagatggtggccctcagaggggctatgaggaaattccctaagagttgtccccagtaagtctgggagcccaacagaagtgttgctccaaagctttgattctgatgtgactatgggaatgggaactgggcaaagcaaagtgagcagccccggcacgaactcagaggtcagcagcaggcaggcattcagggatttcggagagcacctcagagagggcatcagaaaccaatgagaatgatagaggctttctttctcttgggccctccctagttctggttgggtcttgtaggatggggaaggttggggcaaaaatgaggttccaggttccttttacattatatatcacaactatgggagataaatgcccttcagagagggacttccagaaaagagcaccctgcctggcagccagtgctttatgccctttcttggtcatgctgggagctccatgactgggcactgcagccctgcaatgccctgggaactgccccatccacacctcctcctccctccatgggagcaccttcgatcatcctcagaggcagacactcagatggagggccagctggtgacagagggaggactcactggtaaaagtgatgttgaagcccctcttccctgtggagtggtcagtctggaactcgagacgggccacgtggccactgcttgtgatggaggagggaagctggtttcctgagaaggtgcccaggacgggcgcctcggcggtggccccatccttgatgaccaggaaatcaaactgaggctccacgtcaatgtcgttgaaggccaggtggatgcggctctcaggcctggccaggatgagccagacacagtggaggtggttgccatagtcctctgggtagttgggagacaggacaaccccagacgggctggtgaagttgaagaagcaggagactgcaagagaagagcagtggaggtcagtaagcatccccaacattctgcctgcaccactgagggctggcagggggaacatcttcttagtctaaaaagcaacagaaagaaagagtggcacaagggttgggctggactggctgggctctgagctccaggtggggagacatgctgggctccatgctggacttagcaatgggtagggcccctttggcaaaaggcagacatggcagaactggtcttctcttggcccctctcccctggtcagcacgcccacctaggatgcggcccagatttttaaaaattatttctatcaatccatccaactgtctatttgtataaatgcatagaaaactatgtgatatctgtaatagtgtccaccaattgttggcaaggatcatttctggctgggggattttgggtagtggttaacatctctcctttgacctctcccattttttgagtatttacagattggatgtgtctggatgtgaaacactgcgtcttcgtgctttgggtcccttgggtggggcaaagccacaactcaagcctaagtgtagagtcacagtccctgacccctctcagctgggtttacagcagtaggaaaggacattgcttaatgacacagcagtgctaattccccaggcggtaaccgggtggagacagcccaggaccatttgtctccttcaaacatttttgatggaaaaatgataggtgtgccatgggattctgacaaccccaagatgccacactatgctaaagaggtgccaggagcaccatctttcagagaccaaagcttctgaagaaactgggggagggaggtgacagcatccattgtgatccctgtccacgtcctgttctctctcccctatttcaccctaaggatccacccttccaaaaacccttattttaagctattttcatgccaactagtagcagaccctggaataagaataggcaaagaaagtgctgtaaatgagaaaacaaataaatactaaaacaaaattataaaagaaaataataaaatgaaaaaaataatcacaacgcttatgacacaggaaaaatatcaatattgaattagaacctttataattatctaagaacatcactaagatgagtaaagagagtgcttagaggattcatatgaaagaaaatagaattaatatgacaacacagtccatttcaatagaaaaaataaagaaaaaatatagaatccaatattgttgaggcttcatggaatctcatacatgcatttattgccaattgcagagcaaaactgatatgatcctttttgaagggagtatgtaagttcgcatccagagccacagaactactcaaagactgactcagtaatctctaggaattaattcaaaagaaaaagagccacctagccaaagatgtttacaatgacataattttattatagaggaaaaatgtgaacaaactatatgtcagcccaataatgtgaggtaaattatagcctttaatgtgatacagtttgactgcaatcattaaagtgataaatatgaccctgtagaaagaatgttaaacataattttaaataaagcagtagatcataaaattatatgcatgcttttgattatagctattaaatatttgtttataaatggataaagactggacataagcccccaaataaaaactatatcagggtcgtaggcgttcaaaatgaaacaacatttaatttttctgattgcaaaaatgctgtaggttcattctaaacatcttttaatatatacaagcataaaaaaggtagttccaaatatggataaacatttaagtccatttataacatttatatagatgtttggtgttaattaaattgatatttaagtgagtaaaatatttgacttactaaaggtaatgatgctaagatgaaaaataataaaatcatgtttgccaaaggggggaaaacattaaaacaaaaaaattggtgactccttgtgatgagtttagtcttgattctccctgactctgcccagctccccattttctgcattaagtatttcttttccagtctgcagctgtaaaagccctcccatgcaattcagcaaagtaagcctggttcttaagacacattcagtctcatccctgtaatccatgtatattttaagtatagaaagaattcgagccaaggggagagaaggacatgaaaaggcttttaggtaatgtaatatatagttaatggcaattattattatatattattgagggtttaactaagagtagacaccattctaagcacttccatcacttgctcaatttaactgtcactataatgctacgaggtaggtattgttattaaccccatttaaagatgaagacactgaggcacacagaggttaagtaatgcagggccagtaaatggtagcgccaaagccaaatcaatgcagcctgattctagagaccaagctcttactaaccccccaccatgtctctcagtatgagaataacacttccccctgggcctatgtgaccgtggagtcttagaaggcgttcctcaaatctgctgaagattcatctgtcgacttgaaatattacattagcactgaattgggagtctctaggctggacatggatgcccccacacagccatcttgtctccagctttgtgggagttcagttgggaacataatgcaaataatgaggaatcaaaacccaaaggcaaagaccttgaaggcagagggggcaagtcacagggcctgctgagcaagtccaaggcagatgaagacaaagaaaggtgctaaagtttcagagggaagatggtcaggggcactgtgagtatgtgagcaaataaatttgctgcagaggactatttaattaataaggcctgagaccctctccccacctccatcactctatcagtgtattattttttctctagaacctttaaccaggattgtcatgttgcaaagctccaggggcaccattttggaatttgagcagctatatatgatagctctgcttatcattctctaaaattatcttgtttacatgtttagctgttgatggtcagtccttccctctccccaacacatacacagatcttccatgacagcagaaatctcatctgattctgctgaatccctagtggctcccacaatgcctgacacattgtaggtgctcaaccaatatttgctgaatgaatcaatgagtacctaatggttgaaaccattctgaaagaaggtgacatgaacatgtgggtctcataaccccatcccactccaaacctcgaccaacagattgaccaaagtctgtacaaatattaatagatggatacctgtgtcaactctggaaaacagagaaacatactgtgctgtaaccctgcatgtatttatcttagacatagtacagatgtgtccctagataatttacagtggaaaagggtatgaatgagccaagttgttaaacagcaaaggcaacagaaagctgctcttaaatatcaaaggcctcaaaacatgtcctactcacatccactcaaagatgtctcctatccaaccaagagatgaatttaaacaacaaactcaagtaggataaagttgaggttaacaaaaagcataaaaaaagattgacaatgagcaaataaaccaatatggtaatgaatttaaataatttatgtaaacatagttataaaatgaaatgcaagcgtaacaaatattccttggaacagaaaatataagacgttattcctgcccaaactctagggtagaatattccagattctactgacacaaagagtaaagttggagcaaggagatatgctaatttgctcatcttgcaagaaatcctgttttgtagtttctgtggttaattagagaaatataggttggagcatgcttttaaagatgttaagtgtaattagtaatagaatatgaaatagcttgtcttcaaaattaccaaaggggaaaaagcaaagtagttcagggaggaaaaaagaaattcaaaggaaacaacaaggaagcatggggtaggggggttgtaacgtaagatgctttaaaaaagataaaacatcagttatgacaataaatgtatacaggttaatctcccagtaatatacaaccctctctttgggacaaaacacacagctaagacaaagtgactctgaatactcaaaagtaaaggaatgggccaagatagctcaggctttacattagaagagtgctgtaatttatcaatataagtctcaaatattcctatttaattggtggactgggctcagggcatcaccgattttaaaaagttccccaggtgatcccaaattgcagccagggtttgagaactactggtggaggcaaatgtgaacaacaaaaaaggaattttaatattaatatctgatccttggatattatattacacctgactcttggatgatccttttcttatgccaagagttttctggacagctaccaagaggcatttcttattatacctggaaggagacagggctgataaactgacactcttagaacaagaatgtggccttataaagctctgtcttccatctcaaaagagtactcagacttgttgcaacaagggcaggaagaggaagtgtgcgttgtcttacaaagatctaatctttcttgctctggaaaattatgtatgcatgttgtattgtaatatttctgtaagagaataggaagagcctacttctcagtgtcgcaaatgagggatttttaaaaagttgtaattggatctcatcaccctcaatcacccaggttaaaagaaggagatcaggcaccttcctccttcagagtagtgaccagactgtgctcatggatcttgatgtcgactaaacttttaagtcagaagcgtcagactgttgacaaataataaaggtgggaaacttattaacaggtagatgtgtaattactgtgcattatattaggttattatttaacatgagcttgagtagaaaataaaaggggcttgttgaagacccctcttttattatgtttttcttttggtgttgtcaccaaacaaagagagttttcagtagtcctttatagagacctaatacaaaatccaaatatcatatttaaaacatggataatgagcccattacaaaataaagatatgacagttataatactttatgtccaaaagcatgaaagagacaaaataaaatatactaccctgaaatcaagatcaagataaaaaggatctgaaaatattatgagtgtgtatattatatgaaactctgtagtcttcaaacaaggaatgcaaacttctttacaggtgcccatggactattacaaaattgaccttacattaggctataagaaaatccccataaattctatcacaatgcaaaaactgttgggccacattttctgttcacagtacaaataaactagacatcaataagaaaagaacaaagaaaaatccataatcacttaaaaattcataaaactctttccaaataagttcctgagctcaatgaggaaaacaaagctatcaatacagacttctttttttttttttttttttttttttgagacggagtctcgctgtcacccaggctggagtgcagtggcctgatctcggctcactgcaggctccacccccccaggttcacgccattctcttgcctcagcatcccgagtagctgggactacaggcacctgccacctcgcccggctaatttttttgtatttttagtagagacagggtttcgccgtgttagccaggatggtctcgatctcctgacctcatgatccacccgcctcggcctcccaaagtgctgggattacaggcgtgagccactgcgcccagccaatacagacttcttataatgatgatgatactagaccaaagctgtagtaaggagaaaattcatagctttattcatgattaaacaataaagaaataaaataagtgcaattagtgtttatacttaaaaagttaccaaaagaataactgaacatgattaaggagagaagagagaataaacttagaaaagacaaaaacagaaaaaaaaattggcttctgaagagatcaataaaaatttctgattggtttgctcaataagtagaaatagaaaagataaatatacatagggataggaggctataataacactaaggtgataatccaactataaaagaatagtatacataacatatgaaatatggataagatggagcatttcctagagaaatttgaattaccaaaattagcatgaagggaaaaacctgaggaaactggaaaatacttagtgggtaggtggtttcatggccagtgcttcaaaactataaacaaacttgtaatagccatgctatttaaattgattttgatacaatactcccataacaatgatatgtatgatacacacacaatcatatccaccaacacaatgacacacctacagtatagaaaatccttcatgcaaagtgctagaaaatcaaattcagccctacaacaataagccaacatgacctacacaacaaaaacaacaaaactgtactgataggaagaaaaaaaatttttaatggagaggcaaactatgttcctggttgaaaataattcatattactaagatgaaaagtgtcctaaatcatggtacaaatttaacacaattccaggccagatcttttttttttctggaacttaaaaccattgcaagatccatctgttggtaaacaggtgaaaacagccgagctctccttgagacagataaggaataatagcatataaggtgctagttggcattctgagagcttcctgtatctcaactcattaactctcacagcaaccctctgagataggtactattattaacctactttacagagacagacgctgagtccaaatgttaaattaatctgcccatggtcatacagtcactgtagatgatagagctgggaagatgaaccagtcaggccagtaccagagctcaagctcttgaccacgacacctacttcctcccagaggaggaagggcttgacaacccagatattaaatactaaaacatattataaagctgtaataatataatttatactatattgacttcaaaagagagatcaacagagctggaaaagaaagtccagaaaaggaaccaaaaatatatgataaagggggcttttgaaattagcagagagagggttgattgatcaatacctgatgctagaacaaatggctagccagttaatgacaaaattaggtccacacttcattccatgtaccagagaagtcctagaagaaaatataaggaatatttgtataatgttggaggcaaggaaggactttattagtattacaccaaaattagaaatcataagggaaattttaaactacagaaatggaagattttagatttcaaaaatcaccataaacaaaagctgaataatgagagacaaatggagagaaaatatgtgcaagttactacatttaaatatttactatccttcatctatgaagaattggaatttgacagaaagatgtacactcaacatagaaatattggccaaggaaattaagaggcaaccaacaaagaataaataaagttggttaataaagaggtgaaaaaacatataatattattagaaaacaaaaacttaaaacaacagagctattgagttgggaaaaaaaaaaaagatggcattgaactttttgagagaaaggggactggcagggcagacagggaccaagcagtcaagaggtaggagaaaacacaggagagtggtgtcatacagacaaggaaagagggtttccagaaggaggaagggacatctgttttgaaagactgctgagcgccatgtatcatctaggctgaaaatgatccactgggtttcagcaacatgagactcattggtgagttttgtgagagcaatttcagagacgtggtggactcagaaatcagaatggagtggggtaacagggtactgggaggtgagaaatgaacacagcaagggtacatagacatcctgctacagaagtttgggtatgaaagagacttagagaacctgcaaggagatgagagtgtgaagaaagatactttttaaaattattattattgagacggagtctcactttgttgccaggctggagtgcagtggcgcaatcttggctcaccgtaacctctgcctcctgggttcatgcactcctgtgtcagcctcctgagtagctgggaatacaggtgtgtgccaccacgcccagctaatttttttttttttgtatttttagtagagatagggtttcaccatgttggccaggatggtcttgatctttcgacctcatgatctgcctgccttggcctcccaaagtgctgggattacaggcatgagccactgtgcccagccaagttgggtgttttttgttttgttttgttttgatgagagcagcctgagaaaatttcaatgttgatggaatgcaactggcagaagggaagtggctgaagagttagcagaaggaggaagaattatttgaagcataagattcatgaaaaggtgaaaggtgaggaagaatttatagctaaatgtattaaacagtggattgcaacccgttattagctggtcataaatttcatgttaagaaacaaaacaaacaacaaacaaaaaaatatatagtttggttttttgtctcctccaaatctcaggttgaaatgtaatccccaatgtttgaggttgggcctggtgggactcatgggggcagatccctcttgaatggcttagcgccatccccttggtgatgagtgaatttttgttctggtagttcacatgaaatctggtttcttaagagtgtggtgcccccaccctaccttgctcctacttttaccatatgatacgctggctccgttttgccttctgccatgattgtaagcctcctgagaccctcaccaggagctgagcagatgttggtgccatgcctgtacagcctgcagaaccacgagccaaatcaaacctcttttctttataaattacccagcttcaagtatttatagaaatacaagaatgggctaacacagaaaattggtaccaggggtgtgggatgttactataagatacctgatgatgtggaagcagctttggaactgggtaacagggataggttggaagagtttgaaggtctcagaagataagaaaatgagggagagtttgtaatttcttagagactgtttaaaaggttgtcaccaaaatgctgatagaaatagggacagtgaaggccaggctaacaggtcttagatggaaatgaggaacttatggggaattggtgtagaggtcacccttgctactccctagcaaataacttggctgcattaagtccatatcctagggctttttgcaagtttgaacttaagagtgacgacctagggtatctgatggaaaaaatttctaagcagcaaagcattcaagaattagcatggctgcttctaacagctcatgatcagaacaggagcaaagagatgacttaaagttgggacttacatttgaaagagaagaaaagcacaaaagtttggaaaatttgcaacctgaccctgtggtaaagaaagaatctaagcagtctgtagagcaaccacttgctagagagattagcattactgaaagggagccaagtgctaacatccaagacaatggaaaaaaggccttgacggcatttcagcaatctttgcagcagcctctcgcatcataggcccagaggcccaggaggaaagaatgatttcagggaccaggcctggggcactgcagtcctgtgcagcctcagaacatcgctccctgcatcctggctgctccagctgcaaccacagctcaaagggctccagatacagcttgggctgctgctctggagagtgtaagctgccataagccttagcagctttcatgcgatattaagcctgtgggtgcacagcatgcaagtatgaagaaggcttggcaatttctccatagatttcagaggatgatgtggagtggcaatgtggggttggaacccccacacagagtcccaccagtgaagtgcctggtggagctgtgggaagggggctgccaccctccagactccaaaatggtagagtcatggcaagcttgcatcctgagcctggaaaagcaacaggtgttcaagtccaactcatgagagcagccacaaggactgcactctgcaaagctacagaggcacagctgtccaaggccttgggagttcaccccatgcaccaatgtgcccaggatgtgggatatggagtcgagggttatgttggatctttaagatttaatctctgccttgctgggttttagaactgtgtggggcctgttacccctttcttttggccagtttctcccttttggaatgagaatgtttgccaaatgtctgcacaccattgtatctgggaagtaaataatttgcttttgatctcaccagctcataggtggaaggaattcatcttcagatgagcctttagacttaggacttttgggttcatgctggaataagttaagactttgggggactattgggaagggataattgtattttacaatgtgaaaaggacatgagatttggggagccagggacagaatgatatggtttggatatttgtctcctccgaatagcacattgaaatgtaatccttaatgttggacatggggcctggggggaggtatttggataatggggttagattcttcatgagtggcttagcatcatccccttggctacaagtgaatccttgctctgctagttcatgcaagatctggttgtttaaaagaatgtggtacctatcacctaccccacccccatcttgctcccactcttgccatgtgatacactggctctcctttgccttctgccataattgtaagcttcctgaggccctcatcaggagctgaacagatcttggtgccatgcctgtacagcctgcagaactgtgagccaaattcaaactcttttctttataaattacccagcctcagaaatttctttataacaatgcaagaatgggctaataaaggaagagcataggaaatatctgagttcaatgtaagtagtaaaggtaagtactgcttgtgaaatgtatgtttcaattatgtgcaagtgtgtacaaagttacaaggtaaaaatacatttctcactgttatgttaaaagtttttaaaggttccttatctaaagcataaatggagttatgctaaaaattttttgatgggtaatttatagggaaattgttttttgatgggagaaaggattgatcatctcttataaaaggtgggaagaatagaggaagggcgaggatgggtgttggtctgtaggcttggtgtctttagtatttgaaaattgagagtgttgcctgtgaggtaggagtaaggtgaggagaaggggctgttcatgggttcgagcagggtagtgaatgtttggggtagtttccatggagaaatggagaagagaatgacttgagaaacacagatggattgctaggcactgttgtaagcctgactgagattggtgttcatgaatttatagcagtgccaatttgtctggttgggtgattttatccagcaatgctcacccaagcagaagtggcccaatcagattgttcttgcttcagtgtatgaatctaggtaagtaaactgaggcagctctgctgattcagctattgttgagctggaggcagaggcttcacaaacccaaccttaaatttctttcacctctttctgctcagaagctcagtgtatgtaaagttgtgtctcagttatcttaatgtcatctctggcactagagcctggtgaaagttatcatttaactatgttagtcccaaagacactgtgtgagtttctcaaggtcacctgcatcagggcaaagctagttactgggcagggcttatccttatcataaacaagattaagttaactttaggctcctttctttctaaggagaatactgaggatgcagtctagaaactcacacacattccaaaaggagtatgaaggataaatgggcaatactggctgcacatttcctgagcacatgtatgtcctcctagattcatatttgatataatccagtccaaaaaccataaattgtgcccaagttattttttctttaaacaattttttagagaaaggggtctcactgtctctaggctgcagtgcagtggtgcaatcctagctcactgtagtcctgaactcctgggctaaaagtgatcctcccacctcagcttcccaagtagctgggactataggtgtgtgccactatgtctgactaattatttttatttttttttaagagatgtgtgtgtgcggggggaggggggtctcactatgttgctcactctggtcttagacacctggcttgtacacaagtttttgtgtttcttttttttctgcccagtttccacctcttggacaggtagaacttgagcatcggtgttctgagacaaattagaagggcattcaacagagctagccctctctcattcctaagacactttggttcttccataataccttctccaggttttccatctctagctctgaccgtcccttggcagtcatttgaaagctttcctctctacctggcttttaccttttgaaatatgaacagatccatttcagggtcatcttctcacttgcttgtcctctttagggcacctcatcctcacgtaactcctaagtgtatgcctgcaggaaagacatttcttctgaacgccagacctgtgtatccagtggtctttgaaatgtctccacctagctcaagtattgatggagtgacggagcacctgctatgtgtctgtccctattctaggtatgggatcagcagccaccaagatggataagcaagtccttagcccctctgaagtttacattctaagaggtgacgaaaaaaggaatgaatggcatagaggtgggctgcttttaataaggcagcaggaatggcctgtctgaggaggtggcctttggactgtggtctgatgataaggaaccaatcattctaaggaaggttcactgcagggggaaagaattacaagggcaaaggccctggggtgggaatgagcttggtgcatgtgagggacagaagggaggccagcatggtaggtagaagcagggtgacagatggagcaaggaacacaagacaaactaaagaggatgacaaggtcttctaaaaattatgagagttggatggcaaggtcttttaaaaatcatgagagtccagggatctagaactagaaataccatttgacccagccatcccattactgggtatatacccaaaggattataaatcatgctgctataaagacacatgcacacgtatgtttattgcggcattattcacaatagcaaagacttggaaccaacccaaatgtccaacaatgatagactggattaagaaaatgtggcacatatacaccatggaatactatgcagccataaaaagtgatgagttcatgtcctttgtagggacatggatgaaactggaaatcatcattctcagtaaactatcacaaggacaaaaaaccaaacaacacatgttctcactcataggtgggaattgaacaatgagaacacgtggacacaggaaggggaacatcacaatctggggactgttgtggggtggggggagtggggagggatagcattaggagatatacctaaagctaaatgacgagttaatgggtgcagcacaccagcatggcacatgtatacatatgtaactaacctgcacattgtgcacatgtaccctaaaacttaaagtataataataaaaaaaaatcatgagagtcagtttggattttgtcacagcaacttaaaacatgtccacaattgaactttttgtcttcttccccaaacttgattctcaggggctaaggttccccaaacttggttctcaagggaaccaaggttctctgggacctggaatgttccctggcattaacaaatgactcagcccttccatcacccaggtataggtttgccctaggcgctcttctcactccccactcttgcttcctttatgccactgcctccaaaataaattctagtaacccaaaccctcctaccacactccagacttgaggcaaaactgtctgatgtacatccctcctggagatcccaccggcacctcaaatgcatgtccaaaattgaactctttatctattttcctaagcctccttcattccttatctccatgaatgacaacacccagttgcctaagcaaaatatgtcaactccttctccctcgctctcatattcaatcagtaactaacttctgttgattctatctcttcagtatctcttgtacttgtcacatcctcatcacatccctattaagtggaggccctctttctactgccagagtctacctggtgtcctattttaaatttcactcattttgaatccatcctccatatcggctccagggtcaattttgaaactcacaaattcttttgctgttacatccgtgcttgggacttcttaaagactccctgctgcacagaagataaagtctagactcctcgtaggggcacaaaagactctcagtgacctaaggcccttgccaatcttttttatttttccactctccccaccctcccctattgcaccctacactccagtcagattaaactacttgcagctctccaaatgtgcaaggctaatccatgtttgtatttttgccccagtgattttctttttctagaatgttcgctcctcccccacttacccttcctagctgcagtgatagagtctgtatgacaggctcattgcactcagggcctcagccactcttggctataactacactagcttgagggctgtggaataaaatcctgctgccagtagaccctgggtggccaagcatcttccaaaccaaatgctctctcactccagctgtgttggctttgtttatataatagcagcaatataacactactaataataattgtaacaaaaataggaaaatactacaaagaatttgctgtatgattggtacaacaatgaactagacatatacaggtctgccctcagggagtttatagtttagtgagggtgccagataatcaacaaataaaataagcatcacttattatggtagatcatactaattgttcacaatcatttgttctctccttgcccttgctatacatctcttgaggtggtgctctcttccctatccccattgactttgggcttagtcttgcaatttactttagcccacggaattgtgagtggacatgacgtaggcatttccaagcagaggctataaatgtacttgagtagtttggctctgttccctgaagcttctgccttctggcatgagaacaacatgctctaggcacaacgtggtccttcagcctgtgtcccagaacgagatgttatgtggagcccaggagagccctgcagagctgcagctgacttacaaccctcttgagatatgagtaataaataaatatttattgtttcaagtcattgagagtttcgggctgttgatgccacagcaaaagttgactaatacacttataaaaaagggtatgaaggaaataaaaagtgacatcgctcttctggataaggtggttagagatggtctctctgggaatgtgacagttaaggaatgatgagatggagccagtcttgtgagggacactccaacatggtgaactgtaagtggaaaggcattgaggtaggcaagagttttgatggaagagcggcatgggatgagggggagagaggtaggaaggggttaatcatacagagcttgagtttcttttctttttttttctttttttttttttttttttgagacagagtttctctctgtcacccaggctagagtgcagtggcgcaatctctgctcactgcaagctctgcctcccgggttcacgccattctcctgcctcagcctcctgagtacctgggactacaggcgcccgccaccatgcccggctaattttttgtatttttagtagagatggggtttcacggtgttagccaggatggtctcgatctcctgacctcgtgatctgcctgccttggcctcccaaagtgctgggattacaggcatgagcgactgtgcccagcccagagcttgagtttcaagtcagtgacaagtaagaaaaaaaagataaaccactatatatagcctcatagacctctgactcagatccctcttggcatggcattcaaatcaatcactgaggcccaattcctttcttggcatgaggtctttggcatgttagggtacccacgtaacatattgcccaaactggttttgagaatgaaagatggcactatggataattacctagaacaaaagatgtaaactgggattgtcccaagcaaatagggatatattgtcaccctactcatggtagcagctattcatgaaactagcttttgcttcaagttcctcattcacaactcaatcccctctggaactggaatcctaaactgaagctcattggtaggggtctgatgattgctaagttcttgccctctatggctggaccctgttacctgtatcccatagaggttggctaggttcttggtataaattacatgactgttcatcagcataacctttggaaattacccactgcctggaattaccctgtggccatgactgattcttgccacacctctggaataatgcattgtccccaccaaaccattccaggtgcttaccccggcctttaggccctcttcattgagatgtttagaggtctttcccaaggccaggctctgcactgggattttcatgcattcctcagtggctggctgaggaactcatatccccagctcacaggaaagattctgataccttatggaacaaagcacaaaaaaggcctcctgccctatgctactgggaagtagctgagtccacactcttggggctcagcttttaccttgaaaacagaccataagttctttggaaaatatacgtagccagaccaagccaccatgccaaagttggagcaaatatgaatccttctaaaaattgggggtttgcatgtatttttcacttattagctgtacgcatttgggaggaaggaagagggcaggtactttacatcattgagtctttcccctcatatataaaaatgggattaataacttctaaattacagctttgttgtgaagactcaacgcaatgaagtttgtgaaggcatggaacacagcactgtgctgggctcagggaaggtatacattcaattttggctgaatttgaaacaagagggacatccccactctgctgctgatggctgtctccacgcatgcttctgcttggtgtatctcctagtcttaatcagcctactaaggcagcaaaagtggtgtctccccacttctcccttaccacaccctcaatccagcaagaccccaggccaaaaggtttgctctttgatcctcagtccctcctctcctcaaggaatgaacaggtaactccaagtccagaagattctgacaaaactccccatttgcaggaatgactgactgctcgactgccaactgtgacctggtgaggcaccttctgtgagcagatctgtgggcagataaccttagaaaggagaggcactgtcagctgcatgggggtacctggtactgaacagcccttcacttgagtgttggatattctgtcagtcttgagtctcactgtgagattctgaggaactgtgacatgttggggaacagatggaagtcctgatgacccagtctttccatgtcccaagcaaaggctactcaaaagtgcttctctcctgtgagatcccacagctgcctgcacccagcccccaggatcctatgagtgatactcgtagcgtcctattcttcctacatgggcagatcccagatggtctctatgcccagctaaggttagcttcagctgctcttattaatctggtcagccagacacaggtattagctaggaaaaaagtatcttggcatgatgtaatccaagagctcaagccttcccattagcccagaggaattcaaggaagggtgtggatcacatcttcaacaactcaggggatgttctcaggactgtaggcccaggtccctgggtctttgaggcactcagggcctgtcctcttcacttgagcccctgagctctgttagagagctccatcatgcattctaagcctgttcgtcagagcatcctcactcaaggagtctagaactgccatggtccattcatgcctcagaccaccacccactgaagactggaaaacaatacatgctgattgttctccatgacacaaggaagtacatttggattttcttccaggggaaacacgataatccaagggagtttacaggtagcctgggggagctccctgcaagaccatgggggagtctgatctaagtcccagagcaagatgagagttgatcaggtagcctagggccaggagccttttctctgaacccacctcccctgagtcacccaaaagattgctcttgtacataaggcctagaggaagggccaatcaacacaagagggggtaacccaaggccctcttagaaagccaagccctagaaaaggtatgtagtgccttccccgaggaccacagagtctgaggacacccacatcactgagggctgatagtaatgcacatatgttcaagtaagatgacaaattcaccaagaggctcaaagaacagggttggggtattgatagaacttcaagctccagcttttgagccagcagctgtgaaaacagaccctggctggggaaactctgttggcctccacagctctctgagtcaggcatggcagagcacagtggagaatgcatacacacaactttggatattttacagagaaaacagagcctgttggcttgatcccaaaggtgaaagctgaaatgagaatgacagagatacctcattcccctataagtagaggtcacagcccaggattagactcctaaagcttgaccagttttcccagttcctcttccacgcaggtagctgtggtcctaatataccttggaccaggactcttagctggaataaggcctttgaactgggccttggattaaactgtgttcacagtttggttttggacagattcctgggttggattggactgaaatttttgcctgtgctacaatcttccaagaagacttctgaaaatctgccagttggaatgaatttttcttcctctacattctggtagcactttgtgaccacatctatgtgcaataattcagagactgctttaaaataaaagcacatgcttatcttactcactagactatgagctcttggagggcaagaaccatgtttgaatcatcttcatcacttgcccggtgctgagtgtaatggccagtacatagtacccactcccttccacattttgctgcatttaaattaaatgaaaaacatcaagttgtaatgtgggagtactggaccatgcatctcactccttgatgggataccaacatggaggtcaacatcccacggaccctgggagactacaatcatcctaataactgagttatggcagctcagcctggccaacttaatagcaacagcatatgaacacaacgtatcaccacatgtatcacaaccccatgtatcttggcatgacacaagtattagctaggaaaaaagtctcttggcatgatgtaatccaagagctcaagccttcccattagcccagaggaattcaagaaaggaattcaagagacaaattcaagggaccaaacctcacagaactgacacaaaactttccccaagcaactggcatacagtatgtgttccatactagttgttcagaaatatgacctaatgtctagatcatctaggagttttttagaactacaattcctaggccccattttggacctactgaattggaattttgggggacaaggccaagaattttgtattttaaaaggcctatgagtgattctaatggttagctgggtttgggtctactttagaccacgcagggccaccaaagacacttccttctcctataaagtacctgactgtttaggcataaaggaaacaagtgatgtatgtgactcacactggcctggcagggaaagtgttgactaattccttggacatcctgataggaaatgctgggagcctccttcgtgagccatcccttcagtctgcctgatttcaccctggccaggtacactgaagagctggatcccacgggcttggttcttacagccagattctaagccaagcccagctaagcatgatggtactttgggaagttctagtcctacaaactgttggggtgagatgtgtgtggctgcacagagccagtaactggtgggcttgtgagaagcccagcatacatataggcccactcagttttaggatctccctctcctgctaacccttcttcaatatgtatgccccagtccaaggactgggcttctattctggttcatggtttcctctctagtctctgctgtgagactgaagtctctttttggagactgaagcctttggatgggtcaaggatatactttgccgggatacaccctattcccttgggtgaggacatgagtcaatccagaatcttccttcccccataaagtatctgcctatttgaaaacaaaggtaacaggcaatgatatgacccatactggcctggtaggacaagaattgactccacctccttgtacattctgagaggcaacaccagcagcctcctttgtgacccattccttcatccagggtcagctctttcagccctggactccctcaactctggcatacacttcccaggctgccccatggccctgggacgcttcatagctatgactagtgcccattctccagtacagtagcagatacagaccctcccccatcctgctaccacccctgactttccactcaaggcgacgtccccttcagatcactgggagaattctgcagagcgggcaccccctgctctgcctgccactagcaaagggaaaccacaggtcttcagtgttcaggttcttgaggactggataacagagggagggagacctgggacttcctaagttccctgtttattttctggggctatctgtaggtcaatgaaaccttgaaagaagtctagagaaatgaggggaatgttacattaagcagaggaagctcacaccgatcacggtccctggcctaatcacaaacagttcccaggaatattatccctcatgctgaggctgatgcatttaaatctttgctgatcccaactctggctctgatcatttgaaaaaggcaatttccaaggactctagctattgtgatcatattttctgggccaagggaaatgatgtttgaaattgcatttgtcctggaaaatctgggattgtatgtttacagggaacactaggtttcagccatagaggggagggaaaatagagcatgcttcacctgtgcatgtggcattgaggtcagggtgggaggagaaatgaaaaaagtacctgcctatttaagaataaaggtgacaagcaatgtatgcgaagcaatgcatgtgacctatatgaagaaaaccatggagctgttatatttagaaagacggaagtaggcgaacaaaaacatgtgtctggatatgagggctgtgtattataaaaatgcctattttcttcaagttaatttatattttaacaggagtgcacatacaaaaatcccaataggatgttttttttactctgacaaaatgattctaaaattaatcttgaacaacaaacagatgagaataacaatgaatattctgaaagagaaaataattcagggaggaaggagttgtttctagctctgccagatattagaacacattataaaacaacaattaaaattattcaataccagtgctaagatagaaatagagcagcagaacaaagtggtgactcaagaaatagacttaactacatttgaggattcagtatgtaataaaacaattcatttccctcaaatcaaaagggaaatgaattacttaataaattgtgttggaaaactgcataatagtttggacaatattatacattcatctaagtaaactccagatggagtaacaaattatattttaaaaaatcaaattactgacaaataaccaaaaatagaacgaactgtttctcagatccatggcagaataactttgtcagctttgaaaataaatcacaaatactgagagacttgtttatatagaaatgtaagacaactatacaatgaaaaatagaaaataaatagggaaaatgaggttgggaaaatacatatatcaaataccacaaagaatttctatacacaatgtagaaagaatgccttcaaattgggaaagaataccaacacctcagtagccacatgtcagtaccagtagtcactatacagggattggaaacagcaaatgccccatgtccctcctagacagggctggaaccaggtcggctgaagaaaggccaagactgaagtctctatccagtgccctgtgatggcaatcttggcagtcctccagacacctcttttatacctcttaccccaacagggacatgtctctggcccatggctacccagcagtctgtctccagactgtgctcccataaacccacctcccttcttcattcatatccattaggcaacagccaacccctataggaaccattacaaacccaagtacccagtcctgcagtgtgggcgcgcgtgtgtgtgtgggtgtttatgtgtgcgtcaatgtatctacggaacatgtcccttttgcataggcccaaacccagtggcttctcccagaacccactgctgcctcttggatgtctccttttccagcagggcctctcatctttcgggcccaaccattctaacagagaagatgtcaagtctatgccccatgagaagaggggctgttgctcttctgttcagcacccactatgatgcccaccacattgcaggcactcaataaatatgtgttaaataaaagaatgaacctaatattcatagcatcaatgttttctcattgaaaaactaaattataagccacaagggcccacttcatttatataatggtgtctatctccacatgagaagagctccttgaggacacggaccgtgcccaattcatctctgaattcgtggcacttaaccttgggcacttcacagtagtccacaaaggtgtgctacagaaatagattcaacttacagctattaaattagcaacttttaaatggccacacaaatatttgaagtttagtgaagctaacaaagtttacaagcaatatatatgtgacctaaacgagaaaaccacaaagttgttatctttagaaaagtgaaagtagataaacatgaaatagaggcatgccatgtttctggatggaaagaccatacgttttgagtcttgttcttaatcttacagcttttgctactggcattatgaaccgacaccatattttggggaaaccatgcaacagtatgcatcaagagtcataaaaatactcatgtcctgatcggataatgtcaattctagaaatttattctaaggaaataattcaagagaagaaaaagccataggctgaagatgctcattatagccttatataaaataattaaatataattggttgaataagtcatggtttattcacttgacagaagaacccacagatttttaagaatgataactatgtagcaacatggtaagattcacagcagaatatgggctttaaaacatagaatgcaaaatggtatgctcactctgatgaagaccacataacatatgtgtatagatgggtaagaataaaaaaagactggtcgaatttgaaatcagtttggtttaagggagagagaatatgaatattttctttatttaaacttgtagatttatttaaaccattaaattagcttaaacttgaaaaatatgagaacataccaaaagtctctgtcaagtattggcccttgagctccagatacgtctagagatagagttacagcacattatatagggcatgacaccatgagattgtccctttaaccttagcaggatcatccccaaaggcccttcagtttagaatttgaccaggaacagccataccctcttatgcagctaactttgtacatagcaggtactcaataaatcaagatggataaataaatgaacgggtagaaggaacagagaaaatgtaaagattaggaagaggtttcaaccccagtatattgtatgttgggggtatacaatattgatagatttccagtaagggtcacaaatctacctttcttggatttgtctaactcctgtcaacctttgttgcttcatacaggtaactcggccagcagtttgcttctatactctggcctagtatttttatcctaaggcttccttgtccttacatttgcagatgatccctaaacttctagaaatctagtgcaatggagacagggcaagacttgcagcaagaacctgggtgcaaattgctgctctgttaattaacagctcaaattccagcctattatttagtggttctatgaccatcgtgttagttatatttctttgaaccttgttttaatctataaattgagagaataaataccctataacacagtagggaggactcatatattcccaataatgtagaacatttaataaaattggcattctcctctaacccatgccttcccactgtcataatgctacagactttaatcatagcctcacttaaaacacaaatccataggattcttcatatttggaatttgacaaaactaagttatcctagactagtcgttcttaatctgtgatttttttcccccagggaatatttggcaatgtctagagatatttttggctgtcacagctggtgtgtggggcgggtgctactggtagatgacagagatgtgttaaatatcctataatacacaatactgccccacacaaaaagaattatctaggccaaaatatcaatagtgctaagtttgagaaactctactctggagtaatggtccatgggagagaccagattcttgcagatcccattacccaattcatcccggaatgtgtgcgtgcatgtgtgtgtgtgtgtgtgtgtgtgtgtgtgtgtgtgtgtgtgtcaccagaacagaaggtgggataagtaaggaggaagtcagagtaaaggacaggaagatactagcagagggccagtagggccatttcccacagcatctctgtgggccatttcccacagcatctctttcccttccaactctccaaaagcccagctcaagtcttgtatcttctgggacattttccctgagcacccaaggatccaattttccctcccttgacctctcaagattagattgctgatttgtaacttaaatcgtatacatccaagaagttcctgccttcacatttcacacatatactatacacattaagaactgagcaattaggattcacatcttcttaaggtggtttacaaaatggcaaaggaaagtgtgcattcatgcattcttggcatatctctggtgaaggctgttttgaagcttcttttgaaagtggctgctaatggattgataattggtttcctggcttccttaagaagtgtgaagcattctgccagcctgtcgtcaaagcatcaagtattgtgcaaaccaccatcagagttatttgtatcttccttgccattgtatctcttgtggtggaagaatagctggacaagattgtatgggaaatgctctctattcttttgtaaggaaggaagtaaaatggcaaagcttctggaaggtaaagaatatatgcagcctggccaaagctttcccaccatgacagccaggatgagcaatttcctaggcagagactgaacaactctgaatccaatgcatggtgctcagcacagggaagacaggcagtcaatagcttgaatggatggaaagtggtattacttcccattgattttgagcaggggtcccgggagatgtgaattaactgaggaccagagagtaagagcaaagaagctagctccaccttttctttcaaaacgtttttcactgtgagataaatcatcttcttaaaaacctaaattaaaaaaagactatctattgagcatctactactgtgagggcagctcaaaagccaacaaaatgattctgaagtctctgcttgctacagaaaatgttttggaacatgaaggaagagtgtatttgtgtattcttggcagggtaattccctagtaaagagttgttttgaagaaaatgtttcaagagaagaacaatacaatactttgcacctcttcagacaacttctcaaataaatttgagccattgaaataatatccccaatccccttatagctctcaataaggaaagggcaatgttatttgccaagtattgtattaatatttattgtgactaatgtattggaaaatttagggcacttatgctgacttttgctagaggagcttttgtatgtacatttatgagcgctttgtaaaacacagagaccaaccttatattttatatttttatagatgtttataggtattgtcccttttctattgataacattatatttgatctagagttaagagcagaactccaaagtttaacattgtctctcaatcgaagtatgacctgctctgtaatgatccactttcaaagtagcttccaggtatttattgtgggaaatgtgaggactattcatgtcatagtcatctttttctacaaatatgatcatagaggcttagaatatttggagccacaatggagtgctaccctattggataggtcagtacatgaaaatccagagagaagatgcttggctttagccacaaagctgagctagaactaagaacctggtcttcagattttgaaaccaaagtcatctcagtgtaccaggcctttcttatcaccatactttcttatcaccaattggactatgagctccctgagggcaatgcccaggacctataaaagcatcagcttacctgctgggtactcagtagggagtgggcagatggaagtccctcactttgttgaaatgcaagggtgacctggctatatgctgcaaaggcatggggccggttggctccctctggcttcctccatggaagccagcatccctgagattcaagctgtgtcctcttactctccaatgtccagacacacttgagtgatggaagggcctggggatgtcatcctgctctatcccagaattgtctagaagaagaaatgccatgtcagctccccagagtacctgcttagctttcatccataagcctcagacccctcatccttgtttcaaaccacagggagcactgacacatacttgttgggacagacctatcttctttccttctcagctgtttgcaagcagtgcccagctcactggaggctgccggccctgcttgtggacaccaagggcctgctgggcagcacttcaaggtcttctgcccttggtgaaggttttacagggatgttataaacctgctcctaagagccaaagggccaagtaaactcttggaggggtcaagcaacagtccctcagctggcattctgctacctgcctctttcagcttgggggacagtgaatcttatcctggtcctaagaggctggctggttttgcttcccatgtgaatcctcccagctctttgtcgcagaagctagaccctcctccatttctccctgccttgttttatctagatggatttcagagattaagcccccatggcacctggggctcccactgtgtgtacctttatcttctcaggccctgcttctgcagagccctgccccgtgcacctgtccctgggcttggtctctgcaatgggcaaagcctttgtgtttgcctgccccgagctgctccctgctcctccaggtccttgtggctcccagcatgctacgtggctaatgctgttgggctctatattctaaccacagtggggagcagggatgggcagatatcatgcaatttatttttttttcaataagggtgagttgttcaatgtgtatttaagggtgacttgatctttaaacctctcaagactttttacataaataaactcaaaagtcatcaaaatgctttgttggacaacgtgatttttttttttcatttaaaaagtatcatcaccatggttcatcccaactcatcaactcatacaccaaactctcagtcatcacagagaccctgacagtctcccaggctattcctctcccagccctgagggatcaccgatctctagtgtgcagaactcgaggccccaagtaacccactgagccgggtgaaggatctgagggtcaggctgcctgcctttccctgagagaagcacatggaaagagatggagaaggtggagtgacaagggatgggagaagacgtaacagcccagagaagctggaaattttgatttcccacagagaccatgtctgggcctcccttggctacacacagcccctcatccttgccaatcccaacgcgactgaagatttaagatatcatttgtgctgcaaagtatggtcaggtcatccaagaggaaggaagaagggcttctttgttatctccacagaacagagcactcaactccaaccccttccccaaaagatcaacagtccaaagatagcttgatcccttttccctccctaaatccaatatgagataaagcaattttaggaaactgtttatatcctggcaaggccagtttcccacagttactggaggctggtggtgtctacagccttacaaacttgacagtcccttccaccctgctggattagatggtgtcaggggtggcaatgacggtgagcaggaaatgtctgggtctgagcctggtgggctttgtcccagtggtgtctccttgctcttaaggatcaccaagaagggtaagacggtgttgaagagcatccccaaatgtcaggagcacttgttctcagtgctacagtcgacattcctgccagaaataaggaccccaccagcaacgttccgaggagtagaataaaccaaccagagtgcagctgttgttacaacctgcaaggttcccagggacggggcccctggattagctaggaaacgggcccctgcctctcagtgaagaccctggcgtggcctcctccctgctcacttacacacgcagcctggcttcttagccgaccattggttattcttttggcatgtgattgccttctgtcccaccagctcaaaggcgggctggcactcaaacttgagtgtgtcaccgtggtgaaaccgggagccttccctccggccatatgcaggtatgccagggtcaccgcaactgccctgctcgatctctgaaagacaggaagatgagaaaacagagacaaaaggtgactttatacctcttttggagctgaaggtccacatgacaagctctactgctcttctgccataagtcagtgctcagagtgacacaggtaggattcaacgttcttataaggaatgaggtttgtgagaaatcctgcaatgtcctgtttcatcgcagcatcctaggatgaatgggcttccagctatcaagtgcctgagactctgtgtccacataaagtgttctagatgcttggatgttttgatcccttacccctccctaaatccaatatgagatgaagcaattttagggagaaggtgggtctacattcttcacaggttacctgtcccaggagcaacaagttccacagcattagaagtctttggagacttcctcactgaacctgaccttgcatctgaactgctaatgtcacgacagatctcaagtacagtccatttctgagcagcaaaggcaagtcaagatgacacagcagttgaggctttgctccctgtctttttcccaaaccagagattaattgagaataaatgttcactgcctgctgatgtggaagaaccttcatggagatgtttccttaattcaatttgcaatggtagcaggtaaaatgaaacaaatgactcattgagtatgctttgaaagttcacttgagtcaacagtggtgagacagacatggagtgggttccctgagacagctctgggggccctgaacccagtgggcatgatgggctggctacctcaccggagaggcagtcaggatccagatgcttctggaaaggagtatgtcctggccaagcctctggagcttcctctggagtcacctccactcccactcatgctgtgcttaatgctgtgagagatggacgaggaggagggggtggtggaggggaggaggaagaagagggaaggaggggagctctgtttccggggagaagggcgtcctgcaggatagacaggaggtcatgaagccagtgccagacggtgaggtgaggactgtatgagtcccgagatttgggagagaggggcccagagtcatcaggggagttttttggacactacctaggattctcaggaaaaagggaccctgcctgttcggtagacaccatcatgggctgtcagagccacagtccctgaagttggtgtgtgtgatcctgacagggatgattctgcaaaggctttcctaccacactgggggcttctgtgggctgggcagctccaggcactgccttttatgggcgggctcttgactgttgcattcatgttaacccaaaacgaaggctgccagctttgtgctgagagcaggcaggacaaggcattctatggctgggattgtgtgtgtgtgtgtgtgtgtgtgtgtgtgtgtgtgtgtgtgatcatctaagttgaacaacaagggtcctcccctttgtgcaggggagtctgtgtgaccatgtgccaggtgtgaggcatctcaaatcaaatgtaagtcagcccacttgcctctcacctcacatgtccccctggcctcaccctctacaagtacatctgctgaaaacatagctgaaacccctctgaagctggctttgctcaggctcagggatgggggaggggatacactgaggcattccaggaacatggtccctttgctacaggtcccagagctccagggaatctgaaggaaagaaggggctcctgtgataagtcaacgtggagaagcaagcagcaggacccacctgcctccagatgtccccagacatgctctctgggatgcgagagcctggggtgtgagggctgtcactgcaggcattttgagacctggtgaaagttacacagcatttcaagacagagctggatccttcctgctgccaggggcagaacccagatataaggtttcctagtgaggccccaccattgctgcaggagatatgcacgtggggtacatgtgcctgtgttcctgcccacagcagctagtctgaggctgtgattggcttaagaaaaaggggatcctaagggggatgaaggaatctgcccagccttcccatcgtgtaggcacagccctgcgcacatgcccacatccacccacccatcacttcctcctaccatcatgcaatcacaggcacccacttacgaacaatgcaatgagcacctactatgtgccagttgctgtgctagacccttgacatctggatatggtctctgccctcaagaaatgaacagacaaggaaataggtgtttatgatacaggggattcgtgctgtggatgcacataggagaagcacctaactcaaatgtggaggatcagtctggaaatagggtgtggagaatggaagtactaacctcatctacaaaatttcaaggggcgccaaaatctcagttatcatgacaaataatatcttagtgcgatatttttttctagaaaattacaattaatgccataaatccaattcacaatgaagaaaaataccaacatttaaaataaagcctggatccaaccctatgctcagatcactcacctcactggtcttcaccatagtcccagcactgtcagagcctgtctttgattcaaatgttgatgtgttttaacacggatattttgcactaatattaatttttaaaaaaaatttgcattaagtgttatttatcttaattgctgagtttttttttccccatcacttaaatttcgtgcccatgagtgccctgctcacctgaccctagtcccagacctgggtcaggaaaggcttcttggaggatgtggtcctccaataacccaatagttattgtcacagctaactttagttacataactaagtgcctggcctgagcacttgggtgtaccctcactgagacaagaatgcagaaagaggtataggtctgaatggagggtcatcagtaggggatgctgagttttaaggtactagtgggacctccaagtggaaatatctagcaggaagtggctatatgggtcttaagttcaagagagaagcctggtctagaaattcagctcatagattgtaaaagaagccatgacaaggatgaaattacccaaggagagtgagaagggatgttggtctaggacaggacagttaggaacaatgtagggaccagcagaatgctagactgggagagtggggtcacaggagcttaaagaagaatgagtttcaagaaggagatcaacagccttgaatgctgcagggaagtttacataggattgaaaaacaggttagcaaaaagaggtcacattgatactgccaggattgtgtgtactgatggggccaataccaaacaggagaagagaaggtgatatcactctctctagagaaattaggtagcagctcatgaggcatatggcctgggtgggagtggttaaagtagtttagtacaggagaaacttgaccatattgaaatgctagagaagaatgaaggggtgggaggaaagatgtattgaatggttagctgaagatgtggaggagaaaggggccccctacaggggctccagagaaggagagaggcatgggactgagagcacactagaggcccagccttagagaccgtgagggatgtccttccctcaagactgcagtaaagagggaagaagtggtggcagtgagttttcaggtaggatggcaggagaccgagggagatcctgtgatgacacaggctctattttctaagtggaggaggtcacagtctttgctgaaggtgagggacaagtcatgggaaaacgacttgaagagaatgtctgaagctgtcactctggagaagaggaaatcatgcctagatggattgccatgcacctctggggcccgccgagggtgcagatgactcatttgtagggataccatccagcagggctatatgacttgtcccagcagcccttggccactcagttcctgtagaagtagagaaaggggtaggaggattgactgagtgaggggggattgggcttggagaaatggaagacaacggggcaaaggagctgaacatgttgttaaaaagaatggccaaagtgttatccaagaggcttagaatgaagaaggaaagaggtgaaaggagcagggggcgatgggggaaatagaggatgggaagggatgatgggcaggagtaaagggagtgtcatgtgaaaaagctgaagtatgtggaattgagatttcagaggtgcttgatgatgaggtccagctgcagccagggtgaagtacactgaaaggaagtgagaaggtcaaggcctgagaggcaaggtgatggcaagtagggaggaggagatcagtgacagtgatgaggaggggtagaaagtgtcagagctgaagacagcataaggtcaaaggggaaggggtttacacgtgggtggaatggcatcggcgagcaagcatacgagcccctctcaaggtgaagttcattgggtgtggggaagtgagctgctagcactgcagagggctacagggtcgtggtgacttcacgggaactcagattcaaggaagcatttggcaaagagttctaaggcattgggggatgtgttgctcagagaatcaagattgggtggaaggaagaggaagaacagagcagggtggggtgagagtttgggagctccttccaggaaggcagagggggctgctggctggcttctgtccctttgacacctcctgtcctggcctaagccttctctccaagctcagagtcaactcctgctggaaacacagagaccacggccgctgccttcctgcaaagggctccctgtgctccactgccctgcctgaaaggtgtttgatcttggcacttctggtcaggtgctgaccaagtctgacgtcaggacccagaattgcaaatagacaaatggattttgacttgcagaaaaatcacacatgcaatttcctgttatctggtttaatataattccgttttatgagtgtttctcctgtctctctccttttgcctaccaaaagcaaactggaaaacatgagatgattgcttctaagatgcctcagaagtccatcatgactgagctctgccactcagcatatttgcttcccctttctcagctgttttatccccatcatctgtgatcaatctcactcttctccccaggtttttccatttctaataccaaattggaatcgtcttttatgaaaatgtctgtacagaagggactgtatcatgtggttctgtaaattcactgaatatttgatgtgctccaagaggggaggcactgcttggaggaagacgaggatttgctgcctttcacatgaggctgggaggcttcactggctccttcactaactcattattcccctggcttgagcttcctctcctcttcctttggcatgactaacgccttgcattaacagactttggtttacaatgttacctcctccaagacattttccttgaccacacaccttagatcttagacatttcccttttacttttctttctttgcaccccattctttttattttttcttttgagacagggtcttgctctgttgcccaaactggagtgcagtggtgctatcacagcttactgcagcctcgaactcctgggctcgagcaatcctcccattttggcaccacattctttccctttatagcaatgatgccccttgtaactacccatctgttcattcaacaagtattttactggttactgttctagacattgggggtataacagcgaataaaaggatgaaaatttgttcttctggagctctggttgggcattgggcacaagatgattcaccacccagcccccctcactcccaccccctagaatgtaagccccatgaaggcaggcatccattatgtatttttgatcactgtgtacccggcacttagcacagtccctggaacacacagaatactctgagcttagcaaatattttgcatggaaaccgtgccaaatgccacactaagcactaaaggtatagcattgcctgccccacggcccctgcccctggagaactcagggtcaggtgggtatggagataattccaatacaaatgaccagggcaatggagaggatgtagacctgaccacatgacttgggtgatagcagaaggggcagctcaagcctctggctgggagcgctggacaggtttcttacaggttgttcaaatctgggagtcagcctggattgccctgtccttctccctcagctctccttagtctcctcctgttgactcctcctcccacatacccagaaccctctgctatccaccccgtctctccctgcctgagttcagcccttgcaactcctcatctgggtgccagtagcagcctatggttcccctggctcttccttctatttcatactctacaaaggagcacaagatcactcagaaataaaaatatgatgattaccatcccctgctcattgatccttttacagcttcctgaaatccacagactaaaatcctaactcctcagcatggcaggacccttgcctacccctcccaccccagcctgctctttggccatcagcgaccttgagatttacacggcacagcaatgagtgatctgtagggaggtagaatagtgcagtggcaagagctctgggatcacaaagtccaggatctaaatcctggctctgatactaaggaacagaccttgggcatgtgacttattttctctgagccttagttttgtcatctgtaaaatggaaatggtaataacaaggttgttgtgaggattaaatgagcttctgtacacaagataattgtcaaaatgtccagtatgcagtgtgtaaccagtgactaaccatatttcctcagtgttattgtcgctgctgtttgcagagcccagccgcccctcagatggctgtaacgtggcacctgccatcctctcttcccgaaatgaacaccctttgctttgtctaccagacaaagaatcatctttcagtgttggtgcaagtgcattcccatgtgggaccttctttcgaatcgcccaggcagacttaggagctctttctctctcgctcccagcccccttggacatttctgttgttatagcaacgggtgctgcaattttgggcgtgtgtttcccactgttaattggtaagttccttgaggaccgagccaatgttttttgaaatgtctatatcccagcttttctagtgaagtgcaaggcacagagaggggattcaataaacttttgaggcatgatgggggaggatggaggagaggatggaaggaaagcagcaggaaaggagaaatggaggacaacagcgtagagtctagagaagagctagaagctcagtgtagtgggaagctcaagtgatgaagagagaagaggccggagagatggttggagggagaccctgaagggcttggttcgatgagtaataagtcatttaagctccatcctgtgggttgtcagctccctcagagccaggggtcgcatcccttccactctttgtatctccagaaccaagcccagtgccttatgcatactaagtgctcagacctgttgttgaatcagcacaaactcctagtgagtgaccaggacatcttcggtgcattaggaacaccctgtgggcatgcccagaccacctggattgcctcagaaccacaccccactctgcttttctacttctgattatgcgaagggcaccaggaggtgagagaccccacatctgtatgtgcacctatggggactgatgtgtttttctgcacacgattgccacaagtggaatggaggtatggctggatgaagtgggtgacattcttccctccccatctccttcctctataacactgtcatgggtttgtcaccagccaaaggaggctggaaacaaaggacatggaggtagcctccaagctgtctgcattagccccaaactaaagcttaccgtttgcaaaagctatgtatttagagagcacatctcactgacaaattactttctaccaaattttaatgcggcagcatcctctgctgtttgccagcccagcctccaggggctagaacaggctggatcccactgggactttttgagaagaggcagctgctgcttgtatctagctcaactttggctcccagtgcctgaaaaacctttagaggtatcatggaaactcagcgggcatcttaggaacatgttagtgacattcttggccaaagttggaatgtttgggccttccagtttatggggaaaagacaagaaatagaggtgtactgaaaataacagaagagaggctgaaaatagccatgtgcttggcatctgacaagaggaaaggcggtgtcctagagggagtggtgagtgatgctggtcggctgcccttggcctcctttgaagtctgcttctaaaaccacctcttctgggggctcagcagtgcccaccactggagtgaagttctgaagaaggggatgtggcactgcctgcagagagcaagtcttggccctcttctccccaacttgctctcagactttatttttactgaggttttagcctcaatcttatctgcatgtcagctttctaagcccacctgttccctctctcaagggagtctgacaaactctttttcatccttcaagcaagtctcagtttcagacatcacctcctccagggagactcccctgatgcccttgagcaagatttgctgcccctcctttgtatttccctgtcttctagcacttgttctatgctactgaaaatggactatgaattaggtgaaggcagagattgtcttgctgtccttgtagcctcagtgtcctgaacattgtctgcaacacatcacagggccttagaaaatgttgaacaaacagatgagctcatttctaacatgagtgccctggactgttgggcagcccctctgcataatctctactgtcctgctccttcatgtctgtagggtccaggtcccagcttcttcctcccctgggccagcctcccagactcagcattaagctgccagattccagactccagtaaggaagcaaggagacttccagattgatgctaaaacttgttagcaagttgtatgtaattttataatgtttctggtaagtgctaattgcctgttccttaaatatttcttgttctactgggaagcaaagaaattgcaactatgactgcatttcccacagctggtcgcccccatggagggagactggctcagagtgctcagatattgacagatcaggagtcccctcccccgccccctgacctgggattgtgacaagcagaactggagggatttctgggaagcaaatgccccaattttcccaccaggttcatgctttcaatgaggaagaaaggatgatactggagtgccacctgcctgcccctaaggttgtatctctctgctcaaattgggacagagtgggtattgatgatgatgatgcagccagatgtgcctaagggatgagtggaaatgatggatatgggaggtctctgcccttggatgccttatgccatcctacgagaaacctgcatcacagctacccgccccccaacccctgctcgttcctgagtcgagatgtctatcctgtgtggaactccccaggagctggaataacaggggctaaaatggaggcagaggtaattctgaagcttcaggtaatgatgtaggttggaagaagagctgtaggccttggagagcagagaagggagtaagcttccaactgagcatttactaaatgtcaggccctatgctgggtgcttgactatactgagtcctcatgagaccctggaaagataaccattcatcagcccctcttcacaggttaggaaattcaggctcattgatggggagagactggcacacagggagtcaaaggaagatcctgattataagctgggtttgcccaaccccaaatcctacagggacaatagagaatgcatgggctgttggcatctgtgcactaggaaggtggtaaagtggaccaaaagggaattgagagggtgctgaggagggtacctgattatgactgagtagatcctcattacaatttaattctacatgcttttctgagcatgtgtcctgtgccaggcactgaattaggctctacaggactgcagagatttttgtcttgaatggattcgtagaaaccagaacttggtggaattattattatggagaacttcggatgtcatgtagaaaacgttatactttatcctaaaatcaatgggaagttgtcattttttttttaactaggggggaattgtgccagatttggattctgggaagatcactgctccatgtggcagatgggtagatgggagtgagaggactagagccagcgatgctggttgggaagactctgccactattcaagtgagaggtgatgagggagggactcagctcagcagtgaaacagaagtgggatgcggaaaactgacagaatctgggaatggagtcagaggtggggagagggaaaaggaggaggcggagatgaggcctagggatggcatggatggtggtgctgttcgtgaagatggggtacacaggtgcaggtcacaggtgtgggggcagagatggcgagcttggttttggatggtattacggactgaacttgtgtgttcccccaactcccccaaattcctgtattgaggctcttagcccccagtgtgactgtatttgaagatggggcctctaaggaagtaattaaggttaaatgaggtcataagggcagggccccgatctgagaggatggatgtctaagaagaaacaacaccatgctcattctctcattctctctctctctctctctctctctctctctctctctctctctcctgtgtgtgcatgcacccaggaaagcccatgcaaggccatggtgagaaggtagctgtctacaagccacgaagaaagccctcatcagaaaccaaattggccaaatccttaaccttggatttccagcctctagaactgggagaaaacggggtgctgttctgccttctctagacacatggcctcctattaaaacagtacaaccgttatctttaccccaggggacattgtggtatgacagtgttagtgtaggaaagatgggccggccttctgttatggggtgctctgtgccccccaaaaagacgtgttgaagttctgactccggtacctataaatgtgatcttatttgaaaacagagttgttgcaaatgtaaaccacccagtcttttttgtttttgtcccttccgcctttgactttttatttgaggggcgaagcccatcattctcacaccctcctggtgaggagctccctatactataaaaaggtgggtgggttgagtccccggcccccaccatgtgactccctatcccagggcattttgttgtcagcagactatacaggtgggtgggtttgagacagctgagagggaagccatatcaaaatgtgtaacaggaagactgaaatgcaagtggagaacagatgtggaagtcaccagagtttgggttgaggctgaaaccatggaagtacacgtgatcaactgcagaaggttctagaataagaggactgaaggctgaggatagactctgaggggcagtggggagccatggaggagctgtgaaggagcagccagagaggtaaaagaaaaccaggaggtggaggtgataggagcccaaggagcaggatgggcaaggacagggagtcacatcggggtgccggggactcaacccacccacctttttatagtagagggggctcctcaccaggagggtgtgagaatgatgggctttgcccctcatataaaaagtcaaaggtggaagggacaaaaacaaaaaagtggcccacccaacttagccccttgaattttcactgagccaggttccaacgcactgtgaggcctccaggctcctgcgagcctgattctgcctcctgccacttctggctccacgccctgcactgaggccttacagagccacctcatttctctgccagtatggggagggagggccctaggtggggagtgctggtgtaaggcagggacctaaacccagggcctatcagagcacctggaggcagatccaggtgcctggcctggaggacaagaaatgtggaaggtttggctggagagaaactttggtgacacccccagggaaggcaccatctctatgccaggcaatgtgcaaggagctttgagatctcatttcactctcctaacaacgctctcagattggcatcattatttccattgtacaagtcggggaactgaggctcagagagaccacaagactcaagcttacacagctgggaccacactgggatttactaggtctggtgcaatttcagagtctgtgctattttctagaatccactgcctctgtgcacagaacctgacgtagtccctgtgggtttgccatgtctctaaacacccagactgtccttcctaatttgtcacggctccaaggagaagtcctgctgacacctagtccatgagcagcattcacatagcatatgctttataccacatccaagctgctagctattataatcacagcacccagcaaaatgttggtcacataacaaaagcttagccaatactggctgagtgaaatggacaaatgaacttgtgaactaactccccaacctctggtgacatggaatccaggctcatgatacttggtctatttgactggggcaaagctttggcttctattaaagattttataaggaattgaaattatgtaaccttgggaggcttctggtgcaaggggaaaatccatgggcttctgaagccagggagacatgggttcaaatcccagctctgctactttccacacttgtgtgtgacctcaggcagattacttcacccctctgagtctcagattcttcatccataaaatagcagccattttatcattgtaagcaatgaatgagatgaagtaatgtctttcaagccagtggttagctatgaatcctctcttaaaagaaggcttacaaagagcaaaagagaagaaaggagaagaaacagaggcagggtggtcagaaccctccatcctgggcatgccctatcctaccatggaggtccctggagggtaccgcaggtctttgcaagacactgtgaaaaccctgagataatgaacataaagctatggcacatagcaggctttcaacaagtggtatgtccctttcttttccaacaagatcacaccaaatgcatctaattcctctttcccacatgaaagcccttcagatatctggacacagctctcaaatctcccaagtccacttcttctcctgcataaacattcgggggccatcaacatttcttacaggaattgccttaaatcctctccttatctatcccaagctgaggtcccacatctaagctcaattctctggtgcctgctcagggcaggataaagcacaactaacttcctgggataaattccagtagctaatttctttttaagtcttaaatcatgacttgatatttattcccactttatcttttcctactaatttagtcaatggctctaccccacccagatctttctgcactctgtttgctgactagtattgtcatccctttcaagttcacgctatttacttcttattcaaaccgttggcaaaatatggacagattaagggcatgaggatgacatggaatcatttctccctgcttttgggaacattcactgctgaacatccatagaatttctgaaatgggtgaaaacttagcaactttgcatccatctccattccccttttcaaagtagtgagtgacagggcttggacctgaatcaaggtctcctgatagttttgtctgctgctcctctcatagccccacagctgcttatgtgtaactttatgcaccggaacagcccgctcattgaactacctgtgtactggctcattagttactcactaattgctttgcaatttgcaacatttcttatgttcacatttcttaatctaaccatcttcacaggacccttgagacctaggttgtattattatctctgtttcacagatgaagaaacagatcctgagaaaggttccatgacctgccatggagctagaaagtgacagaaccaggatctgcactcagagtctgtcaccccataagtattttctgtctgttgttctgtcttccctagacacatggcctcctattcttaaaaaatctcagtatagctgtcatctttaccccaggagacatcattgtatgacattgttagtgtagtatgggctagcctcctgttatggggtgaactgtgttccccaaaaagacgtgctgaagttctgacttctggtacttataaatgtgatcttatttggaaacagagttgctgcaaatgtaatcaagttaagatggagccatgctggagtagggagggcccttagtctaatatgctggtgtccttataagaagaggacagagagacacacaggaaggttgtgtgatgacaaaggcagagactggagtgatgcagctacagccaaggaacagcaaggactcacagccaccaccagaagctagggagaagcaggggaggattctacccatagtgggggcatggccctgctgagccttggcgtcagacttccaggctccagaatgtgagagaataaatgtccgttgtgtgaagccagccagcccaagaacacgaatacacctcctgtgtacctgtacccagtttcgaaacagagtacaggtcctggagcaggaggaacctatggtacactgggggtatgctgtgtgagccacactgaagggacaccttctccccgctccctgggcctgtctccctagtagccacctagtcattctgaggactttaggctcacttttgtgacaaagcgctttcctgatcccctttcagatgttcctgaaaagatgtctgctcccttctctgtgctcccactggcactgtccaggcagctcttttgcatgccacttcgtttgctttcccctccatctcgccactagagcacaagtcagttgagacgatgcctagacttgatgtgtctgtcccccttgtgctggtctagcgtctagtacctaagaggggcttaacagtaacttgtggatggcttctccttccacctttgtagggactggcgttagctgttattggccaaagggggtttggaagtggtcagaagggtgatgttgagggtatctcctgggccccagggtttgcagttcccttaatgcctattctaagcaagagatgaagactcttgtctgcatctttctcaggccaccaacagtggtgtttatctgttcctagccctatgcacagagtcactcattcatcacatgcaacccaatagggtatcttgggaagctattgtcctctctaaagattttaaaaataagtgaggcctcttaaaagtctccatgaaccaggtatgaattggggatggaactgaggtgtgcatctgatgctgggtgcctagcattttaagtgttttatcccagataatcctcaaaacaaccagaaggccctcagaacaaagaggtggctggggctcagagaagtggaataacatgcctaagggggaggaagctagtgcaggggagaaccaggatcccgtggccgggcatggtggctcacgcctgtaaccccagcacgttgggaggctgaggcaggtgggtcatttgaggtcaggagttcgagatcagcttggccaacatggtgagaccccgtctctactaaaaatacaaaaattagccaggcatgttggtgtgcgcctgtagtcccagctactcgggaggctgaggcaggagaatcacttgaacctgggaggcggaggctgtagtgagctaagatcgtgccacggcactccagcctgggcaacagagtgagactccgtctcaaaaaaaaaaaaaaaaaaaattctgactgcaaatccagaccccgtctctgactcccaggacacagttcatctggcttgccaaaagcagttaccttcataagaagccttgaatcccagggaactgccactgccatcagtctggaagaggagccacatttgatgattggtgctgacaatgagatccgggaccgatgtacctgtcaggctggcaggagagagatatttagaggtgtgctctccaccatgacacccgaatagaatgattgcctgaccgatgacatttaaaggactatccaggatccaggcccgctcgggcaaattctgggccccactgtgtttctgactctggagcccagcagcatgctctccctgtgctgggaagactcatcctgtcttccccttggctgtgggtagaatctcatgggttgaatcacaactttgactctctagccctgacccttgggctcacaagggagatctgtgtccttacttgctcaggggacagggatagttggagccaaatccaatcaagagggtgtctacattcttgcaacttttgatctcttgtgtgacctgtattgcagaaaagaccaccgccacccccacctccttgctgtctttatgtgggtttcccctcacagaaacccatttctccagttggaacccaagccattctttcaatgagacatctccttccattccaggataaggaacaaggcttagagtgtagtcattatctgagggccacattcttattgaagaagagggtttaagcatgggtgtgggggcggggagggggggattcaattcacaatcccaaccccaagcacctacccatgtaagatactgcacttatcaatttcctacccattatctcatttaatggccctgttgccaggaaggtaggggttgtcagcccatagtacaatgagaatatggaagtgcagaatgggcagtggcttctccaaggtcaacctgatacagtggcagagccaggggtcccctgtgcaggctgggatttccagaagaaatccaacctcattcttttgttgagatcagacaaattaccagcacagatggaggcagggggttgtggagtgggcaactgaactaatgagtcctaatctctgcttcacccagggtctcagagcttgggaggctgttgagtcagctgcagagaggtcatcacaccatgggggatatggaagtggagctcggatagagcacatgggatccaacagcctggcctgtgtgacatccctgagcctgggctctgacaagctgagtaaggattgtggccaggccagtgctggctcctgactctggggtgctgatgagcaagggaaaaggctgggacccctgcttttcctctgtttgacccaattacagcaccaggctctgagtccaccattcatttgctgtgggaccttgggcaagtggttgagcctctctgggctttttcactctatgttaaatgaggggattgtatggtatgatcctcaatagccttttcaaaagttctgctattctaaggttctctctatgtcaaagcacattgggattgtgggaggaaagagagctgggatcctagtctcttgggcacaaagagctgaggcaccatatgggtcagtaaactagggcagaaaatgagtgatggggatgcaccaagtgagggggagaggtaagtgtgatggtgaattttatgtgtcaacttgactaggccacagggtacccagctacttggtcaaacattattctgggtgtttctgtgagagtgtgtttgaatgagatgaacactgaaatcgacagactgagtaaagcagattgccctctccaaggtgggtggacctcatccaatcagttgaagggccaaacagaacaaaaagatggaccctcccctgaataagagaattcctcctgtccaattggctttaaactgagacatcagctcacttctggcttttgaacttgaactgtaacatcagctcttcctggatcttgaacctactggcatttggactgcaactccattattgactatcctgggtttctagcttcttaactcacctggaagatcttgggacctgtcagtctcccaaaatcacatgagacaattctttacaacaaattatctatctatttgctgtttgtctgtctatctatctatctatctatctatctatctatctatctatcatctatctgtctatcatctatcaatcatctatcatctatttatcatctatctgtgtatcatctatcatctatcaatcaatcgtctatcatctctctaatatctatctatctatctatctatctatctatctatctatctatcatctatctatctatctctatctcctattgttctgtttctctggagaaccctcactaatacagtgaattaggcatgggggagaatgccctgtgggctcacattccattcctttgtctggagaaatcccaagtcccagccatgtcacctgattcagtgggtaccattggataagatgagtcatgtaactgcctgtatagcatcatctccaggtaggtgtagggaagttgtgaaaaacacccagaaaagaacagcctcaggacaagccagctgttactaaatggccatttttcattcagcattagaaccagaaggagatatcctggagctagccttgttgggaaggagtgtggcatgggacattgtccttggctgaaatcaaaagacatgaacttgagtgctggttctgctatcaaccttctctgaaacctttgggcctcagtctccccatctgttaaaagagaataataacaccagggcttaagcgagataattgatgcaaaagtttccatcccagtgcctgggagcatggtaggtgtttaatgttggtgacactccacctccttcctggaagggagatggatgtggtcagggtgtttgtctctgaagctaagccacatgtcctgagcagaagcatttcctgactttttttttctttttttagacaggatctcactctgtcacccaggctagagtgtagtggcatgctctcagctcactgcagcctcaacctcccaggctcaagctatcctcctgcctcagcctcctgagtagctgggactatacaggcgtgcaccaccacatccagctaatttttgaattttttgtagagatgggttttcaacatgttgcccaggctggttttgacctcctgagctcaagcaatccgtctgccttggcctgccaaagtgctgggattacatcaatacaccaccacgcttggcctttttcctggttttcaagtcaggctattggtggtgggcaaaagagaagctaaatggtccccaagagcacagactcaacatagcagaatcccatgacagcttgatattctcctctcccttgtctggaacatgtcatactggtcttttttggctcaggaagtgtggccactatgtctatatggtcctgattctctgaaaccatccatttcccagggagctctgagcatgcagaaaggttagcaactcatttccattatctctgtctgaggtcaggctgccacggctggatgtggcctggagtaaaaactgtcagggtggcagaatcaaggtctgcatggaagcagccagccagtggaaggctccaggttcatccacaaaacctcgatctcccctgccccctaacagactgctcattctattcacatttcatatgaattcagtgagaaggtgcccagtgctcttttccccttggtcagagtagagagaggtagaaggattattgctgaaactaggaacattgcaggatactgtctttgctgtagtatggtctagggaccaggcaggactccacaaaccccaccccaccaaccccagccaccgtcccaccttccaaacaacatgccccactgcacttacatgtagagaactgtcttctggtccccatcctgaccaccatcaccgaccgtcagggtgtcatagcccctctccaaatcaaactcctcaaaggcgagcttgatcacctagggagggaacacagggttaggagcaggcaggggctgtgaggaagccttccaaagccttgaggggaggaaggattttctgtgttatgtcccaatgctcagagtcactggtgacaccatcctaaacaaactgaccatttctgtcccactttaatgagtgtgaactatttctctccaggccatgcagtctccagggccccctgatgtttctgaagatgttcatagcacatctggccaattctggtggctgtcacagcaaccgggcacatctggccaacagcgagatgattagactctttcttcacgccttaatgcacagaaatccccatgggcttgttggcaacttttcaggccacatgtggaatctcagctctcttgcccccagggacctgcagaagtttctctcgtcttctcctctgactgcttttctccatcctttttgtttatttgttgaataaatgaatgttctcagaaagagatttcaacaagattcccccctcttgttttaatcctgccttccacaaatatttactaagcactccccatatgccaggctgggcggtgggtttccacagtgagcatgacatggtatctgccctcgctaagaaggggagatagaaatgcaaactgataaccacagcactggggtgggatggatgctacagggggctgtgggagcgaagaggagcctatggctcacccagctggagtcaggggcaggtgctactggagatgggggtgtctgaggaaattctgaaggctactgatgaccccatcaggccaaagggggatgcttggagagggagggagggggatgctctgggaaggagtcaggtgcacagggcctgagctatggcagagatggaacattccagaagaaattattcagtgtctgttgctagcagatctacaaactgaacatacctgctagctgcctggctctcggggataatgtgactgggccttcagtgcaagaaggtgacttgggaaggtctggaatttgaaaagttttcctggagtttggttcaaaaggtctcatacctctaccctccaaaattagaatttatgccaggggaggagcagtagagttttaaatagtgggtgacagggacgcataggtgtttgagaaaatgtcagtgtggcagtatgtgtggaactcattggcaggagtgaggatggttgcaggcttttttggtagtgcaggtgaacgatggaagagtagcagtgtggacggagaagagggagggtcctagtgatatttagggctttgagacaggatgcatgtggtgctgaggggagggaaagatccaggataagttgcaggtttctggcttgtgcaattgtttgggtgggggatggtgccattcataaggacaggacacacacaggcactcactcctgatgtctaatctgtatctctttttgtctgtttcagtctggtttcaatctgatgatgatcctcattcccccaacagggagactgaagttgctcctttgctttctgttctacaactcaaggagtatataatttctgtggatattttttcctagttgtggctgacgccttctgcaggtttcctccatccaaatcaaaccgttcagcacccacatcctgccagggaccctgcagagccttaccccaaggtgctttctcaggtatcccagaggcaaactgacactgccctcattcataagcctgggtagtgtctatgcagggcccctctgcagtggcctgagagtcacagaaagatgcatctctggataatagtatctgtgagcacgtcagtgggtctacagatagacacagaagaggaaggaagtgattgcttttgactgggagaaaggttaaaggaggcttcttggaggaaaggaaactcaggctgagtttggaagatgaactggagttcaaccaatggatatggaagggaaagcaacccaggcagagggaaaggcagcggtgtggaacaggatgacttatccagagaggtctaactactgagtagttgtttaagcaaggaggtggtggagggtggcgataggagagaaataggagcagtcagattatgagaggctgccggtaatgctaagaattttgggctttgtcctaaagtcaacggggagttatggaagggttggcagtaaaggcatgacatgagatttttgttctaggagcaggagcattgagggagagttgaaagctcggagtccaattcgcagcaaggtctaggtgaggtgggatgtgagcctgtagcaagttctagatgaggcagggtgtggacctgtagcaaggtctaggtgaagtgggttgtgggcccgtagcaagatctaggtgaggtaggatgtgggcctgtagcaaggtctaggtgaggtgggatgtgggcctgtagcaaggtctaggtgaggtaggatgtgagcctgtagcaaggtctaggtgaggcgggatgtggacctgtagcaaggtctagatgaagtgggatgtgggcctgtagcaatgtctaggtgaggcagggtatggacctatagcaaggtctaggtgaggcgggatgtggacctgtagcaaggtcaaggtgaggcgggatgtaagcctgtagcaaggtctaggtgaggtgggatgtggacctgtagcaaggtctaggtgaagtaggatgtgggcctgcagcaacgtctaggtgaggcggggtgtgagcctgtagcaatcagtgtttggagcgagttattaaagaggagatgggatttgtcaatagtgagtggggattccttggcccttctgggtttcctatccagaatgttccctgttggctaatggcatcatcatgggatcatttcctcaggctgggatctcccacccatctctcacactccacactcctgctttacagaacatttcctggagtctcatttcctagcatgaaacataagaagggcatctctgcacctgctccctgctgactgccctccactgcacagcctgtgtggccacttgaagtcctgggcattcacaccagggcagcctattcatgaccctgacttacgcaggctcttcctgctccctgtcactgccctagaatatttcttctcatctgtgagcctgacttgtctcagttctctctgactaaccttgacaaggggagcagcccctgctcagccccttcctctcgtctgttttagcacttacctgctggactgtgatgggtctgtttacttattcctccactacaccatgaactcctggagggcaggggtcaggcctcactgcctctgtaccagttcctgtcggtgggccaggcccatgccaggggctgaaaaaatgtagactgggagaacaatttccaaagctttcctgcttctctagcatggatggattgctaggctctcagacccctcacagtggttaccatctagaacaaaagttggcaaactttttctgtaaagggacagatggtaaatatttccccctttgtgtgtcatgtgatctgtatcacagatattcagctctattgatgtagcatgaacatagccatacacaatgtgtacatgaatgggtgtggctgtgttccaacaaaactttatttacaaaacaagcaaagagctgtatttggcctgtaggctatagtttgctgatccctggtctaggagattcttcaagacaatcatagtctttgatcatcttctcttatgcgatttcatcactccaagagctgagacctacaatgtgctcaattctgttctgaacactttacacatatcaactcatgagaaatgcagcactgttgtgggaagtcagggacactgaatggagggaccagctggagctgtggcagaggagcataaattgtgaagatttcattttaatatggacatatatcagttcccaaataatacttttataatttcttacgcctgtctttacttcaatctctgaatgtaaattgtgaagatttcattttaatatggacatttatcagttcccaaaattaatacttttataatttcttatgcctgtctttactttaatctcttaatcctgttatctttgtaagctgagagtatacatcacctcaggaccactattgtgttaactgtacaaactgattgtaaaacgtgtgtttgaacaatatgaaatcagtgcaccttgagaaagaaaagaataacagcaattttcatggaacaagggaagacaaccataaggtctgactgcctgcagggttgggcagaatagagccatatttttcttgttgcagagaacctataaatggatgtgcaagtagggaagatattgctaaattcttttcctaacaaggaatattaataattaagaccctgggaaaggaatgcattcctggggggaggtctataaatggccgctctgggagtgtctgtcttatgtggttgagacaaggactgaaataagccctggtctcctgcagtaccctcaggcttattagggtggcgaaaaaaacccaccctggtaaatctgaggtcagaccggttctctgctctcgaaccctgttttctgttgtttaagatgtttatcaagacaatacctgcacagctgaacatagacccttatcagtagttctgaatttgtccttgtcctgtttcctcagaagcatgtgatctttgttctcctttttgccctttgaagcatgtgatcttgtgacctactccctgttcttgcaccccctccccttttgaaatccttaataaaacttgctggctttaaggttcaggtggacagcacggtcctactgttatgtgatgtcatccctggaggcccagctgtaaaattcctctctttgtactctttctctttatttctcagccagctgacacttatggaaaatagaaagaatcgatgtctaaatattaggggcaggttcccccaatacagcacaatagctattttgagtacctccatttcacaaatgggacaggctaggcacagaatttaggcaacttgcctggggtcacacaggcaagtggtagagctgggactcccaccaggcaggcagtcagaggccaggctctttgtcactctgctctactgcctcatgatgttccaacaaggtcacaggcccacaaggtaggaagcatgacttaagcctctgttttctctcacactttccttgagttcttttttctgggtcccagcagggggtcaggaaacagctgctgcatataaaacaccacaaggcaggtagtgtcttctgctggaggaagggcctgggctctgcagggactgaggggcccggctgcatattctcaccatatcagccccttccagccagccctggggcagaggacacggctcacccagccacctccaaaaagggagtgtatgattattacgcctataatgggaaaatattgctttgaaggccagaacccagagctataaaatgattcacatcactggttagagctgccattgatgtgaaccacatttcagagtgccgaccctgatgcaggagctaattacacaagaagactgttcaacatacacaatgctgcagtttcaggacgagcctctagtgcacaatgtactagcactctctttttttcgtttctttttttccttctctgctttggcctttgtttaaagacaggctcctataatgactcattaactaacatgcagatcaatcaagctcacaaagcgcctttcggaggcaggagaaatggcagcacatgaaataggcatgatcaaagaggcacatttgtatacagctcagacacccaatttaaacccattagataaatgaataaacaaacccatcatctaggacataattactgagcacctgccatgtgccaagcccagagctagctgcttcccataagttatcttgcttgcctgacaatttagagtagaatctaaatgcccaggacatggtgctgatggtgagtgctggaggagtgcaaagaggagagagatggaagggggtccatagaggaggtgggtctgggcctggcgggatggagaagggtgtgtgtgggctcagcccaggctacactgtgagaagtgaagggccaaggagagtgggacaggaagaagagcctggctgagtctgcaggggattttacccacagccagagcaggcagtctggacttcatggtcaagtcgatgggaagctataattcagtgtgaagggaggattggaggcagagagaccagtggaggctgatgcagggtccaagagcatgaggagaaattagggggtgtcacagccaccttgtcctgagaatcatgggagatggagtgggaccctggaggacacccactggaggccctggagaacattctccccttgccacgtgctgtccaggattagccaaaagacaggactccaggtgctgccagcatgtgcccaaagcctgcacaagcctgcagaggatctgccagctcagggcagtcttgtgggaagctagagtcccgggagatgtagactgaggctgttttgtttaaggactgctttgctacaacactttcctaactgggctgtctgtctctgcagcccatccttcactctgtaccaaatgctcttagcacctccctatctcctacagcaggggttggaaaactagctctcagaccaaatctgtcctatagcctatttttatatgtggacctgtggactttggagttaagaatgattttttacactttcaatgagtgaaaaaacaaaacctacaacatagaagaatatgcaacagagaccttacatggactttaaagcctaaaatatttatggtctagctctttacagaagaagtttgctgatggcttccctagagcaatggttttcaaactgggctcccaggtaccccagggttccataaaggtactccagggccaacccacaagggtggaagaggagccagaggagggaagcctctgcttaaaccaaaacagctccattttgatctagttcataatttgggatgctgtgaacaccatggatagtgggttacttaatgtcccttcctccatttatttctccctaacagaaccccaactttattgggagtgtggcaatgtatgtatcttgccaatctcagagctaaagatgtctatgtgacagagctctgggcaaggaaacatgggttgaggagtcctcagaccatttcctcatctttctccttgcttttcctggaatacagatgtgaggacagagagggagcaaccttcttgtgatcatgaggatgagagtcatatgaaaagcagcagagggaaaaatacaaggagcatgagacccggagggaaccaccaagccagccctggactttctgcctctggacttttggtatgtggagaaaataaacggtgtgttttttaagcttctgcagaggaattttctgcacctcccagtcaattacgacctaatggctacaggttctgaagacaggtgtttgtcaccgcagaagagtttgccaactcttgaaactgcaggatagagttcagcatcttggcttggaaagtgtgggctttgcaaggcctgcccctgccacttcctggctaggtagaggccctgccacaatgctgtgctccagccttacctcccatatttctcctcagagcatttctttgagcccctgagggctgaccttggcccacccagcctcagtttacaatgttgctgccagtgtaactattagctccatgaaaggaagggaactcacttttcctgggcacagcttgaaccatgattccctccagggtcttgctgaggccctagggaagagctagagaattaactcctggggtgaggaggaggggaggccagtaggaaggctgaagacctgaactcccaggagttcaaggacagaggcctccagcaggtactaagaagggtcagaggttctggaactttggtcactacctgaggtttcattttggtggttctgagagcagtaagcccttggactcattcacttatggattgactgattcatttattcactgattcattcaacagttacacacctgccaagtgccgggctttggaggggcattggcaggcaagataacatggctgctgccaatagagacctctaagtttctagaaagcttcacagaagaccctgagtacatagactacaatacagtgggatgagggctcaaaccagggaagcatggatgggagacaggaggggcacaaaatcctggctagcaagcgggcagggtttgtcttcagcaacagagaaggtgtgtggggataccacatggccacagccagatctgggcgaggggaaatgccagcacatgatttcgagacagctgtaaaagggaaaggaatgaggctttggacttgaggaggctattaaagggtcccccagatgtgaggaggggctgtggaggcacacggcaaacctctgatcgcaggtgtcttgcacagggcctggcacagagagggtgtttgagtaaatgtttgctgaatgaataagtgagtgaacaaatgggccaacgagtatgtccctgacatttgcactagctgccgatcacctgcctggagaattaattctcagttcttcaggtctacaaaggaaacagtgacagtgataatccccaaggagtgaataatcaaaacgctgttatctttgctttgaagttcatataacgagctttcctttccctcttccttccatgccccctccctctccctcccatcctcactctccatctctcttctgtctcgcttttcattcttttctagcaaaggtggattaactatcctgatcaaatcaagtgaggctcatgtgcaaattggatcaaatgttttgtgttcatactgagaagctgcaaaagaaagacagatgtgtgtaggtagggggcatcaaggcaggtctgggtttcagtcctgtctacatctttgtttttccatgaggctgagctgaagggacctaacaagaggaggccctggaggaagaaggcctgaatctcaagcctctgggatgggcagaaccatcccagaggagctcctcctccaacagtcactcacatgttcaaatatcgctgagctgcttctctatgcccagcactgtgctaactgtggaagaaataaacaaagtgctattcctgctttcaggatgctcacgagctatgggggaaatagattctaaatgcaagaaaacaaaaagtgctgtaggaacaggaaggagcaacacatgatgaagttaggaaggcttctcagaagaggggttgtttggactgtctctcaaagggggataggaatttgcctggaggagaagggaaggcacactgggaccagatgtgcccagacaggtcttaaagggccaggtgtgtctgtgaacctgagttcagtgtggctgaagctggggctgcccaaagggagagatggggcagagagaccactgtgtgctttgctggaagaaggaattgcattgttgacagaagtttagctggtcagaaccaccagggtcgtctttaaaaataagttctggtacctaccctagacccactgaatcagatctttggggaaaagagcttgggaatctgtggttttaaagtgtctccaaggcatttctgatgaaatttgggaaaaattattgtaggcagatgttaatgtcagattaatattataaggactgagataacccaaatgcccaaggtgaggtcaacattgcccgaggacatcccagtcgaagggagggcatggaggctgcatgtggagtaggcctgcatcacttgctctgagccttctttcctctgttccttgaatctatgaagtttccaggaggatgcactggggtgtttttatttcccttactcctagtttattgagtacagacatatccttaacttgcctctccaataagactgtaagttcttcctgttcccacagtgcagaggcgcacagcccatagatgctcagttaatgctggtgtcttgatgtaggttcttagccattcccacaccacagcatccctgcttctctctttgggccttctcattgcccttggagggccccagtccctgggacattcctagctccttgccaagcccaggtagcagaggtcctacaagggagatggaattacaggaaggatcctcctgcgtaggtgtcagggatgcatcataatcattccatgactatgaggagagcaaggggacacatgtccctcttacactcccacaagcaaacctttcagctccttctaacaacagcatctttctccccctgctcctcgcaaagggagccctgcattctcaatcccgtggccctctcactccagaatctcccttctgtcaccatccctcttctcctgtaccttcactctctccctctgtgcatattttttcctaagcctactaacatactccagttccaatattttaaacacatgccccaaagtaaccccaaactttctctctatcttatgttccttgccggctactgcccatcctggcctccacagcctcacctcccatccatttgcttcccaccctactgctgtctgttgctgcccctagagcttcactgcaaagtcttcttccaaggccaaagccaatggtctccttctagcacttttccagcaagacatttgtcatcgttgccatgatcagacatgccctagttggaaactcttcctgtgtttgcatcacgattctcctcccgcctctcagattgctccttctctgttctttcactggattttgctctttctcctgtcacgacggtattctcagatccattctgaattttcttattctcttcagtctttccaagaaatgttgtccattccttaagcttctattctcacccacgtgctgagataacacccaaacctctctcttaaactcagatttacccagagtttccatccagtatatccaaatgacattgaatgaaccacagacattccaaatgcactgtttctctcctgacccctgcaaagcatgttcctccatctgtatttcctttttaactctaccactggaccaagccagaaagcactaagtcatcattcatctgttcatggaataaatataggccgagtacctactatgtgcctggaaccacgttggtcacttgggatacaatattgaataagacctctcttcctccctcagctcccacatccaatcagctaccaagtcccactctatctcctaaatctctctcatctgttttcccctccacatttccaaagccttggtggatgtccccatttttcctacttaggtaactgcttcatcctcctaactggtctttctccttccagtatccacctctaaacttctccattgctgctagagtaattttccaaaaactcagatcttcctgctattgctttagttcaggagatagagtgatcctcgtccttccaggctcatcccactgaggtgaagcccagcccctttcatctactctgagatcttgttccatccagcagcacagcccagctatgtaagtgcatgggctttggagctagaaagacggggtttaaatcccagttctgccacttactggctctgtgcttcagctgtttcctaacctttaacctttccatgattcagtttctttatctaccaaataggtatattaaaataaaattcattgtcctattacgagaatgaaataaaatcattcatatagacagcttagcttagagcttgtaatgggacaggcatacaataagagctattattgttgttaacaacagcctaacactgctagccttagcaatctgtgttttgagataaaacccaaacttctgggccaagcatgtgggctcaccatgatctgaatcctgcttacctttctgtccttacctgcatccaggcatgttgaattacttccagttctaaggggctattccaaacctcagtgcctttgcacatttgtcctccctgagatactgatttccaagcctactcatccttcaggaccctgttgacatgtcacttcctttgtgaaaacttcccttatctcccagttagcagctcttccctgagttttcccatagcgctctggacatgcctccatcaggacttacctgcactctttttttttttttcagacctgttcttcactcttacgtgcacactcctcaagggcagaggccatatctacatcaatgaatgaatgaatgctcatctcataaaacatactgtgagcttagagactatgctttttgctgaaggagatgtctgaaggtgagtggataggcagtccttggatacacctgtatctcacctgtaggccagttccatgaacagggttaggcacacagcatccattgtccttgctgtttcccagaagacaacttctattcctcagtcttagactttgagtttccacacttagaccctccttgttgcattgtatgttccctgggtctcctcccgcctggatcaggatagggttctcttcagcctttctgggctccctcagcactacctgaagcccaccaaggccccacagagatattagaaacactgctctgcacactctaagcggtgctctgcagaggtgctatctttagaaactcaggctggtgggatctcttgcaaggcatgtaggggagtgaccatatggaggtcactggtctccacacactgaccaaggctaggccttctgggggtgaatctaattgtttcttagaaaatcctcagactttacttagacttcccccgacacctcaccttcaggttcaaaagaaaatggagataaggattgtaacagtgcccaaggaagagccctctagtcaacaacttaatatgatttcatggtattaagtccttctggcctagcctccaccctcaccccatgtggctgaagtgtcctttcccattaactaggtacatcatgaaataatttaattaaatgtgaatctttctttgtaaaatgttgtgcagaggaaatctgcttccagtgttcccagcactgtggttccaggcacccggaccaaacaattttaaagtgttaggtaaaattttaaaatgacaaaataaaaataaaaataaaaaaagcagctttttccaagttagtgttaaggattgaattataatatgtccccctgaattcacatgttgaatccccaatgtgaatatatttgaagatggggcttttagggaagtaattaaggttaaataaggtcatagggatggggctgtaatccgatggtagtggtgtccttatgggaaggggaggaggcatcaaagagcactctcttcgtgtgtgcacagaggaaaagccatgagaggacacagtgagaaggtggccatttacgagccaggatgagagccctcatcagaaaccgaatttagttgcactttgatcatggacttctagcctccagaatggtgagaaaataaatgtctgttgtctaagctatctagtgggcagtattttgttacagtagcctgagtagactacattagtgtaataaggaatactcaacacagtgaatggaggaatctaaaatgtgattcagaacatgaagacggctttggtcttgagtaccttttaaaaattcggtcaatatagcttcacttttcagcaactcatagaaaagagggaacaggagacaaaattcagggcccagcacaatggtgactgtaatacgatacttctgaaagagttgggttagttaaatctgcacccatagtgtgaaggtgaattagaaatgagcctatctccttctcacctgtcactaccaccctctgggaggatctggaggctgactgtttatcttagaccttgacactgagtagacaagaaaaatgtttccactgagaattcacaacagtaagtcagttttcacatgggtttgcagccttcatattacttgggtggtttgaaacctccatactgagaattttgtgtgaagaggtttctggctggtaatgcccccagcactaggcagaagcagatgcaaaccctctctggaagaacccaccatccacccaggtctcaaagaattaccagagagaaaatttacccttctaaccacataatcaaacaatataaaacaaagaaggaaacatggttctgagtgcaagaggtgagaaaaaacagaatcaaatttgcaaaaacttcagatattgacactaacagacacaaaatataaaataagtatgtttaattatggaaagaattcaagaatgatctaaacataagagtatggagcaagagtttataaaatatgacaatatgactaagaacgtttgaaaaagaatcaaatagggcttcataaagtgcagactacatttgaaattaaaataaatcttcagtgaatggatttaacagaggctggacacagctgaacagagaattagtgaacagaatgaaagagagaaagtatgagagaggttaagaaatactgatgatggagtgagaaagatgaacatatcttgtcagtcttctagaagaagaaaaaagaagcatttgaaaagataatgggtaaacattttcccaagctgatgaaagatacaatccatagattcaagaaacttaattaaacaggatgaatacaaaaaatattcacacctagacacataagggtgaaactacataacattaaagaacaagaaaagacagtaagagcagccagaaggatgctatacaaagcaatgacaataaactgacagcaacagtgaaacccagaagacaccagaacaatatttccatgtgcagagagaatggaactatcaactgataatcaaatgtccagtgaatactagcgttctttcaagaacaagggtaagcagacattttaagacaaagaaaaaattacacattaggttctatgcttacagactgggtgacaggatccgtaccccaacctcagcatcatgcaatatacccatgtaacaaacctgcacatgtacccccgaatctaaaataaaaattgaaattattttttaaaaagacaaacaagaactaatagagtttatcattgacaagaaaataaattttaaagcatgtatttgcactgaaagatattccaaagagaaggactgatatacaagaaggagtggtaaacaaataagtggtcaatatatgagtaaacctaagtggacagtggctttatcaaacaataacaataataacttgagaaaaaattaaggtaacataatatacacacaccatagagtatgaattggaaggaatgattaaagtcatagtgtcctaagatccttggcttttcaggaagaacacaaaattattgtttaatgctaggctttattaagtaggcatattgctatttctagagtattttaggacaaatttcaaagaatagaaatgattgtataattcacaaggtctaaattctttagttaaaagacaaatggtcagaggggatttttgaaaatccagctatacacaaaacacatataaagcacaaggaagtcgaaaagttaacagtaagagaatagaaaatatttattagacaaagaccaagagaaaactgatgcaatggatggagggaaaaagcctttaaggttaaaaacattactacagataaagagagttactacataattatttttgaaacagttcaatttaccaggaagatatataattctgagttttaactttgatgctctaataacacagtctcaaaatacatgaagcaaaaattgacagaactttaaagaataataggcaaatccaccatcataatggaagattttaatattcctccctctgccgttgattgatgaagaagacaagaaaaatcaatgaagatataaaagagacaaacacaattaacaagcttgatgtaatggacatattagaaaacaaaaactgcaaaatgcagggtttttttcaagcctacacagaatctatgtgaaaaatgaccatttctggtcctaaaagcacaaatttcaaatgattcaaatacagatcaatgttccctgaccacaagatttagaaacagtaggaaagagagagttacaaaaatcctttgaaaattaaaaaatacttctaaatagctcatgcttaaaagatgaaacaataatgtaaattaaaaaatattcagaactaaactataacagaaaataaataactgtaaaaatctgtaggaatgtagccaaagtagtcctcagagggaaatttgtagcctttgatgcttaaatcagattgaaaaataatgaacaaagcatcaaaattaagatgctagaaaaagaacaacagaataaactcaagtgcattagaaggaagaaagtaataaagatgagagcagaaactgacaaattagcaaataaatatattaaaaggaatagtaagaaaacaaaaattcattttctggaaagactaacaaatgttaaaccactgccaataccaattaaaaaatgatacatattagaaatgaaaaagggaattgaaacacaacaatggcaggtatcataactataataagagatagtatgtataactttatatccaataaattttaatatttactaaaatggagtcaagaaaaaaaaaacagatgaccaaaataattctctagccattacatgtattaagtctatagtctaaaatcttcaaacaaaggagacaccagaccacgatagttttgctgaaaaattctaccaaactttcaaggcaaaagttatgccaatcttccactaataaccccaaaggatagaaagagaggaaatactcttcaaatcattttctgaggctagcaatatattgacacaaaaattggcaaaggcaatatgaaaaaacaaataacaggccaagctcactaacaaaatagaaacaaattactaaacaatatataggcatgtataaaaatgacaatactaaatgatcaagttatgttaatcttaagaatgcaaggttggtttgacatgagaaaaggcaatatttgctatactaagagaataaaggagaaaaattatatgattgtatcaatagatataggaagatgcttcataaaattcaataaccattcttgataaaagctcttagcaaactacgattaggaagtaaattccctaattctattataaaaggagtatctacaaatgaaaaataagcttcagcaaacatcatacttgatgatgtttgatggtgaagaaataaaaacattctattaaatatcaaacaacgaccataggggtcaccatcataataatgatttgatgttatactgggaggttccaaccagaactctgaggcaagaaaataaaaaagaaaaggtataagaaatggaaagtagaaacaacaccatcatttttttgcagatgatgactatccatgtagaaaagcccaaagaattcagatacatttttacaagatagttgctaatataaaaatcaaagtacaaaatcaattgcatttctaaacaccagcaagaaacaagtagaatgtgcaattttaaaagatttgatttataatagcaacgataaatataagatatttaggagtaaatatattaagaaatacataagatctgtaatggaaaaaattatacaagtttattgcaagccattaaagaaaccctaaacaaatagagagatataccatactcatgaactggaagactcagtatcaaaaagatatcagttcttctccaattaatctgtagttttgataaaattaaaataaagattccaacaggttattttgtggatcttggcaacatacttgtaaaatttataagagagaacaaagggcacaggagaaaaaaactcaacaggaaataaacatgaaaaaatgtatgtagaagtacaaactacatacaataacttagataaatcttaggaacacaattttgagtgaggttgattaagaatacatacatgattacatttatatgaagttcaaacgttagcatactaagcaatgtatttttagggatacacacttaagtgctaagtataaagaaaaacaaaggaataataaacacacaattgaggtaatggttacctctgagggtgtagggaatgaaacaggattggtgaggaacctgcatcactaaggtaacgattttcttttccccttaagctgaacgatggctgcacaggtgtttgttgtattggtgttctttatattttgcttatattttataatctgctttttatccactcgatattaataaaaaaaaaagtaaaagaactgtctgcagagaatctaccatcagtaagttctgggtttgaaaaaccttgtaggccaactgtccccaacctagccctgcccacagaacaccaccccgctccccaagaggcttaccttggaggggttgagtgctgtgatgatccacacacagtgtgcattgttgtcatactgaatggggaaattgggggaggtgatgatgcccgaggggcctcgaaggtgggcatcacacatgcgggctgcagaggagatgaaagacaagcctttgaattaagactaggtccagttccccttcttgcctcccactccccacccagaagacactgcatctgtacagttcccaccctggacataaccttctgcttcctgggtccttcctctacagttcttgggaggcttgaagggaagccgcagtgcctggagcactgtgactgctgttctgtaggcaatgatgaacttctaaggcaggctaagcgacccctctgcatgccccacttacccccacaccccgactccactatgatcatgcaattcctctttgtcaagagggtgtgggctagaacctgtcaggttgacataaagctaggtggatcgcaggcacctatggacacctaagcagcccacgccttactctgctgacctgtctgtttcccaatttgcactccaattctccaaaccagctgagtgctgctgtggacctaatgctgcttaactaggagtctgacctcattccaggttctgcctgcccctcagttccttcctccgtgacccccttggtcctcctgaagaggaatttcaggatatccttgtcaaggccactccattaggtctcagaatgtctatgcccaagagctctgccaaggcccctgactcagctcagtgccaggcccccagagtgatttcactgcttcccaaatccgtctccacactcagcttatccctgaaactggcttttgactggaagcataaagattcaaggtgaattagaagtgttctactcaagtagatataaagtgttatcaatcacagcttaatctaattaagctctttaaaatagcttctaaactaattagattaagtagtgatttataacagttaaggtactacgttgtacctaggtatttgctttctttaaaaatgtgtgcttagttctagccacttcattctttaacgttagtgttcagctattttaataaaaggttctaagagcctgttctcatgctgcccacatggcaatttatcctaattgtaggcaaagtgcctaacagtaaagaaatagtgagcaaactcaacaagcttaactatataaaatgaaagtggtgtcaaacctagtttcctctgatggggccaaatatcctagagctccttgccatgtgtggaaagggccatgataaacctttcccaggacacccttcctaggagggtctgggaagcaggttctgcagctcctagacataatgaatctcttctcatttcatgcactcattcctgcgcttagctcattcattccaacatttattgagtgcctactatgggccaggaaaagtgtggggagaaaaaagtgtctgacatagcccctcctctctgaagggccacagcaagtggagggagcaggtggaaaaacattcaccatcaagcagagcaggtgttgtcagagggttatttgcaaggggcttttgggacaggtctgttacctcctttttgttagctcatcacctcctgggaggagatttcttctcactgtagtcctgcactggaaggatctcctcctccctcatcctgagctcaagaatctgttcaatcaagtttgaacaagtcctgggggaacccccactccattcccccatgtatatctgattgctcctttcattctgtactgagaaacacttagattcctagattgcacttgatacaactgggccctatggcaatgtggcatggttaaagcgaggtcaggttttaaaatttatgaacttagccttctggatctaaatccatttgctggtcgcttaagtctggatgagttagaaaatctgattttgtttcttcatctgtaaaatgggacaaatgataccacctcattgagatatggtgaggatgaaattatatgagatgatggatgtgaaggttcagcccagggcctgggatgtggtcaatattcaacctttgggacaagagataatcagactcccaatgccatgtctattctgtttctctatgcccaggatttctctcaaggctaaggatcctttttctgcctttcctgaagtttctggacataggtttttttcccccacaagtacactcgagactggcaacattactaaacaaattaaaataagacaatcaaagccctgattccgtcccacctttgcaaagaggacctgtggactcagaactctagccctgcagagaatccttacaaagctccaccagcaccatcttacacctcttccggaaagtcagattttgctgcccaaagccctcagcttcagaatcaatttatcttgtacttgtttccaagaattagatggtatatttgcagtctgttgaaacatgctgaaggtaatgagagagaacaggccaaaaaggcagttaccactttaagggcttagaggggtttaattaaaatattacagtctgcagatagcatagagcaccttaaactaggttcaaaatgaagcattagctacttttttcctctgctatctgagcaaagtcaggggttctgtggacagacagacagacatcaccctgagcagccagctccatgggatcccatcaacagatagaaagttcatcacagtgacccagatgggctggcagaatggtaggtgctcaatatctcactaaatgaatgaacatatcattttgtttctctatttgcctttttccctgaaatgctcttctggatcgctttcaggagagacttccctgagatcttccatgcctgagctctgcagctactcccatttttcctctggacattatcatataatgggaacagtatcccaggggaccatagggagctaccacctggacccacagccagttctgacactgaaacaacttggtgccaaagaagagaactgctccgggtgcaagtgcctctggtctcatatcttctctccaaatctgattcccatcctgttccatgctgccttcccttgcttctcctattggcctccctcccaaccctttccacagtcctctggaaccacctcccactaccagttctaaggaaaacaaatcctacttgtagctgcaacatctttcggaacctcctactcccactactgtcctgactgaagcccatcttcccctcctatgccactgcctcctatgcagccctctgtagtcaagatcttgctcccaccctcaagtatttctttcacagttgttttctgaacctccagtagagttcatctttccccactgagacctccactctgttgacagcaatatctcctctctacccatcagctccttcggtcttgtcttctgtccttatgcaaatttgatcacatgggccaccattaggctcattttcttgcttgttccaagtccctttcttcttcctcctttcatcagttgcctagaagacatcagtttggaatgaatctctctacctgccttctccatacctgccaccatacagttgagctttgctgtgaaaaaaatcactagtaggaagatgaatgtctattataaactcctgattactcatctcaaaaaaatcctagctattgcccagtgaccctaccatttatctctattagctcactctctcattctgctcaaagactttttcacatgttctagacattccttgaacatcttcctcttcctcttatctccccttactcttagccgatgactttggctttctctttggagggaacagaagccatatagcaggcgggtcctttgtcccactctctaagaatgcaattctatctgcacgtgtactcaattcctttttccctcctgtttcaatggagagatgtcccttgttttggagggcattgccctcttatgagatctgacaccctgctcttcctccaactcatgatcaaccatgtttatagccacacccagggccttgctatcctgggagccaggaaagtccaactcacagattttaaacccagtcattccattccttcccccactgcctgtgttcccagcagaatgacttgggtctcaatgcaccattgtcctacatcataggcccctctagccttctggctcccacatttcatcccatctattgatcctcgcctgacccctcttccctcactatccagtctggacctcaagaccactcaccaatacctacatcttcctcatcgctctcatatctgcttggtgaaatgcctgctttccatcaattctaccactcaccttttccatctctaatcctgggggctggggggctaccaggagaactgtggtatcacgacagattcatggtttgccatcacaatagaaacttcagcccaagtctatcatttcccatgtcttccttcaccaattccttgcagaaacaagttcaaatattcaacacttggttgagtcactaaccccaatgtttacttttcagttgtgattatacttgacctctctagagtatctgacactactgatctttctctctttgtgaaactcacattctttggcttcagtgacgctttttggcttttctcctacgtttctgaccgaatttcttcttagctttcttcttctccactaactttttaaaagcagttgtttaaatctaggaaagggtacatgggagctttttgcacattaattgcaacttttctgcaagtttaaaatcatatcaaaattaaaagttacccaaaaaaagtggggagtggagggggagttgctctgcatggttccatccaatctattgactccgaaggatgtccaggtacaattttcaagtagaagtaggattcagcctttggagtcagggtttgaaattcaactcaacagatgtagctttgtgcccttgggcaagttggctgcccactctaagcttcagctaaacataaaatatggttattgccactttactcataaagaaattatgaaaaatgcctagtgcaatgctatatacaagtatacataatttaataaataagagctttatcattagcacatataggtaagggactgagggacattctcagggctggagcaatggggcatgtactctagtacaatcagtatgtgtcatccagggaaaataagtggagaggagaagagaggaaagaagagaagagatctgaaaatagaactctggataacaattatgtttaaggagtaaaaccagaaagctgatctaatgaaatccaccaagaagacagccacctgtaattatcatggcatttaattcaccctggtttgtgccatatttctcctgttttactgcccttttacagatgaggaaaaagatccatagtgtttcagtgattttccctgtgccacatggttaataacaaagtcggaactttaacttaggtctctaagtcccaagcttggtattctagccacccaaaggcatatacatatatatgagtttagccacaaaggaaaaataatatatataagttcctgttaattatttactttgtgaatcagtaactgtaagagtttcatctgggcctggtactcagtccctaaactctatcaacaccaatttgtgatcacaagaaatcagagctggttgttaatttggtcctctcactataccagtggtttacagtgttccctggggccccaggggtaccaggactcaaaggctactgaaaatggtgatggaggggagactagaaatcccctgacccaactttaatcagagatgctccacttgtatctgttttatttattagggttctgcaaaaacttatttttgaatattgggctccatatgtaaaataagtctgaaaagctctatatctatggactctgcctgtatctggggctgaacagaattagtttaacagtgtttcacattgccctcaatctcctttgtgtgatgaaaattttctaggagtcaaattagaagcttatttcttctgatgggagggaaagaaaagaaaggcctgtgaacgcctaatttcatatctcaaaatgagggcacagtcccatattgttcattcatttcaatcactgattcattcaggtggtcctcaaacattagctgagaacctattatttgccaggccccatgttttagtagaattaattgtgtgggaaaatgagtatttctaatcaaatcatattttaactgcattaaagaaaaaataataccattattatggtaaaatcctttttagaatgtgatcttttggtaacctgcttgttagtggaacttcttggaatggaaagagttttgttcgttttcattcttaaggtggggttcacctaaactgtcctaaaaatcacagaatagtgattgcgattaattgaaaacaaaatattttaaaataaaaaccttaaaattgccaaaataaaaagacgctttactctaatatctatctcagccctgggccttcagggaagcccaggacatatcatccaagttcaaacccaggagacttagcagtctctctttctccttcacaatggcctataggaggggagaaaaaagagagaagaaggcaggaatattaacctgtgttgagaatgtaccctccaccaccgtcagggctggtcactttctagaaaatgccttgtttaaatttcataatcagtaggcggggaagattttgttttccttgttcacaaatgaaggcctgtggctaaaaaagatgaaggaacccgcccagggccagcaagctaaaaggtgtcagagttgtgatctagatcaaagtccatgtgactcccaaactgtatgattgcaataggattagacaagacagcttctaaaagaacctgcagcaactagaggctgaggtttgctccagggcttgaggaagcttatgtggacagtgcccagcaggttaagctgaatatgtgtgcacgtaagtctcacagacgtactggcatcacttctaaacaaggactgcctcatctagtcctcaaagtaaccccacgaagtaatgttctattatcaccactttttggcaggaaaaaagagattcagagaggtgaagaaactggcccaagggccccagctaaaaatgatgatggttggatttgtaccatgatttcctgttgttttacagtagcaggtgatggaatgagatgaccacgtgaaaaagcccagcccaatgcttagttacaatgcagcagagaactcagacttcagtgggtccaaatcactggagaaaaggatgaacacactttttcagctacaaacttccctcaggtcaaaaccagcccttctccacccttggcatgttcatgtaaacaatcatcatctcttgagaactaagagaacaaccttcctctagtgaaaaggtcttgaggagggaccagatcccaccactgcaaaaggcattgtcatcctggcttctcaaaaggaattctgaaacgacagatgggcagggtcccttggtcctcagacttgataattctatgcctctctgcacagctggtgtctgggctccctggcattggagtggtatgctattcaatgagtcattcattccgtcatccattcaacacctgttactgagtacctgctacatgccacgccccattttaggcagtgaacaaaacagaagtccttgccctatagagctcatgttctactggcatgaggatattttttttcttctagcacttttcaattcataaactgcttacacattcacaactccattcaatctccacattaaacagaagaagggtaggatacatactattagcaacatttggaggtaagaaaggcttagggaaaatgggtgatttgcccaattgctgagagttatgacaagaattcttttttgttgtttgattttttaaaaacatagtagctatgtagaatccttgagataatatagctaaaatcagtgaaaatgcaaagaacattataaactgtagaacatggccacctcaaagttgaatgaggatgtaaggcttatttgaaagatgttatagtgacactcttctagattacttatggactcagttaaaaaacaggatatgggtttcagctccaactctgcccctttctcagtataataatgagatattatttttcctggatcctcttactctgcatgaattttatcttgatgcatatgccaaagagaggcaaagaatctctttcttagatcagaaggatccagcatgtaactttgcagtgggcaacatatcttctcctctaaaggggcactcaaaagagcacctgttggcttttaaagactacctaacagcctagtgcacaggggctctctctgctggttccctgggggatgaggtcaggggcttctctaccacagaagcagctgtagccctgccccaaagcaggaatacacttggctctgttattttaagattatttggggggtaggggctaggccagcccaggcttggctcatgtgacacctggggatgtggtggcagggccctggggaacaaaacacccagatagggggttagaagcatgtcatcactacataggtaaaaacactcttgcagaagtgacaagtctgtctgttgcaatatggggaaagaaacagggttcaagatgcatgtgtgttgtaacagagggattcaaggtgactgtataaaaggtgacttcctttcctatctaggtgtggttcagtatccattcaatgaggtagcaagctgtttcttacgtgcctcacccattagactgtaaggtccatgcagggcaagcaccataatgcttatcttccccatctctgtatctcctgatcctagcgcaggccttgatactgagaaagggctggataagtatgcttattggtaaataagtgcagggagtgaggggggaggggagccagtctgcttgagagcctgggcctcaggtgctgggagctgggcttcagcctccaggctcagcccaactctctggccagcctcccttccccagggcaccctcacctcggcagactggcctgtggtcgctccaggccgcaaacatgtcgctcactttcatacaggtgatccgcttggacccttgcaggtcatagccctcgttgcaggtgaactggacgctggatcctaacctgggagacaaagtgtgtctgtgagctccatccctgggcctgccaagccccgccccaagtccttcctggttccacaaagaagccgcacatgttatttttccttctggcccttaatctctgctccactgttttatcactaaaaatctccattggaaggaacatctgctcttcatcttcttttttcggactgtttaatggttttaggattgagttaaaaggtgactttgtgagcaaaacagcgatcctctgagataagcaccagttagggcagctaagcgtgggtggatgatacccataaactttaaggaaaatggtctcctagattattgcaggcgcgagttgccttctggcgtgtcattactgagatggcagccctttgtaccctgggtacataggttttctggataacactggcagtctacagttctctccccccactaaagcatgggcactatgccaaggactgaaccaggagagaatgtcaaagccatagctcttctccaggaagtgtctgttcctatatccatgccatcctctccatttccacctgcaggaaggccagcccctgtcttcctcccagccaggccaccccacccttcttgcaatcagaaaattcccaaatagatcttacctgaaatccgagcctagtcttttgcccctttcgggtatgccagggtctggacacatattatgtccttgggacacaccaacctgagttactacaaggcaaaaaaaaaaaaaaaaaaaaaaacagcacacacagagatggacagtcacagggaggcaccagctggggcaatgtctcagggtgggaggtggaggcagagacagaatgaggccctgctttgttggggctgtgtggggtggccggagtctactggcctggggtttcttggatgtgcaagataggaggctgcttttgacaaattcctttgtgagcaaagtcatcacgagtgtgtgggctcagagacaggccctccatgccaaccaccacctgcttccctcgtcccacaccagcagccagaagtggaccatccacagcccctggtgacctccccccaccacgcctatgcttcagatctggggtggagactctagatgaaatgagccccccacctcagccccagatggagaaatgactcaaagaaagttaaataaaaggtgggtgcatgatcagaaacggtaaagaatgtaagagaaagctgcagtcaaagttcaaagctgggacttcagctcaaacacagacatttcttctgagaaacctcttcccatcagatacttctcgagccagagtaagcagtcaccagagcatcccctacccagtgccacccatcaagggcaccgggcagagatggcacctgtgatggttctggtaggtggtgcaatgctctgacacttgccagcgccagagtcctatttacaaaaaccatatgcacagttgtcttggctagaggagaagcttggtcagggggcagcggatacacacacagtagggagggtaggcaaccctttggcccctgcctgttccttttcgtcgggatgctggtactgaggaggctggattcctggctttgaggatgaccaggagctggagccaggcacacagcctggtcggaggagttccactcaaagcctcaccaatcccatgaccccaacagcaacctctagacaagggttccagggcatctggacagcattcggcattttccaactttgcgcatgtccctcccatcccattcaatgtcccataaggtgaacaaagcactccattactcactcacccacttgctcacataggtacacaacaagcattcattgagcacctactgtgtacaaggctttatttggataccatggaaatgcgaaaggtagtcagataagaccactgtcctcaaggagtttccagttgagtgaggacataaaccacggaagcggactgtgggaccacagtggggagggatgaaggatgcacccgcatgtgaggctgcctggaagaggtggcatcgaacatggaccttctgagctaataggatttagacacacggcaacagagatgacaaagatagacaggcacgaggagtgaggtggaaacctggaaagagaatgcgtgttatgcagtgtgaccagagtaggagggaaggtgaagagtgacaaggaagagtggatggtgaggtttcagagatcagacttttacggggtttgagtctgatcctgaaaatgatggggagccgctggagagttctggtggggagaaggcgtggtgagacccgctggctcaaaggtgggccagttacctagagatgagttaggaaattttgtgattattcaggctgaggacaacaagagcctggagtgaggctagacatgagacagcaggaatggatgtggcaaagaaagaatccctgggactcacaggggacctagggcatgaggagaaggagcagggcatttccaggatttccagggcctgggtacctgtgaggatgcaggtggtttcatagaagtaaggaaggtggggagctcgttttagactcactgagggagtctacagttagaggcctgaagtagaccgtgtttaaacctccaggtagcccaggctatggctggccatggaacctgaggatttggacagactgtgtgctcaagccagacacaggtatcctcttggttgtgtgcagtgcacgttcaagccagttacccctacccctacttgtctcttacgcccatccccttccttgccaagcctttacctccaaagctttcacatcctgagccgttcccaccagtccagacacctcaggctgggaaagtaagatggaagtgccattcccgaagcagaggaagctcctgcttcctggaagcctcagttttttgcaagtaatggaacggagataactagggggtcctctaaggcacccagaaggtgggaaggaggaggaagcctgagctgtatttgctgccttatctgtggtaagccaggtccccctagagcttcacagtgatccgtccctactgcagacttcccagctaagcacccaccttctttagattctgtctagtcaaccctgtgacccacgagtcatacccatcccaaagtctctgctgaccatttcatgggaaccacacagcccccttgcagcacgtgaagaacatatggcggttccctttccccttctcttgccctctcattcagtattgacatcacccaggaagcagaacgaacagaagtctgccccatcaggacggggctggactcaagaggcgagaccatggcaaagcccacccgccaagccacaagcccctgacagacagagcagaccctaccgcctcccctttcctcagccagccccaggtgaaacccaggcaccatccagaaagtcacaaacccaacggtgacgcggcttatacccagccagtgcccccttccagggaggactgagcaggggatggtggtcccacgaggatcttcaagcttccccaggaaacaagcaaacttaaatctcagcgatcagtttactgtctgaattatggaggcaagaagtgtttctccctttcttttttttttttttaattccagtcttctctgcctactcaaaaccagctgcttgtgtttacagcattgctttcctgttggctactgagggacaggaatggggagtaatccttactctactctgggagggccactatggcaagggagaagccgcaatgtgctcaggaaggcaccaccttctacccaacgcagggagtcacaggtgggtgggtggtcagaactgatggcaaggtagagagttgggtccactctccccatgaacttcagggcagctgtccacagggaatttgggcagaacacaggaggccagccacctgaagacatgtggctacctgggtctgaggcagctggagtcacacacccattctttctgaggaactcttagaatggaggctaatatcttctcaatagagatatatatatttattttgcaaagagcatttgcattctttcattagaacagggtttctctttatcttcctgagggagtttttggcatcttcttagtcggcttaatgaaaaccctgcatcctgtctccagaaaaatgcacccagagcatcacatgtacttttttggctagtccatgggcctcctgaagtcctaggtcaacaagacccatcttagatctggcaacactcttgggaggaaggcagggtaggattttgcatccccattctacagatgtgaaaactgaaacattagtgtctggggtaacatgctccctgaggacacagttgggataaatatttgatctcccaagtcagggccatttccttaagtttgcctgtggctccagggcaaactgtgaaattaaactgtgcctgcctcagttcattgggtctcctgtggctacagaaagaaaaagcctgtgagggtcagggccatggcttgagccctctgcaggttcctggcctgaccctgggctctcctagcaccctgtcctttcccctaaacccccagtcaagcacagaagaaggctcttctggtgccctctgccatccagtccctgagggtggtgactggagatgccagttcctggctgtatccaacagcctgtggcaactgtctccactcagacaacttcaaagaccacagacaatccccaacccaggctcggttcagtcggagcctgagaccaaagtgcctcttctcctgatgttctcccggccacacacatcggcacagagctcgaaaaccaccggtgccactctatgcccttctctcctcaataagtacttctagcatctccaggaaagtgagcacatggaggtgagatggaaggggaggaatggggagggtgggaggagcaagtcagggacaggaagacaagcagggagagaagaggcgggagcagaaggatgagaagaacgatggagcagaaagtggcaagaggagaaaaagtgaagggagagaggaccagagatgcaggagaagggcaaagggagggaaggagaaggaaaaccaggtcagtcatttggaggaccaaggaaggctccctaccactcggcccagaaggaaagtggaaggtttctggaaaaaaacctcccctgcttttaagcccagtcttgtggaggtgcccagaaccttccccagcccttcctgggcttcagctcaaaagccccttagcacaggccctgatcaggtgtttctgggacccacattccagaccattccccagaactagacccctattaaccttacaaacactggtagcaggaacatgttctgaaagatgtcatcctccccatgcccaagaagagagcccccagtgcctccccattgacccgaggcaggacccacccccacacttccccagtcctctctttgctcagccaggtccaggggcccttggaggaggttactaggcattcccctgcctccctttcccaatctggccttgggagctggaactggggccctacagcccccaagatcccagcccaaggttactgactcctaaaagaggagctgaaggaggactgtcttagcaggtggaagtgattcaaaaggaaaataaagagagaaatgtagcagtaatgactccctggactgcagttcaaatgggaagtgagggagaaagaggacaaggaggaaaatgggaagaggaggaggagaaggcaaagggcaggccccagggctgctctctggccgttgggtcagtgtgtccaagcgcagagcccaggatggaggaagcagggttgaaggaaagtcattccagcatcatctggcttccccacggtttagtgcctgcacgtgtgacctcaagcaagaggcccggcaggcgggctggcgggcggacacttacacacagacgtcttctggctgttgtctttgctgggcatcagcttcacacctcgagacttcaactcaatttgcttcttgactagagaggaggtaagaggaaaaacaatgtgagttgttgcctgtgaccagggataagggtccctctagaaggattcccccttgtgccttggaacattccatggtgggtcaaagccaggaacttctgggctgggacattccaagggtagtggtcaagggcaataggacctcagacatgaaggaaaagttactatcaaggctagccctctgagggaggccaaaaatgtggtctcctactgggtgggctctgagaggctctgggactcccccggtggcctctcacagatgtctgagatttcaccagacctactgaattcaacctgctcctcagcaaacttttcatgagcgtcgacgtgtgcagccttgcagcccacctctgcttctccacagctttttctctacctcagttctgagtcagccctgacagggtatggtagatcagaatatgggcccaaattgtcactactcattgtattctcaccatttgcaatgtgattttttagctccctccattacagaggtggagtacattcccccactccttgactttgggtttggccttgtgacttgctttggccatgggaaatttggaggccttgatgtgttcaaaggcataaaagcacttgccagattaggcttggcctcttgcatctctgccatcattgtgagacaacatagctgctcccaggaggataagagacacatgggggaagagggaattagccaagccaagcccagcctacataagccaacctcttacaggcaggggaagctgaatcctggaggtcactgggagatggggcctgactcaagtgggtgcctgatggatcagatctggctttgaccctgtcactaagtccagcctagtcctcagttcatcagaactttgccaaatagcacacaaaaggtgccagagccagaactccataattccaaaggccattcctctgtacccatcagccgcctttggtctgaccacccctgttacccaaggcattctcttggcctctaacagcttcaccctgtctctggttatatgccttggagcagctgtttaatcccagctacccacggtgccatcttccagctggccccgcctgctgacttagccctgctcagattgatacccaggagtggtgacaacaactgtaactgggcacttcatacgtgccaggtccagggtgctttacaagttctttacttaaatcagcgtccttgactcctctttctcaaacccacacacaatccatcagaaaatccttccaaatatatcccaaaggcaaccacttctcacaacttccattgtctatcatcctgattcaagtctgagatacctttcccctcatgactgtggcctcccattctccacccttgtccctatatagtctgtccttagcacaagaaccagagggatcctattaaaacataagtcaaaccatattacatctctgctcaaagctcatcagtggcaacccatgtcttctagagtaaaagtccttaagatggcctgcaagaccaatctgttctccccatgacctctctgactctgtatttggcctcgattgctcttctccagcctcatgggcctctctgatgtgcctacaatatgccaggcatgcttctgcttcagcctgccaattccccaaaaggcctttcctcaggtatctctacgacttgctccccttttcccttaagtgtttgtgcaaacaccatttcttcactgaggccttccctgaccactccattaaaatgacacctgcaaccccagctctccctgcctccttcccaacgttatcttcccaatgttctaacatactataccatttatgtagttatttttgtcactccacattgcaatgtaagctctacaaaggcagggatttttattcatgggtgtatcctcaacgcctagaatcatttcatttggtccttatactttcaacaaccttgactggtagttattatacctactcaatagataatcaaatcagggttcaaagtggtttaggtgacttgctgtaagtcacacagccaggaaacagctgtgttcttcactgagcctcagcctcttttcttgtgatctgcacccaaagcaatctcagggaaactgtaaaccttctccaggatctgctcccaagctcaggctctgaaaactcaggtatttgctctggacttgaggtaacaggccaatccccaaatcaaagctcacagtaatcagatatgcaaggaaggctgcctcccagtcccccaactctggctacatgaaaaagttccccaagggtttgttccctggcaggcaagtcactgtgtaatctgaatgcctgataaaattcagttattaccacggagtcatagcctcccaacatgcattcaaaccgtttttataaatgtgcattactctccatgtgtatccagcaggaaaatttccaatgaacactaacatggacacacgatcaaacagagggcattagtagggaaacatacattattcaagcctagctaatacagtgcggcagggggatagccctctgattcactatccctgggagaacaggagcagttccagcaccacaacaacaatttgagcctgatagccctggtaccccagcatcagggcagcagtgggtgaggggtctctatgacccggtgcagcccatttgtggtcaggtctgtggagatggctcagggcacctggccaagtgggaggtgaagaaagagtcttcatcgtctccttgtctctggctctagtgttgctagaggaaggggaatgaggaaggggaccagagcaccacagaggccattcccaggggcaaagctgcttggattttccatgtaggggctgatgtgggcactgtgagatatgtgtggccatgaggggaggcgatgctaagagggagcctccccttcctctcttctcacggttgcattgaggaaaagtctcctgctccttgcctctctcaagggcccagaaagaatccttctgatttctgtgtccaccctctccactcattcctccgcaaggaaagactgcctaacctaatggatctgtgcttaatattcattgggctgcttctagtaatggatgatgtcatcatgcaacgcaagcttgagctaacttctgttcttcctcttttacttcctgctacttagcataggatggagtttgtcaaggtgatgagaactgagtgagaaggaacctgaaaagctgcagggagctccataatgtacatatgaacttggtgattaccgctttgagctaggtctgagaggttatatcaccagtgttgcctgtagccaccacatggtcatcggatgcatgctagaatccacaggtagagtctttgtcctcatcatgttagcgcagggaaatacaggggtcacagctctttgggcaagggttctgcataccaacaacacaaactctacaaaatgtatattcaggcccagctgattgatggtagaacctacagttggcacacaccatatgggagctgattgatgggtcatgtaagatccttcactgaggggtaagctctaggcaagatccacatcaccaggaacattagcatttttttttagattaaatttacttttatttacagtctcttcaaatgactttcctttttttattattatacttaaagttcagggtacatgtgcacaacgtgcagttttgttacatatatatacatgtgtcatgtcggtgtgctgcacccattaactcgtcatttaacattaggtatatctggaggagccaaggtggccgaataggaacagctccagtctacagctcccagcgtgagcgacgcagaagaagggtgatttctgcatttccatctgaggtactgggttcatctcactaggaagtgctagacagtgggcgcaggacagtgggtgcagcgcaccgtgcatgagccaaagcagggtgaggcattgcctcactcgggaagtgcaagggatcagggagttccctttcatggtcaaggaaaggggtgacagacggcacgtggaaaatcgggtcactcccacccgaatactgcgcttttccaacgggcttaggaaatggcacaccaggagattatattccgcacctagctcggagggtcctacgcccacggagtgtcgctgattgctagcacagcagtctgagatcaaactgcaaggcagcagcaaggcggggggaggggcgcccgccattgcccaggcttcagtaggtaaacaaagcagctgggaagctcgaactgggtggagtgcaccactgctcaaggaggcctgcctgcctctgtaggctccacctctgggggcagggcacagacaaacaaaaagacagcagtaacctctgcagacttaaatgcccccatctgacagctttgaagagagcagtggttctcccagcatgcagctggagatctgagaatgggcagactgcctcctcaagtgggtccctgacccttgacccccgagcagcctaactgggaggcaccccccagtaggggcagactgacacctcacacggccgggtactcctctgagacaaaacttccagaggaataatcagacagcagcattcgtggttcacgaaaatctgctgttctgcagacaccgctgctgatacccaggcaaacagggtctggagtggacctctagcaaactccaacagacttgcagctgagggtcctgtctgttagaaggaaaactaacaaacagaaaggacatccacaccaaaaacctatctgtacatcaccatcatcaaagaccaaaagtagataaaaccacaaagatggggaaaaaacagagcagaaaaactggaaactctaaaaagcagagcgcctctcctcctccaaaggaacgcagttcctcaccagcaacggaacaaagctggatggagaatgactttgacgaattgagagaagaagccttcagatgatcaaactactctgagctacaagaggaaattcaaaccaaaggcaaagaagttgaaaactttgaaaaaaatttagaagaatgtataactagaataaccaatacagagaagtgcttaaaggagctgatggagctgaaagccaaggctcgagaactacgtgaagagtgcagaagcctcaggagctgaagtgatcaactggaagaaagggtatcagtgatggaagatcaaatgaatgaaatgaagtgagaagggaagtttagagaaaaaagaataaaaagaaacgaacaaagattccaagaaatatgggactatgtgaaaagaccaaatctacgtctgattggtgtacctgaaagtgacggggagaatggaaccaagttggaaaacaccctgcaggatactatccaggagaacttctccaatctagcaaggcaggccaacgttcagattcaggaaatacagagaacgccacaaagatactcctcgagaagagcaactctaagacacataattgtcagattcaccaaagttgaaatgaaggaaaaaatgttaagggcagccagagagaaaggttaggttacccacaaagggaagcccatcagactaacagcggatttctcggcagaaactctacaagtcagaagaaattgggggccaatattcaacattcttaaagaaaagaattttcaacccagaatttcatatccagccaaactaagcttcataagtgaaggagaaataaaatcccttacaaacaagcaaatgctgagagattttgtcaccaccaggcctgccctaaaagagctcctgaaggaagcactaaacatggaaaggaacaaatggtaccagctgctgcaaaatcatgccaaaatgtaaagaccatcgagactaggaagaaactgcatcaactaacgagcaaaataaccagctaacatcatcatgacaggatcaaattcacacataacaatattaaccttaaatgtaaatggactaaatgctccaattaaaagacatcgactggtaaattggataaagagtcaagacccatcagtgtgctgtattcaggaaacccatctcacgtgcagagacacacataggctcaaaataaaaggatggaggaagatctaccaagcaaatggaaaacaaaaaaaggcaggggttgcaatcctagtctctgataatacagactttaaaccaataaagatcaaaagagacaaagaaggccattacataatggtaaagggatcaattcaacaagaagagctaactatcttaaatatatatgcacccaatacaggagcacccgggttcataaagcaagtcctgagtgacctacaaagagacttagactcccacacaataataatgggagactttaacaccccactgtcaatattagacagatcaacgagacagaaagttaacaaggatacccaggaattgaactcagctctgcaccaagtggacctaatagacatctacagaactctccaccccaaatcaacagaatatacattcttttcagcaccacaccataactattccaaaattgaccacatagttggaagtaaagcactcctcagcaaatgtaaaagaacagaaattataacaaactgtctctcagaacacagtgcaatcaaactagaactcaggattcagaaacggactcaaaaccgctcaactacgtggaaactgaacaacctgcactgggtacataacgaactgaaggcagaaataaagatgttctttgaaaccaaggagaacaaagacacaacataccagaatctctgggacacattcaaagcagtgtgtagagggaaatttatagcactaaatgcccacaagagaaagcaggaaagatccaaaattgacaccctagcatcacaattaagagaactagagaagcaagagcaaacatattcaaaagctagcagaaggcaagaaataactaaaatcagagcagaactgtaggaaatagagacacaaaaaacccttcaaaaaattaatgaatccaggagctggttttttgaaaggatcaacaaaattgatagaccgctagcaagactaataaagaagaaaagagagaagaatcaaacagacacaataaaaaatgataaaggggatatcaccactgatcccacagaaatacaaactaccatcagagaatactacaaacatttctacgcaaataaactagaaaatctagaagaaatggataaattcctagacacatacaccctcccaagactaaaccaggaagaagtcgaatctctgaatagaccaataacaggatctgaaattgtggcaataatcaatagcttaccaaccaaaaagagtccaggaccagatggattcacagccgaattctaccagaggtacaaggaggaactggtaccattccttctgaaactattccaatcaatagaaaaagagggaatcctccctaactcattttatgaggccgcctcatacctgataccaaagccgggcagagacacaatcaaaaaagagaattttagaccaatatccttgatgaacattgatgcaaaaatcctcaataaaatactggcaaacagaatccagcagcacatcaaaaagcttatccaccatgatcaaatgagcttcatccctgggatgcaaggctggttcaatatacgcaaatcaataaatgtaatccagcatataaacagagccaaagacaaaaaccacatgattatctcaataggggcagaaaaggcctttgacaaaattcaacaacccttcatgctaaaaactctcaataaattaggtattgatgggacgtatctcaaaataataagagctatctatgacaaacccacagccaatatcatactgaatgggcaaaaactggaagcattccctttgaaaactggcacaagacagggatgccctctctcaccactcctattcaacatactgttggaagttctggccagggcaatcaggcaggagaaggaaataaagggtattcaattaggaaaagaggaagtcaaattgtccctgtttgcagatgacatgattgtatatctagaaaaccccattgtctcagcccaaaatctccttaagctgataaggaacttcagcagtctcaggatacaaaatcaatgtacaaaaatcacaagcattcttatacactaataacagacaaacagagagccaaatcatgagtgaactcccattcacaattgcttcaaagagaataaaatacctaggaatccaacttacaagggatgtgaaggaactcttcaaggagaactacaaaccactgctcaatgaaataaaagaggatacaaccaaatggaagaacattccatgctcatgggtaggaagaatcaatatcgtgaaaatggccatactgcccaaggtaatttatagactcaatgccatccccatgaagctaccaatgcctttcttcacagaattggaaaaaactactttaaagttcatatggaaccaaaaaagagcccgcatcgccaaatcaatcctaagccaaaagaacaaagctggaggcatcacgctacctgacttcaaactacactacaaggctacagtaaccaaaacagcatggtactggtaccaaaacagagatatagatcaatggaacagaacagagccctcagaaataacgccgcatatctacaactatctgatcttcgacaaacctgagaaaaacaagcaatggggaaaggattccctatttaataaatggtgctgggaaaactggctagccatatgtagaaagctgaaactggatcacttccttacaccttatacaaaaatcaatccaagatggattaaagacttaaacgttagacctaaaaccataaaaaccctagaagaaaacctaggcattaccattcaggacataggcatgggcaaggacttcatgtctaaaacaccaaaagcaatggcaacaaaagacaaaattgacaaatgggatctaattaaactaaagagcttctgcacagcaaaacaaactaccatcagagtgaacaggcaacctacaaaatgggagaaaattttcgcaacctactcatctgacaaagggctaatatccagaatctacaatgaactcaaacaaatttacaagaaaaaaacaaacaaccccatcaaaaagtgggcaaaggacatgaacagacacttctcaaaagaagacatttatgcagccaaaaaacacatgaaaaactgctcaccatcactggccatcagagaaatgcaaatcaaaaccacaatgagataccatctcacaccagttagaatggcgatcattaaaaagtcaggaaacaacaggtgctggagaggatgtggagaaataggaagacttttacactgttggtgggactgtaaactagttcaaccattgtggaagtcagtgtggcgattcctcagggatctagaactagaaataccatttgacccagccatcccattactgggtatatacccaaaggactataaatcatgctgctataaagacacatgcacatgtatgtttattgcggcattattcacaatagcaaagacttggaaccaacccaagtgtccaacaatgatagactggattaagaaaatgtggcacatatacaccatggaatactatgcagccataaaaaatgatgagttcatgtcctttgtagggacatggatgaaattggaaaccatcattctcagtaaactatcgcaagaacaaaaaaccaaacactgcgtattctcactcatagtggggaactgaacaatgagatcacatggacacaggaaggggaacatcacactctggggactgttgtggggtgggggtaggggggagggatggcattgggagatataactaatgctagatgacgagttagtgggtgcagcacaccagcatggcacatgtatacatatgtaactaacctgcacaatgtgtacatgtaccctaaaacttaaagtataataataataaaataaattaaaacaaaacaaaacaaaacaaaaaaaacaaacaaaaatacatttcaaaaaaaaaaaggacttctctgcattggttattctagttagccatttgtctaatcttttttcaaggtttttaacttctttgccatgggttcgaacttcatcctttagctcatcatagtttaatcatctgaagccttcttctcttaactcgtcaaagtcattctctgtccagcttcgttccgttgctggtgaggagctgtgttcctttggaggaggagaggagctctgatttttagaattttcagtttttctgctctgttttttccccatctttgtggttttatctacctttggtctttgatgatggtgacatacagatggggttttggtgtggatgtcctttctgtttgttagttttccttctaacagtcaggaccctcagctgcaggtgtgttggtgtttgccggaggtccactccagaccctgtttgcctgggtatcagcagcgaagcctgcagaacagcagatattggtgaacagcaaatgttgctgcctgatcgttcgtctggaagttttgtctcagaggagtacccggctgtgtgaggtgtcagtctgcccctactggggggtgcctcccagttaggctactcgggggtcaggttcccacttgaggaggcagtctgcccgctctcagatcttgagctgcgtgctgggagaaccactactctcttcaaagctgtcagacagggacatttaagtctgcagaagtttctgctgccttttgtttggctataccctgtccccaaaggtggaatctacagaggcagaccagcatcctggagttgtggtgggcttcacccagttcgagcttcccagccgctttgtttacctactcaagcctcagcaatggtgggcacccctcccctagcctcgctgccaccttgcagtttgatctcagactgctgtgctagcaatgagcgaggctccgtgggtgtaggaccctctgagccatgcgtgggatataatctcctggtgtgccatttgctaagactgtcggaaaagcacattattagggtgggagtgacccgattttccaggtgccgtgcatcacccctttccttggctaggaaagcgaattccccaaccccttgcacttcctgggtgaggccatgcctcgccctgcttcggctcaggctcagtgcactgcatccactgtcctgcacccactctccgacaatccccagtgagatgcatccagtacctcagttggaaatgcagaaatcattcatcttctgcgtcgctcacgctgggagctgtagactggagctgttcctattcggccatcttggctccacctccagaatattagcattaagacatcacttccagatgctggggtctcagtttttgagcaatcccagggaagcagtcacaccctgagttatatatagccatcttgtttttttaacagtctgctcaggtgggtggggtgatgagtgatcatggaatgtgcagcaccatgggaaatcagccatgaaataagctcattgaagagctaactcaacagactgggacagaccaggttgtgagagtcagagaacaaaggcaggtctccaaaactccagagtgcactaccagcagacccagtcagaaaagaaggtcaaaacaagaagatgaacaacatagaaagaacatagagaatttctgggatatattcattcatgttgtttgtacatggattttttttcatggagcacccactagccttgtcccaatgatattatactgaaccacttgtctgtaaaaagaagttttttactatcaatgcagtggaggtaaaatggaacctggggctggctcaatggtctggctacaatttaatgcacacccccgatagtatgcttaatattcactgggctgcttctcgtactgtgcccttacccatgcatacatgcacatttctgcgtataacaagcacactcacaagtacatattcaagcacatgtaaacacatggatacaaatattcacatacaaaaaagaagtcatacacatcatacatatattctgtgcatggttttcactgtatgtgaacaaagtcaggactcccaagggaaaagtgctggctgtaactggttgatggaaatcttactaggtacattcatctcctccgaatgataatgactacaggagactgccaggctgctccattcatcctttatattctggttaattacaagacattttcccgctgttgtaaaggttagcgggacacatggtacacatttagctagaagaatctggcaatacaaatgtctctctagtctgcagcatgacttactgggctgagctagtgggagacaaggacctgttaggagaggagagagcaaagggaggcctaacctgtctccaaggctctgggagtcaagaagtggagggaatctgcatcttcttttcttcccaatggattcagacttccctctatgagggtgagcccctccaataaactagatcattccccttgccctgccacttgccagtcttgctggctgaaccatcttttcctttcctgccactactccttctccaaatccaatttgctcagccttatacaatttctccaatgtgtatccttctttcaatgttctaagacactcctacctatactcatccttttttgctagagttttctttgcagattcatcccctccagcccatcttttaaaaagttgcagggggtgatctttcaaaaactgaaatctgaccttgcctttttcctacttgaaaaattgttgggtatacatcctgcattctgcccctcccttgtagctgagggctgccttgccatttagccacctaccctgcagaaatgctttcattacccacagtcttttgccagatgaagccagggtttggcacactggttcctcacctcactcagaattatcccaaagatggacaatgcagtgcacatgcttgagacctaatgcttcaaggtacagaccttctagcaggtgctgtagccattactatgatgccaaagggaagaacagtgattcctgaacagagatagggaagcctcaaagtaacagaagatgatgtgtctgttgcgggtcaattgacttacaagataaatgttggcaccagatttgatcaggatgttgccaacacacaaatgaagagggtggggtggcaccaccattgctactgtactggcatgctccatcaccatggaaggcttggtagagattagcaaaggtgttaatccagtggaaaccaggaaaggtgtgatgttatgtgctgatactgtaattaccaaacttaagaagcagcctaaacctgtgacaactcctgaagagatttctccatttacacaatgtctgcaaatggagacaaacaaatcagcaatatcatttctgatgtaatcacaaatgttggaagggtgtcatcacagtaaaggacagaaaaatactgaatgaattagacaacagagattgaccaagattacatctcttcctacttgaataacatatgagaagtccagaaaggagaattctaggatgcttgggatttccagtaagcagttaattgtacccaccttaaaattgccaatgtccactgaaagtctttggtcataattgctgaagatgctctcagtatgatcatttaaaataggataaaagttggcatttgggctacagtagtcaaaactccaggctttggtgacacagaaagaccaaacaaagctattgctataatggcatggtgtttggaagagagcttgaccctaaagcttgaagatgttcagtttcatgacttaggaaaagttggagcagtcattgtgaccaaagatgatgccatgttcttggaaggaaaaggtgacaagactcaaactgagaaaaatatgcaagaaataattgagcagttagatgttactattagtgtctatgaaaaaggaaaactagaagaacatccggcaaaattttggatgcaatagctgtgctgaaggttgatgggaaaaatgatgtggaagagaatgaaaaaaacagagtcagatacactgaatgttacaggagttacaattgaaaaagatatcatttgggtgttttgccttggtacatttcatccttagattcactgctccagctaatgaagagtaaaaagttagtatagaaataattaaaagaacactcaaaattctggcaatagctattgctaagaattcaggtgttgaaggatcacccaccgacagtcgagaaaattatgcaaagctccccagaagctggttatgcactacgctcagagattttttgaaaatggtagaaaaaataatcatcaactcaactaaggttgtaaaaagtgctttgttggatgctgcttccgtggattctcagttaaccacagcaaaactgagaccactggaattcctaaagaagagaaggatctggcatggtaaatgggaagcagtgttgggagtagcatgttctagttcccagaatagtgctttgtcattattaataagccatgtggggttattcactaacttcggtgaattcagctggagacaatgatgagaggaaagagagatgtttaagaaatcactctagccattggttattggttttgatagcctatgcggcctaagcaatactgttttctctacctgggacattctttcctccccttctctgcctggctacctcttatttgtaggtacccaggacttcactcaaatgttattgcctccctatgggtgtctacatctctcaggtagaagtcattgccctcctcaagacttccttcagacctctgttgaaaccccaacgcactgcaaaatcatgtcctgttcttctagctgttgccccatgagcttgtgcatctatattctgtgatgacactgaaccaggcacacagaagtttcccagtgacagtttgatgactgagtgaatgaacgactgttataagaatatgtgctttaaattcatttcctgtcaaaaggagtgggttacgcttgaaacctggtgaggtcacgggtgccatattttgtgtgcctacatcagtaacaggctcactctggactgaactcacgagctcagttttgtggaccctgggctcctgagccaagcagcaacaagcctgcaatttttgcagagacctttggaggtgcagaacctggaaattaggctggaaagtttagcagatcagcaggccaagaataggacaaaagagtcagaacatggaccacaggatgcctgaagcactttcattctggcctcagattgaagccaagtcacaggcaagaacccaacatgttcaatggaaaacagaagcttcagcttgttattataaaaagcctcaaccatctcagtaaatgcaaatgttttcaaatgaataagtttattctgcagacaattgaaactcagtgcaggacttctagaaggcaaaggagccaatggttttcactgtggaatatcttccatctctcagtcagcagggttgacttggcaagagaggcagtgacaggtataggaaaggcaggctgggatctgactgaagggaggggccaaatgacgatcattaggtcagagtggaaagcaaagagcaggtgtctaagggagagccagaggcaccagctctttctcactgtgcaagggtttcaccatttaacaagtgagtcaaagtgattgatgaatatgaggattgagggttccacttcctcagaacctaccaagtgccaggtattttatactgggatcttctttcatttccaatagccctgtagggttaacaagagcccctctctacagatgaggagggagataatgagggtgctgtcctcccagccagggaagcccctcaccagttgtgattagcaggcattgagtgcattaagaaaggttcttctcaccatcatttccatagacttgaaacattcctggcctggaggcagacggattgattacacaacctcaataggcctaccagaactgaaaaaaaaaaccttaaggaactttaaagtcttgtggttgccaaacactttggctacaggaacttatcattttaacatactcttaggtaaatacccactacataaaatacttcaaagagaaactgctcaggttgaagtaggggtggaaacctgaagtcccacccactcagccactatcaaaccatgctggaggacctgttagtctccaaggaacccaatttgaaaaccacttttttggccctatcctctcatgttatacatggggaggggaatggtggtctcagcctctactttggtttgaacttttcacatcattatctctagcccagacccttcttccctgagctacagacccacagaatagttaactgctcactagatagtctcccaatccctgacatcccaacattacccagaatcaatgtgtcccaagcaaacttcatcccccatctgtttctgccccagaccatctttgttaatatcattttgctaaaaccacttaagctagattcatccctgactccttcatctccttcaaccccatcccctcccactcccaccaaatctaactagccatgagtccagtggggtttaccagaaatacatttggtctgtcccttccttttcatcttcactcctgtttaaactctggcccttgttaccaattccccaagattcttaaccattttctcaatttggattctagggcaaagatcttcctaaaacgaaaatgtgatcacgtctcccctttcattaacaacttctgatcacttctcatctatgactcatggaatcaagcccaactctactgagactttcacaacttgaccactaccacactttccagtctcagtgctcgctacctatcctgcttgcttttctctaggtggcagacttgcctctaggttggcaaactttttctgtaaagggcctgatagtaaatatattaggcctgtgggcctcttgtgtcagtcataaactgctcagctctgccctggcagtgctaaagcagccatagaccaggtgtaaatgaatgagcgtagctgtgtttcaataaacctttctggacactgaaatgtgaatttcatgcagttttcatgtgtcacgaaatattatttttttcaattttcttttcttcaactgttcaaaaatgtaaaacccattctttgatggagggccatagaaaggcaggtggagggccggatttggtctgtgactgctgctttagacgcatggaagtagttgtggttcattagatgtggtagtttcatgctttcttgcctttgcttgacctggaacatatcttcccatggtctgtctggcatctttctgagacccacatttaagtcactgcctcttttttggctttccttaaatccttctggcaaaactaattgcccttttatctctagcccaggaactcttaatcaggcctcaattacagctcttatcatgctgtacagaagttatagatttatgtctgtgcctctctttaacctgttctccttaagagcagagattggcctaggcgcattcatcttttttgctgtcacatagtaatgtcaccccaaaatgcttgttaaactgaacacagttgcctacctcctgataaccagtccgaagcagagcccgactagaactcaggccttctgataccctgtggtattaggtaaaattgtgtctggccacagacatcctaaattctgattggactgagaccagaatataatgtactatgttgtaggttatcttttattttaagtttacttctttttgtttatctgggaaaaaatctctgtcaataccattagaagttggtaatcattagctctgaagtgccataaatcacttaagactatagtgccacaaagctgactgtgggtgaaactgatccaatgccagtgattcttcccctgcccttccaggtccattctttaaacctctctgccctgttctgtgccccaagaagctgatctctgtggactgctagagagcaagggagcctggtggtaatgccagccagagatcccagggcagggagcaggacagagcagggcctctgtttccttgctcttggcttcctgttggattggcagatgggaagcacagtggatgggagagagagaggagagaggtcaagctactgatcccctgatcccctcctcacgccctggctactatggatccctgtggtcccctcctcctgcactgcaggtagggaatagctttccaggtctgccaaggggcagacctctcttctatggctccagctcttgccaccttcttccctggtccctttgcacacctagtggtggtgtaggccacctgctgcttagtcctcaggggcctcaccatctcttgcgggctcctttgactccaccctcacctctgtacattgtgccttcactaaaccctctaccgttaaagctgtgcagtattcctcctgtctcccgctggacccctgactgaaatctatttctgccactgttttagggtgtatttgcaataataaagcttagcttggtctttcctggctccagagtttttattccttcagagtagtagttgtcaactggaggtgcttgtgcacatagggacatctggcaatgtctggagacttttttggttgtcatgactgtgtgtgtgtgggggggcgctgctaatggctgctggtccctgtggctccctcctactgcactgtgtctagcatctaatgggcagaggccaagcacgctgctaaacatcctgctatgcacaggacacttcctcacaacaaagaattatccagctcacaatgtcaatagcgcagagcctgagaaaccttgctttagaaagtcaacaatggagttactaaacgatcactgtatatccttgcactatgcggtctcagtcaggaaaacactagaaaaagcaggtttcaaggaagaatcatttattaacagaatcacaataattgagcatgccagacccaaatcaacactgctgggctgcaaatcctggctcctacatactattaatgagacctgagccagctagttaccctctctatgactctcgttcctcaactgtaaaatgggacgggtaatagtatctccttcacgcagttgctgttaggattgaacaaagtaataaatgccaagcgcttaaaatctagcaagtcctctttatacactggcgcacactaacatgcaaaacttcattctgggctatgctaaggatgatagagggaacagagaacagggcctgctttcaagaagtttgcaactaaaacagtgctttttagattgtgagttgttccctgctgcagatttgtaaaattaatttagaggctgcaactagcatttaaaaataaaaatgacattttcagactacattgtacacagtaaataccacttggtcatattttccttttagctctacagatatatgcttatactgggttgtgattttgttttttacagtggggtgggatgagcaaaacaaagtttgaaagctacggttaataggaaatggaagacacccaaagcaccatcagaggaggccctgtaattctgcaaatacagaatgaattagagctttacagctcacaggctgtgtgatcttgggctagttacaacctctctgagccccagcttcctcagctggagaaaaaataaacagaaataaaaacaaatgtatcactttactgtggggagtactgagtggggcaatgtacatacagtgcctagcacggggcctggtgtgcacagatgtggaatcgatgtgtgatctggagactgccaggcttgggttcttgtcgcccattgctggcatcaaaccttaaccttaaaaactgacaaatgggccctcagtaacttgaaatattagaaacacccagcacttacttaatcagatacaattatagcattcatctctgcttttgtcttttgagaaacacagcagaaagatacagacagctgttccactcacacaaagacccaacctcagcagtggaaaaaacatctccaagaaagctctcagggtaagcctttgttaagctactgaaccaagttggtttcttgtttactttctagatatttcaaatgggtacaccacccaaggctaagtaaattaggccgttcctaaaaggttcagattttgaacgtaacgcttcttccttcagagctgcttttatcccagtttccagccagaaagcctggccctaggagccttgtggagggggcactactctgccctatgctaccttgagggtgagccagcaggcatttggccttggagcccagggcttcacacaggtccttatacttaataggtacacaatataagcttgctgtctattctattaaaaccaataacaatttgagagtggtaatagctaaaggcttaatgagcatgttatgaggccaacccttggtgtttatctctataaattttgagtactttgaataaacgcaatgtcgaaaaggaatgtgctcatccgctcccatctatcagctggatttttggatctcttccagttacagacagctccttgcttctgggttaacccactcctttttataggtggttcttgggttgggaaattcttcattattgcagcagaaatctgcttagctgcgatctccacctgccattcctggtctgatctgttgccactagacagttcttcacagatttgagcatcaaagctatcatgctccctaaagtgattttggaatatattcatgttttagataaaatgaaaaagagtagaaatgtaggctgcagaggtcagcaaaggctggtggttaagagggtgggctccagactcaaaaggcaggagttcagatggccttgggaaattggcttaacctctctgggccttagcttccttgtccataaagtgaggtgatgaccgtgtttcctttgcaggataatgatgaagattaaaggagatgctacttgccaagtgcctagcactgtgcctggctcttagcaggcatctggtattaactattatgattagcctggcatgtgaggggcagctccagctacataatttgggaaacatccctctctggggcaaaagacaagggcagatgcagagatgcaaatctgcagacctctggtctgcaaatagaaacgtacaaagaaggcaaggatgcctgaagccacaccggacccagtagggagaggtgatgagccctccaggtgtcatctctgctgcccactgaggaagccagacagtcctgggacctgcctaccttggtattgggcactgaatccgcgctgccggtggttgccatccgatgtgaagtgcagtcgcagccagttcttgctgctgataacgggggctgggaggctggctccggtgaacctgtgggaacaggaagcagatgggctcagggaccagagctgagtggtataggtgtatgagcattcaggagttcctccacttcccttgagtgccaaggcctcagcccagctctggagcaggaagggaaggcggtgttgccccaggcccctccagtaccctaggcctgagcagcttgagatggctcctccagggtctcatcccactgctgggtttccctcagctgctgggaggaggcaactgatccttcagaccacagcacctcctgcttaaattccctaagcattccatcctttttcttttttctagttctttgccttttctgcttggaatatattcacctgtaacgctttctcctgcccatccatgtcccccaagatgactttgggaagccccttaagtatcacatctgcagtaaagcattccctactctccttggctttgaagcacagatttgggttcttatccaggtttcaccagtgtgaccttggacctgttacttaaccttttggagaacaggagtaataccagccctaagagtttgtaggaataagtaagaaatcttacgcacaaagaatcgaggtcagtatctggcacatgttagcttaataaatataattttcctttgtcttcctctgtgatgccacaacattttattcaaattataattcagttatagaagtgtgtggtttccttaagataactcctcaaagggggcaatgtggcctagtagtgaagaaacttgagctctggagggatcagctgtgtgagctcaggaaaactacagaaaccctctgagacttagtgaccttatctaaaacatggggatcatgatgacccctccctcaaaagcttgcaaggattaaatgagataatacacaaaagaagatctcagcacagtccctggcaataacaagctgtcagtaacggcagctgctgttccattcttcatcttgatttccagcttctaacaccatactggacacaaagtaggcatttcagggttccagcagaaaacaggtgtcacagtcatgtaagaagagtcccaggagtttgatgagtgactcttttgcataggtccttataccctttctctatactctttcacataggtccttatatcctatgtgaaacagtcattcatcaaactcttggaactataaaggtgagggccgactatgggggaaccacccgggaggggcagtatcctggggctggcaactgagggacttgttaccactcccaatcctggagcagagagaaaatagttatctccaaacagggggctgcatgtaagaagacaccatataggacccagatcttctttcacaatctggggctatagccaatttgtgaaaagcccatcaagaggaggcaaagaatgaatacgcagaactcactctcttccttcccctcctccagtctcccactgattctcctgttgatctagcccaactggaagccagagagcaagagagcatactgatgcagccccttaggtaagtattctcaggcatggagcaaggagaaggcaagggagaggatctggaggtgcaaatggaagacatccagcatagtgggtcttcataaatatgcattaaacaaaagaactaaccaaggagcttcacgcactgcaaaactgaattcttactaaatgaaaatgctgacacacaccaaacttcaggaatataacccataccgctatggtaaaaactattataaaaaccaattactgtatttcaccagatcccatttaaaatagtttattacagactgagtcatttaagttttctaaggagccacaaacgtattgtgggtttttttttttttttctccaggccaaattcaattctatctcaatgacaaagcttggaggctatttatataagggaagtagaagtagggagaatctacctgaataattcaggaccaaaagctctttattgcaaaatggaatgaggggagggtgctgaggtctcaagagcaggatgagattaatgatcaagattgcagcaggaagtcagtgagacttccccggcctgtgagatcaggagaagccctaaggggcatctcccacctcccatttctcccacacatttacccactcctagaaatcctgttaactgttaatttccgaggcttaaactctcagggccctgtgttgcccatgcagctttactctgttctgctcctacctccctggacacaaatgttgggcagttgagagttttcttggcatctatcaaagaattgggggcttacatggcagaatcatcacatcagactctgccattgagatggtgtcatgccttgctcgaaactctccaatgaaaggaaccagctaccaatacctgcaacatggatgactcttaaaagcattatgttgggccatcaaagaggatatactgagagtatatactgagtgactcattcatatgaaactctgcaaaagagtttagtgagagaaagcagattagtggttgtcagagctgggggtgagagataaaggttggggactgcctggctgggaaatagtgcaaggaacatttgggggtgatggaaatgtcttacatctcaaatgagatgttgattagatgagatgtacacattgggcaaactccaaggaactgtacatttaaaataggtaatttacagccagtcacagtggctcacgcctgtattcccagggttttgagaggccaagcggggaggattgcttgagcctagcagttggagaccagcctgggcaagacagtgagaccccattttatttacctatttacttatattttggatagcatctccaaaatataagtaaataggtaaataaaataaatggtaattttattttatgtaaactatattataatagagttagtgaaaaacaaatcaaaacaaaacgaaccttcaatggatccaatcctcagggtaaaagaccttattatagcctataaggccttgaaaaagccactcttcctttccttttcctgcctcctcctctttaccctttatgccccagccacagatatctcctcactgttcaaaactggccaggcctgctcctgcctcagggtctttgcagttgacatcccttctgcctgctacactggcacttctcccagaactccacctggcttagcccctcgcttcctccaaggctttgaacaaatgtcaccttctcagtgaagccttcccggtttgactcctgcctgcctttcaccctgagtgtgcacgcacacacacacacacacagttctcccgtcaaacagaagagttcatgtattcaggaatacacgttgttcttttgtgcttctctgtctttgcccttgatgctctttatgccttttctcactgtaccacctggctgcacagagaggtaaagaaacttgttcatggtcacacagctattaagtggcagaggtgggatttaaatccagccatcccatccagagcctatgcattcagccactgcattacactcacatgtacatgcaagcatgaaggaaggcagtggaatcatttaggctgaattccattctgttcctcttctcccccctcctgacttcccccaggatcctctttaattttgctccctcttagaatcataattaaaggagagaaacacaaagagagattctccctttcaaacctttctgtccacattaacttcactacggggggcttggggaattccaagttcacccagaaaattgctattgcagtacaacataaaatgtatttaagcaattacactcaattttttttttctttttggtaaattgacttctgttaagtggggcttcattaatggaatctggcttgggaagaattaaaaaaaaatcactccctgtaatgcatgtagttgattatagaaaagtggctttgagctcctctgcagaaagctctgagccattcccttcatgaagaagagctcagagcagattttgtgggaagcatttcttcttaagaagcttctcatgcagtcgggatgttggggagctgagagatacccccatcaagatgacaacagtgactgtgcaaggaattgctgcctaattgtaagtcgagggggaggagtgttaggagatcttagtttaaatcttagcatccctgaaaactgacatcttcaggagaacattcattcacgcaatcaccaagcacatattttgtaaaaggcactgtgctcgcaagtgagggccactcccactgtggttccctagatatagggagtccctgaaaagcctgtaatgtacacgattcagctgcaatgccttcttttctgttcagcctccattccttctccatcaatagcatctggcttctgtcctcccagagcatctcctgtgggcattatctgttaagtaagctatgtgcatggccctggtctgattcagagttgaagcacttctgcatcccagtactaagtataaaccatccctccccatccccaaggctggcctaggagaatgtgaaatataggaggtcctcaccaccttatccccactcccaagccctcttcccttcccacctgtcacctgctttcctccctgatgaatggagaggacaccaggatacaatcagagaaacccttttgaaaatgtctttgtcagtggtgggcaaatagtcccaaggcccttgtttgaggctgatccctcctctgccaaacctaagccacctctcattcctgaagcaaacctttaatgactcagccttgacacccattcttatcaaaatgctttccaaaatcagttttcctttagctaaactcctaggacttgctatgtcaagataaattctttccccaagacaatcccatgatgttatatattttccaggaactgagtgaatgcctgggacaaatggaagtttcttttgaatatgagttgctgggccttatctttgaaaagaggcccctcagcctcccaaggcttttttttttaccagcagtgcctgcccaccctggttgtgtggacagctctgaaagatctgagccagcctttaaagattcaattcccggctacctagtatgtgtttggggttggttactatgctctgaacaaaccaaagctttcccccagtcgtttctgctccttagtgcaactgctccccctaatctacaccatcctcctggtcacccaacccaggcagcatcctcaactccccactctccttcacccctatcgccaattgtggccaagtcttctccatttcatgtcctcatcgtttctcacctggactacagagatgggcttctgatttgccctctgcctctgatcgatcttccatactttgtggggaattttgatcaaatccctgcattgctggaaagccagcagcaatggttgaacccactggctccagaataaagtccaagctttttaatgtctttcctcttcaatgacacacactttgagatccagctacacagaatggcttgtacatcctggaatgcgactagtactttcgtgtctccagacctttgcacatgctattccctctacctgtaatgcccttttcctgttgccccacctggctacttgggaaaatatcactgatcctataaacctaactaaatatttcctttcctctatctctccctctccctgcccccagtggacatggccctgccatgatcctgggcataccaaattgtactcatcttttgagttgaccatctcttcaactagcaggcaagctccatgggagctggaataaaatcttctttttgtctcagtatctctggtgcacagcacagtgcctggcacacagaacaaatacatttcatagaacaggggttggcaaactatagcttgctgcctgtctttgtaaatatggttttaccagattgcaaccatgcccattcattcatttacaaattgtctgtggctgcttccacattgcaatgacagagttaaggagttgtgcaagatgatgacttgcaaagcccaaaatatttattttctggcttcttacagaaaaaaaagtttgctaattcctaccatagaagcctcacagatgatgtagttggttggtaaataaaaatttaatttctaagtagggaatcataaaaaaggacacagatgtagcttcaacatttcattataatgtaaaacacttaagcatacatttatttgccaatcagtttaatgcaggaccaaggccttccctttgatcatgggtttgttctccacattgtctgtcttatataaactacaaccacaatgcatcattcaccatttcaaatgttgctacagatcgtccagccaacaaatatttcttgagcacctactatgtgccagaaattgacatccattctcatcaaggtgataaggatgctttgtcccatccccctcccctcatgtaatttacccagtggggtacagttgtctcattcactcacacctaatatttagtaagcaattcttttaagagactctccttcatggaatcattccaaagcattcaatttagtttccatagatgcaactatatttcctttcacactcatatttcatcagtttatgtgatgtttaatttaaatcacataattacaataacaagtatgactggcactgagagacttggcaacaaacccaactgaatctcggaaagtgcaagactcagctgataggagcagaagtgcacaggcattgagggtgggggtgggagactgcctgttggcagcagttgctgggggtgccatgggcaccagtcaggaagatctactgaggccatgggagtgctgggtagtccagctggcttctttgggggaggcagggtgggttaagaacacttttattggacatgtttgtgaatgaatgaataaatgaacaaacagcagtagcttactttcagtggtgggatatcgaattacatcccctctgctatcaggagagtgggaaccagctaaccttaaaatctgagatttgagaaggacttcaaaggtcttctaggtctaatgcccagctatatttgagtctcaaccacagcattcttgaaaaacggtcaattatgatctattttgaatgttcccaacaattaagaatttaccttcttgccaaattctctctcccaatcttgatccatccccattcttttcttagctacttcctactcatcgtgcaggtgtatcagcccctggctcaggaaacctgtcctttgttgctaggtctggtttacttctcctttgtcccctctgggcaccctgcactttctccaccatagtgcttctctcaccatgcattgctgaactatgagctccctgaagacaggagctgtttctttctttggtaccttggagagtgcttgacataaagaaagggctcagtaaatatcactcagtggaagaagggatgattggccgaatgaatgaatgaatgagagcctgctggtgaaagcagaggttacatgtggggaaaagcagagaaagaggcagtgagcaggtgagccagggaataggagggagggcctccagtgccacgcgggcttcacccgggtttcccatggcactgcccactcctgtcaagacatgcttccccagtcctagttcctcagctctggctgtgccccactacctgcttcacttagcagctgctggtaccttcctggggattcttctcatgctgacctatccccaaagcagcaacagtgaggtctgctaatcaatgtgggcaaatgttcccctttccccagaagcaactcaataaactcaacaaattatcagaactctttcttgctcagctaattgttagctccagggaacccacagaaaccacatcaggtaaatgtttttcctccagatgcacggctctctggaggacacatgtctgaggcttggagtgctgaggaacagggagcctggctgttgccgggatgagggcttcctcaccaacacgctgggtcttgtgtatggggtggtggcatattgcgaaggtctaggggtggcttggtgtgtcagtttccttccattgctagctcagctgctcagctggcagagctgatgggtaaggtgtttcctgcctctatagagaggatcttcccatcgtgctgaagtgacagaacagggttgggtctgaagatcagaactggtgctgatgccaagctctgggtgaagaggcttgtgggtggatccccagctgcttttctgagttgcccactccgtcctttactgtctccaggtctaaatcaggcagttctactctcttatgaagaccagaagcctttgaagatcagtctccttccctcaacccacagctcctgacaggggtagccatgtacatcatatgacccataggctacagctgattggatcctggtggtcatgtgtcccaagctgggccaatgagctgatggaacttctatcaggaaggtaggtccctatggcccccatttgaggtttggatggagagaagggctgagtactcactttaatgaggagaagaccccacaggcttggctttcccaggggagatttgggaaatggtgtcctagcatcatttcttccacttctgttgctgcctccccaacttgcccttattacttttatatgatgtcctgaaccttgtacatttatcctccaggagtcagtctgactggacagaatctaagagcagtctccactctgaccagctgctgaggctttagctggctgtcccctgtccccagcccaagtctctattatatgtcagatctgagatccgggaaggcagtcctgaggactggcagcctccatgctctaggatgttaaagcctatccccatcaggcttggcccagaaacagggtgcaggcctcaagagcgtggtgactacagcatattcacactcaactctactcaaccctcttcttcttcctgactggagtctctgcctaagtaaagatgacacctatctggctcatcacctgtcttgttcctcacagaagcaataggtttaaaaaggttaagggttaagggccaggccttcggaaccagacagtgctatatttgaatctgcgttctactgtttcctagttgtgtgaacatgggcatgcaacgtaacttctctgagcctcagtttcctcatctgtgcaatgggattcctctgagcagcagtgctcatgtgtataatgtgtccaagtctgtgcctggcatacagtaggtgcctcacaaatgtgaactattttccccctgccttgctggggtttgagaagaggtggtgggatcttaccaatgccttgaacccaacccttcagagtagaccgcagagcagcctggcttagttttctccagggaaatgaggcacctgcatctactctggtgatagagcagtgcaggggtagaaggacagggcactctgtggtacccagaccagccagtacacctggccatcaacttccctctttctctggggaaccccagcctggcctccactggctcctgctttcccagccttgcccactttccacctgtcactggcagacatgacttggagaaggaacctgcttcctgccatagagggtggcaccgcttgccttgcagaagcctccgctgcttgtaattagtactatttctcacccagagggactgttgtaaatggcttcttgaggagctgcccacatcagtgtgtgcctgccacttaactgccactctgagtttgagcatcatgtatgtcccttcccctgttaggaggcagctagtggtccctgccagagatcagcagctctgatgtccagaagaatgagtgagctgcccaacagctggaggatgggtgggctaaacatctcacacacactaaggctagtgagcaagtggtcctagagtcccatggagctgagttctaatcctgccttcattgtctgctggccatgtgaccttggagaggtggcttcacttctctgagcccttctttccccagtttatatctcatagtgcgattgtgagtgacgctcacaaagttccctctaaggcctcaagacacgacatctacaattcttggccctgccatatctctgtacagcaaggtagactcgtaggcaaagggaataatatttactgagtagaaactaatttggggtagagacttagcacgcaggccctagaagaagactgcctgggttcaagtatcatcagctctaaacttactgtctcactttgggcaagtaactgacctgctttaggcctcagtttccccatctatatagtaaggataataacagcacccacttcattgagtggttaaaaggtttaagtgaggtgatgcatataaaaggtgcctggcacatagcatgtgcccaaaaagcatcaaaaatgggggagaggagaattcctctcttcttgtattgcttgctgccgtccacctggattaatgccttatactttggctttcagatgggagaaatccagatcacatccacctacagaagaaatgattggctgctatggattgtagctaaaccataggaagagtagagttgtagctggccccagggatggccagaaccaagaactcagatgctacaaaggccctctctcggtgccccatctctgttgtgctctgcctgctggcatcattctctctactgcaaatggcggctgcttgaggctggagccatgaccacccttagtagctctgtgattcactctctcaccttcaccactagagagatgacaatctctctccgtgactctaattagaaaaagcccatcagaggcctctgattagtttagctggggaatgtacccattcctggggccaaggaggtagcctccactagaaccccatgactagtttggggacaattctccaaaagaaggaatgtgctcaaaagaagtgaggagtgctaggcagacaaaacaaaagatgtctactgtggatgaaagagaagtaggtggactgaataatcagggccactctcctatgctataaaggagtaggtttttaaagacctgtgaggagtatccatagatcactgtgtgagttatcaacccagagttggtcttgttctagatctgtcctgtatcctttcataggtagccaggcatcccccaaccaggctgatcccattctgtgtctaatcatctgaccactgcctgcccacctgcccactagtccattgggctgggtgctgacacttcgcctggctttggcaagcctctgcccttgggagtagatgcaggctccgtgcttatcttcagatgctggtgaagttctatgggtcatccaagtcagttgacctcctggacttagaacatcccatgacctagagataagttgactagatctatccagaatgaggatcaacccagattagaaaagactcacctgaatcttttaaacgttgaaatttagataactttttctccttccttcttccctcctcctgcaatacttggccttgttccttcccagttgcttccttaccctagccccagccaagggagttcctagactaccagtagaggctaaacatatgagccaaggggtcaaacaagcttgagttcgaagcctggctctgccacttattgctgtgtggccttggataaattaatctctcttttcacgcttccaggcttccagagatgatgtacccaaagtatgatcatcatttttattaaaatattgtgctcacatctgattgattaacagttcctggcacgaggtcagtgccaaagagccttggactgactgcttatggcctggcctccctatctggtttcttactatgtagcgatccaagtgaattcagatgattccctggactaccaccctccttcctgggacacatccatccctcaaacactgttcatcactggccatcaaagcagcagccacactgctccagcaactcaacagctatttattgagatgggtgtgtgagtacatgagtgagtgaatgaactgaaagaacgtaagagtgaattaactgctaagtgaattagtgaattagtgacttaatgagtcagcgagtgaagaagagtgtgcaggattgaatatatcatgttcttttccctcaacaaattgaatatgccgtggtataaaactttcaccctcaaatgtgtcttcttcattaacacaagcaggggttaagaatggcagaagaaaagttacagaccagcagccagaggagaaagatactgtgctagtttcctattgctgccttaacaaataactgtacatttaagggcttaaagaacacaaatttattgtgttataattctggaggttagaatccaaaatgggtttcagcaggccaagatcaaggtgtggggaggactgagcccctctggtggcactaggggacaatccttttgcttgccttttccagctgctagtagccacctgcatttcttggcttgtggcctctttcccttgtcttcaatatcagcagtgtagcatcttcaaatctctctccacctctgatcctctgcttctctcatcacatctcctctgactgtgacactcctgccttcctcttacaaaggccatgtgattctatcaggcccacctgataatccaggatcatctccctagctctaaatccttagagtaatcttatctacaaagtcccttttaccaagtaaggaacaaattcacaggtttcagggcttaggacgccagcatctttggagaggcattcttctgccacttgcagatgccttgttcagagggtaaatgcaaccagtgagtcccactccacagaggaaggggcaggagggggatgaaggaagtttcaaagcatttgacatacacatgcttatgccaggtatgtttgctgttgttgctgtggcctgagcactgagggttttggaaagcttaggtgattccatcatgctgcaaaatctgagagatactttgacagagatatgctaagagcatatgctgctgtaattgagggtaaaatctggccctgtgattcctggagatgatggatcaagagcagggtgtctttaccctggctgcacattgctatcaactggaaagatttttctttaaaaaaatgttattttgaaataagagtgcaaagatcatacagaaatgtcctgtatacccttcaccccgattccctaatgttggcatcttacataaccctgggtcatgcataaaaactaagaaatcagcaatggtacagtactattaactaaatgaaacattttattcagatttccccagatttccaccagtggcccactttttgtctgtcacaggattcagtctagcatctctcattgcatttgtcctgtcttcttggtttcttccaatctgcatcagtttcttagccttgccctggttttttaaaatcttgacattattgaagggtactgatcaggtatttggtagaatgttctttatttcagtttgtctaatgttttttcatagaccttggctatggatttttgggaagaatatcatggcggtgagatgctgttattatggcaacacagaaaggggttctgtgatctcaacatgacctgttattgatgatgcttacttcgatcacttggttaaagtggtgtctgccagatttccccgctgtaaagttactatttgtccctttccatgttctattcattagtagtgggtggctaagtccagcccacactggagagggggagtgccatctgtttttattcctatcatttcaatttgtttaatcctcatggctttattatcacctcactactttttagagatatggttgtaatgagctagacttgcccaaagttactcagctagtaaatggcaaagctagaatttgaacttatatgtgtctggcttaaaaggccatgttctttccacttcatgttactgccaccaagtaaagaggatctcacagtctctgaggcggaagctccctctcagcttgtctggacagtgtttttcaaatccattcttggagtgtgacccatcagtgggtcatgaggtcagtctgtgggtggcattttaaataacaacataaagtaaaggtgactacaacagagtagaaaataagagtatgtcacacaagtagaaattttttatctctatatcttctctgtgctttgctaccttcatctgaattcacttatccttgtatggagataaaaatagccctcccataggcttgttatgaggactgaatggaatgaggtacataaagtgcttagaagagagactggctcatattaagcattatataaatattaagtatgtatgtatgtaaacgagtcatgatgtaaaatgtatttcttattgcagactgcaatcaagatgtttgaaaatactgaactcacatctgtagacgaggagttggcagatttacgacccccagcttgcagcctattttttaaaaataaggttttattggaacatagccacactcattggtttaggtattttctatggttactttcgaggtatagtggcagagctgggtacctgcaacagaaaccctgtggttcaccaagcctatcatatttactacctggccctctagaccaatgctcctgcctggaggtcatctcataatctagggaatattggacacctcttcccgggcatgtggtctggtcatgctactgtccttgcaggcatgcttgctctaggctgtgtgactgccaggcacttggatctccagaagctcattactcttctctattaaactgatgcctacatggtgaaaggctaaaaccatggtactttggtcagggtccccgcaggaaacagatggccactcaaattaaaatgattggtgagggcagagtgtgggaaagtagcagagacctcagaggctcataaaagtagagttttaccaccctaggcaggaggagataaagaaagggggcaatgcctgtactggaaggagagagtcatttagagaggacaccttatgaggaccagtgaccttcagtccagggacacagaaccagctccaagtgaccctggggtggggatccaggagaataaatgccttgacttaactttcctccatctctgatctcctgagggccccattgaccaaagtgagatggaaaccagagggtatgggatcctctgatgtggctcatacagaccagcttcccaggccagagaaggttgaagagaggttggagaaggctggaaaggggatctggaagggcaactcttagatacccagcacacagcattgatttaggaagccagatttatttacctttcctaagctcccctaaacaaggacttcccctgcttcatcctccaagttggaactttgacaacaccaaaaggttgacatagcttttcccttttactgccttttcttcttaaatctgctagcttcccgatagctattgtgggttaatcttcctggatcttatcatgagagggatggaaggttaagaggcacagataagctactctgtgtgtgtgtgtgtgtgtgtgtgtgtgtgtgtgtgtgtgtgtgtgtgtgtgtctgagcctgagcagagtctgatgaatatgtggactttcattaaagttcttcctcatgtcccatcttttgatctcagaaaggagctgtgtcccattcatctaggcagccctgctcatgtccaaaaaatgtgtgagtcaacctctggccccttgggagaaagagccagggggaaaaaggctacctaggctgagaagtgtccccagagtaatccgttcctttgcgagaccccctactagcccagacttccttgatggcacctgatatcttataggcccccaaatcctgccacacaactacagcttgtcccctggaggggcttccctggccagtccagaatgctcaatttatgagagatcattggctcacagggaggaaggggatggcttaggtaggccagccaccttgcagcagagctgggcaagaattcaggattggagactcttattagtttccatctttcttttacagaagatgaacactgaagtcttggaaccctgggaatgaacctggaaaaattcaaaatatggtctagtcttaggcaagtttccttgtccggctcagctgctgagaccacatatctggaccctcagtgccctggcaacagctctgtgcaggcaggatgaagcacaggcttaggtcaagcaatcagccgtcaaaatccacactctcacctgtgagtggctgttcaaccttgaacatgttactttttatgttaatgaaactcagttttctagtcctataaatttggggctatcatcaaccattaagtgatattaaacccagtgccacacaggcaagtacctagcagtgtccaaaggcccccagaatgacactttttcatcttttctcttccctccaattgaaagactagtggaatatctgcaattactttgaccaaaagccagaagccggccagtttgagtgtagctgttacagctttgtgttctaaacctaagaaatggggacccctcacatgagagtggggaggcttctggatgtgctacaaattccatttcattttcatgaactccagtgttaattaataaaatctcaaggttctcccccctctttcgcctcacatttcttcagagaaatgaagagttccaactcatagcccaagtgctcaggttttaaattagacaactttgtcctgacaggaaccaagtcacagctgtcatacctgattacttttagagttactactaaaccctttgtatggcatgagctgccactgttcaaggcaaacagaaacacttcacattttatcatgacagccctggatctatccacctccccatgttcattatgctcagcctgtctttggaagggatgatgaggcatcctgaaaatcgtatagtgaggaaggcagaccccatggcctgtcactacagcctagggattttaagcccctaaagtgcagcaaaacccactgcctccaggaagccaaggagaattatttctgggggacatagctgcctcatagcctactatgaatgaaccatcatctttcatgagaggcaaacattgaccctcaagtaaccaaccaatacgagcacctgtacacaaatgcccacaggtgttggctgggattggctggcttgtggatgatgtcacagtttccctcctctgactcaacaatgccatcagcactgaaaaggctgagccctgactacagctcttgcagacagaaaaattcgctgcaagtacagcactttctagattgctcctggagtgtgggaacaacagtctctcctgtccacgttactgaatccagaaaaaaggtgaacttacgaacatgggaaaagaaatccagctaaagcctaaggcaaatgtctcttcttacgttcactttttgctgaattacagaaacaaattcaaggagcagcagccaaatacctatgttggctttaaagagttctctagaaagtgttcggaaaaatggagatccatctcaaagcatgaaaaggccaaatatgaagccctggccaaactcgacaaagcccgataccaggaagaaatgatgaattatgttggcaagaggaagaaacggagaaagcgggatccccaggaacccagacggcctccatcatccttcctactcttctgccaagaccactatgctcagctgaagagggagaacccgaactggtcggtggtgcaggtggccaaggccacagggaagatgtggtcaacagcgacagacctggagaagcacccttatgagcaaagagtggctctcctgagagctaagtacttcgaggaacttgaactctaccgtaaacaatgtaatgccaggaagaagtaccgaatgtcagctagaaaccggtgcagagggaaaagagtcaggcagagctgatggatccagtttgaaaaaacaaaatgccattcaaccgtatttcctgttcctggtctcatgtgtggcattagagtagctgtgactgatgctttgtggaggagggagtggcttggtagaggagagactgatcctgaggaggggaacggagaggacgggaagggaaagaaggggaagggaggagaggagggaggggaagggaagagaggggaagggaagggaaaggaggggaatggaggggagggaaagggagggaagggctggctttgagagaagtgtcagcagtaaacaaaaggtgtgacttgggccactgggtgggagcctccaggtgtaaagtagcagcagtcatggaggtagaagcaccgtggttctgagtggtgatccaggtgagaggaccctactcagtgtcaggttcaggaacatgacgtctgactctgctaagcagtggcaggactgggaagactgccagggctagaaggcctagagttcaagctcacacttgaggccccaggagaaacatatggcatctgagttgagacaggcctgagggaacccaggatttccagcaacacttagatacgctcagtggggccagggtgaactcccaggggtgttccctaatcaggaggaggcaaggggcagattttaccaaaaaaaaaaaaaaaaagcagggggctggggaaccagatcaatcgtttttcagtggatagatgtataatatgtggcctccactcctcttcctcttgttcatagcactctgactccctttcgtgaccaaggctggataagagggcaggatcgccttggccacagtcattggctcagtggtgggcatgtgacccaagttggtcctatcagggtggacctctggacctgtgtaaggagtcctgggggacaccgcagtccagggaatgtggacagccatttgccatctcatagggcccaagaaggaggccgagatgctagaatccctgtggcatcagaacagtctcctaaacttttcattgaagatgaacaacacatttcattttttccctgacatggtttgacttaggttttttcctacttgactataatttgacacaaatgggattgtgctgtaagtgtctgtctggtaactagatttttcaggcaagaatatactgtaggcaacattccataccaatcaataaagattgaaatggaatattttgaaatggttcttctgacttcttgacatcaaaaatactgggccaaaatgcaaagctgcttttttgtcaccagtttatacatgcaacagatctccctaactccacctctaaggacccctattccatgatagagggacctacactttctactctactgcgctgaacagtaaaaatacatatttttgaacagtcttttagaactgcatgagcctttaggggatgagaggtaatacagtgatttagaaattcagggtctggaatcaaacaggtcatttgtggaggattttcatgtgccaggccatttgctgggtacagggaggcacattacgcactactgctaagttcccgccctataaaaaatttccttctgacaggagagatggacttgggcataaattgcagcactgcaaagcaagatgatgaaagtgaatgcagaaagtaatgggggagggactggggaccacccagcaagcctgtgctgcagtcttcatgaaggaagcagccttattccacttgacaactttgtaggcatgctggcaaaattcccgttccgcattccccacagctgctattccaacttggctctgcttctcttccctctcaggagacgcccgcattttctgcttcattgagaaaatagagatcctcagatataagtgctctcagtttccttcattcttgaaatgtaatccataccaatcctttcctcctggtctcacccctcacggagagctatccccctcctgctcttcctgccctctccctgcctccctggggcccttgctccttactataagggtgctggccctccagcctgtacactcatacaagttcacttgatgccatgatatggtggtccccaccttaatgttggcagaacttagggcaagttctcattcctctgagcctcatgttcttatctgtgcaaggaggataatgcctgccttacaggttgttttagcaattaactgaggtaatacatgtaaaagtatttggcacagtcctaaatctaataggtaatatagcggatatactctagggtggctgttccataatcctttcctcctttcttggtgttcacacccttgtataatcccctcctattaagtgtgggctggacaggtgactttcttctaacccatagaatgtggcaaaggagatgggatgtcacttctgtgattatgtgatgataaataatactatatattgctagccactttgctctagggattctccttgctgcttgatgaagtaagtggtcaagtttgagaagcccatgtggcaaggaatgacaaggaactgtgggaaatgtctagaagctgagggtggcctcagaccattagccagtgagaaacagaagttctcagtccaccaaccacaaggaacttaatattgcagcagccacacaagtgggtaggtgaatccttccccagtcaagccagcagatgagaacttggccctggctgaccaaggcctgaagcaatgcacacagctaagctgttactggactcctgaccccacagaaactgtataaatgtaagtttaaaactataaatgtttaaaccatatgagtgtattttgttttaagccactaagtctgtggtaatttgttacacagcaatagagaatacattactcaataaatgccctcttccttataattctagaagagactgtctttaatcttgtttctatctccagcctctaccttccccatttaatttcctttcctttgttaccaatctcttgttaccaacatcttgaaggtggagggccacctcccaccgtccagtgctaattagatcctgatttgtattacccagtagtagttccagttgggttgtcttgtttccagcctgaaatgtgggctcttggtgggcagcagctgtgtgatgtaccacactcctctctgggaagagggcccccacacagctaggccccagctctcatgccacccctttctggtttcctgtgtgattaattatgtgaatgtgggtggccaagtcagagttttgacaagagtttgcagttcccctgctgaaaactaactccattaacagtcctttatgaaaaagacaataggagggtctgaatctgctggcttctaatgactgtaatgtaatgacaatggagagagagggagggaaggaggaggagaagttgggggagcctggacctaagataatgggtgagagaaaaagtagatggacaatctggtgtggtgccagcattccaggcccactcagctggcctcaggtgctcctgtccttgagaagaggaaggcaggcccatcaccatcttgatgactgaatcactcaactctgatccttctctcctcaaccgtttttctgtgttcatgtagtcattaatttacttactcattcattcaacagatatttacataaatcttatgcctgcaatataacagcaactattctggtgctgggaatacaacaaggttcctcatctctcacgttccggtgaggagagacagacaattaaaaaaacaacaaataggccaggcgcggtggctcatacctgtaatcccagcactttgggaggccgaggtgggtgtttcatgaggtcaggaatttgagaccagcctgatcaacatggtgaaaccccatgtctactaaaaatacaaaaattagccaggtgtggtggcacgtgcctgtaatctcagctactcaggaggctgaggcaggagaattgcttgaacccaggaggtggaggttgcagcgagcccagattgcaccattgcactccagcctgggtgacagagtgagactccatcttaacaaacaaacaaacaaacaaacaacacaaatacatatatcgaatcagtttttgatagggtaaagtactcactagaaaataaacgtgggtaatgagataaatgatgatagataggatagagggcacttgaaatggatggtcagaagttttctgcggagctggcatttgggtttggatttaaagggcaagaaggagccagacaagccaaggtgtaagagaagagtcctccaagcagcagggaagcaagtgcaaaggtccttgcagaagcgagcttggcatattagagggacagagggaggccggagcaactggaggtgtgaacaaatgggcgagatgtgtttggaagggtgaaggccttggcaaggggtttatgtggaaatctaagtgcaactgagagccacagagagatttcagtagtggagaaccacgtgcttccatctctgactttgtgttactcatcattctagggtcttcagagactatcaagtgccaacaaggggattacccctctgcccctctaaaggattgcaagaaagaagacaccaaatccatggcattttttcccttaggaaagaagggagataatgagaagcctccacttggtattccttggagcagctggaagctaaaaaccaaatgtgggaactgtgaatcctatctctgggatatgttttctcaggaaatggaggaaatgggtgggcacgggtggcaaaatattccaggggaatacttcttcctgggccttgtggggaacaactcccaaaaggccagtggttctcagctttaagcctgtgttagaatcacctgcagggcttattaaaacacagattgccgggccttacccccagagtttgatttagtatttctgggagttggatctataatttgcatttctgaaagttcccaggtgatactgatgctcctggtcccaggaccacagacaaattctccttcttgtagcccctcattcactctgcgtaggaggcatggctcatctggctggtgggtttgggaggaggagcagaccatgctcagttagccctccccactctccctttctctctctccccatcgccctagctgcagagcatattcagacagctctccaatcagttcatcagtaataaaggtgacatgctgatcctcatctgtttttctcttgcatctgccaattgattctgcacttgagaggggaataagtatatttatttattgggtttccctcaaattccaacagagaagttggtatcagttgcaaaacaatcaactggcatccgggccacacagcagcataggaatcttggttttagcttccactaaaatatcaattatttgagggcaaaaaatgtccaattcctgggcctttaagataggaagtcaggtctgtggatggggtgaggtcaccaggatgaggtcacaaaggcattgatgcccctttgtcctatcatgtgaccacttgtcacacttccatcaaacagtacctgccccttaggtgtgctagggaataaatgaaatgcctgggacatcatcgttaagtggcatctgatgcataagcagtgccctaggaatggggttgcctgccttggtctctaaaggatgggttcaaaaggcaagagcagcacacaagaagatagcttcaagcaggagataaagcttggcccagggcccaaaggggatacgacccttcaggttggccctgacctctgggttggattaccagtgacacaatgaacatttcattatgaggccatcccttgaggtagttgcattgcaacagctctccctacccagtgctgcatttccaatgctttctctgttcaggctgctgggtgacatttctatgtctccccttcaacggtgaaatatttcagtggttgtccatcacctatgggagtctgacatggcataatcaggccactggggcattgctagttgtgctgtccctgatattcaccgtggtaggcagtttctgaaatggctcccagtgatctccaactcctgaaattcacactctgtgtaatcccctccctttgagtgtgggctagacctggtggccaaagtgataggatttcacttctgatgttaggctatgaaaggctgtgaccgctctctctgcctcttctctctcacttgaagcaaactgacatgctgaaagctgccctatggagaggctcatgtggcaaggaacagagggtggcttctggccaacacccagtgaggaactcaggccctcagtcaaacagcctgcaaggaactgaaccctgccaataaccgtaagtaagcctggaagtggatcactcccctttgagatgcctgcagccccagtggacacctttactgcagccttgtgacggactcagctaaactgtacctgattcttgacccatagaaactaataggtgtttcatggcactaaggcttcagataatttgttacaaactgaaatgatgagtacagattttggcatcaagagaaggatagtatcatgacatatacctaaaaatgtgagatagctttggaaccaggcagtgggcagaggtgagaagtattctgagaagcttgttagagaaatcttcaattgcctcaaagacaattgaagacactgtagaaatctggactttgaggatacagctggtgggggcttaaaagaagtgatgaacatgttattggaaactagaatgtctttgtccattttctattgcctgtaacagaatatctaaagctgggtaatttgtaaagaaaagaaatttatttgacagttaccagttacagaggctgaggagtccaaggtcaaagggctgcatctggtgagagccttcttattggtgaggactgtctgcagagaggactgagcatgttgatgtgcctgctcaggtctctcttcttttgttttgtttttgagatggagtctcgctctgttgcccaggctggagtgtagtagcgtgatctcggctcactacagccctcacctcctgggttcaagtgattctcctgtctcagcctcacaagtagctgggactacaggtgtgtgccaccacatctggctaattttcgtatttttcatagagatggggtttcaccgtgtttgccaggctgggctcgaactcctgatccacctgcctcagcctcccaaagtgctgggattacggcacgagccatcatgcctggcctcttcctgttcttataaagccaccagtcccactcttgtgataacccattaatccatggatggattaacccattcatgaagacagggttctcatgatccaatcacctctttaagtccccacctttcaacactaccatattggggattaactttccagcacatgacatttgggggacccatgcaaaccatatcatggaggagggacatccttgttaggtagtggtagaaagcttagtgccactattgtctgcagttacatggaaagcaaaatatgtacctaataaacttagtgatctagctatggagatgtccaagcaaagtgttgaaaataatttcttcttactgcttatgtgagaagagagaaaaaaaaaagttaaagtgagacaggacctgatagttttgaaaattctcagtctcccaagtcagcaaaaggtgctaaaattaagaaatggcatttgagcaagaaatggtggtctgagataaagctgtgggtgtgactgtgggcctttggttaagacttcagaaagatcaaaagatcatggtattattcagtcatacaaaggccctttaaagagattagggtaggcctcatagatcctccagatcaaacaatagggactctaggaagccaaggggctgtcccttggccatcttttcaagaggctcaggttgaaaagtttagttctcaaagaaatttgtgggtttgtttttttgtgtaatagagggaatctcagtgcaatttacagaagacccagaaggtttctgagaaaacctatgagaagaaacacagctgggacagaaaggaacagagacagtacaaaataaaatgaggccattggacccctaaaattctcagcaggaaacaggctgagaaaacaagtcagctttaaacacaggtttcctttcatgaaaaaggaaggattactcagagggaagaaccaagagcttagaaggtggagctaagagtcatggagaattatccccaggctttgaaacctaaccaagaaacttgcagtcttttcctggctggatttcaaaattgttacggaccagtgacgcctttgttcctcacattttcctccctttgagtagcagtgtttatagccattcctctatacctaacctgccattgtatgttgggcatatggggggcagataatttatctccttagcttttcaaatcaccaaatctgtagtaacagtattctagaacttgtacttaaggaattatacccaagagcctcatccacacctgcacctgatttagatgatgagatcctggactttcagttggtgctcccacgggaggagatgttagagaccttgggaaggatgattgcattttgtgtgtggaagggacatgtattctgcatgtggaagggacaagaatcattggagagccagagggtagattgtgataggcagcttcagaaatgactctaaatttctttctcttctggtattcatgtccttgtgcagtcccctccctttgtgtgtgggctggacctagtgatttgcttctaaagaatagaatacagaaaaagtgatagaatgtcacttctcatatcaggttataaaagactgtcacttctgtcttatcctctctctctggctctactctctggcttgctctgatgaagcagctgggttgaaagcttccctttggagaagaactgagggctgtctctggtcaatagcactgaggaactgaatccagcaaacaattatgtgaagaaacttggaagcttgtcctcccctctagttgagctttgagatgactgccgccctagtggacaccttgattgaagccttatgagaaaccctaagccagagaacccaattaagctacgcttacattcctaacacagagaaaatatgagctaataaatgttgtttcaaaccactaagctttggagtaatatgtgacacagcaacagacacctaacgcacctgccctaaggtcgggctacactgcattttccccagaaacattacactctctcctccccagggcctttgcacatacttctcatctctcctaccttttaggtctggtagacttcaacctgttctacagacttaggtcaggtatcccttcctctaggaagctgtctttgatgctccaactcccttgtgtgttcccataatagcttatgtaagttcatacaatgccatcccaatgcacagcacattatagcaactgtttgtcccctcaactggtagagaagggaagggatcttgccttattcatcacagtgctctaaaatttaacacaatgcgtcacatggagtagaatgataatagcacacttttattgaatgcctacatcatacctggtaagaaataattcattgcaggatttgggcttgtgttagatgatttgggtactgtttgaagccatttaatgcaattattttacttaagaaaaacattcaatgagagcggtactttaaacaccccattttacagacaacttgaacagcaggttaggtgctcagttcatgtttgatggaaaatgaacaattgaatcatgagaagcatgttttttcttctgtcctgtgtctcccttctctcaagaactctttgcaaataccagagtatttgtattttgtgtgtggaagggacatgtattttgcatgtgggccagaaggcctcctgggcatctggacatccactttgtgcttgactggtcatgttacctagcttggtatttccagataagtacctggatctatccctgggtgtctcaaagggagggcttggttagcacccagagagtttgatgggcaccagaaaccacacctccagctcttcgcccacagctgtgcctctggctcccagacagaatcagcattttcctctccccacactctgtcattataaaccacgtaaattcctcgatacccatgttacaacgaacagatgcggctctgtatttttaatgtattatctctaattagcagcagtgggcatggaagaactctgtggtccctggggctgtccctcactgatgcagctgcgagtacatttgtgatgaagaatctggccaggctcctctggcccgcacagccctggcaagtgggtgagggaacttccatgtgcaaagtatctactctgccaggaagtgggaaagggccgccaaggcctgatcatcagtccactgctcatctagcccccactcccacccctctatgctgtctaaataccctgagaggatgtccttcattgggatcccagagacagggcagacaacagcctccaatgtcatgggcaaaacagatttttctaggtttgaggtctgcagtgtgaagatctgtgaaatgcaaaaagagaatgcttcagtgcccagggcaaacataaggggcgggggaactgcatggacttcagaaaagaagggggctggttagtgagagcaaatgtatgctccttagctctgtccaaagaggaagggtatttcttataataaatgtcatgctcatgactgacatgttttgggcgtttactatggactaagccctatttctaagtgttctccagatatcatcacgtataattctagaggcagtgtcagcccccggccaatgaccaccatggacctccctgtagttgaacaaagttgggtttgctgactggtggcagtgagggagaatgcacaccacagggagctgtgcagtgtctcagtaagaaggtaagaaataattcactgtaggattcgggcttgtgttagttaattgggggagggttcaaggaagcagagctttgccctggattggagactggaggtaggtgtaattctctggttgggtacttcataaattttatttacaaggcaggaggaatgaaggaagataagagttgtaattggtaaagaagcagccatcactcacatcagccaagaggtggagggaggggggctgttaagtcatctttgtattttgaataatgttcttgtttttgtctgaattcatgatgttgaaatggtcttgtttttgtcttcatctatcagggtcctagagtggttttgtccggcattgacattcagtgaaattgtttatggtcaacaggagaaccccaaggtctaggtgtaggtgccaggccagctctcggcagcaaaaggccttactgatagtgccaggccagcttgcagccatcaggggctgctgttctccttctcagcaggccctgttactatgccagtttacagaaataaagaaattgaggcaaagacagattgcctggtcttagttgtctcacagctgggaagcagcagagattccagagtccctgaaagtcaagtgagcatcaagagacaacagagggaactaaaggggagagtttgtaattacgggaagccagcctgaccatgaggggaactggtcaagagatagaacacaggatttgtagtcagagatctctaccttgggaatctgtcattgctacttactagccatgtggccctgggcaatttgtcgaacatgagaaattcactttattcttatgtataatggcaacaccaaaagctgtttctcagggtcatatgggaatagaatgagaagacatggcataaagaacttacgtaccacttgggacacagatgctgccctgagtatttactgaacgccaggcactgttctaagtccctcgcatgtatttactcatctattacagcaaccctttataacctgtggcttgcaggtgagaagatggagacacagagaggttaggcgacttgcttgaggtcacacagctatcaagtagcagaactcaggcatcctggctgcagcacccacactctaccatgtgtcatagtagctgtggggtcattgctccttgtccactctaagtgctccagatcatgagcttcaagaccctagtcttattctgatggtgatttaatgccctggaactctcaaggccccagacttttgcttgtgaatgggtctaagctgcttgcttggctctggtccggagagcattcatttccttttagaaggtcaaaacattcttggcatgacagataatatagattcaggttgctgcagtctatagatcaaataaaacatagtattgccttattagtatttctacacctttcagtaagtagtagagtcagagaaaaccctgaaaaatgagtataaactaaagagggtaggagaatgactcaatgctgcagcacaagccctcttttggcaagatcgatgtgtgggcagaaggcaaatggctgctgagaggaaatgggccacacctggctggtcttattctatcctgtaatggcagaaagctgttcaggatggctatggcgcacagcccagggctgactcagcattgcctcttcctaacctgttgagtgggtttatagattgtgtcacaagttctgggaaaatgagaggtcaggattcctgggcccaatggctcgttaacagaggtcctgtgtgccatcaccccctccagtccttgtcccactggacttgtcccccttgtcgcactgggggagatgagggcctggaactcacagcaaaattctctctgtggcttgatgcaatcccagatcctcaccatcaacctttgtgaggctcatctgttcttaattatatctctaaatcccgaggcattacaactctgagaatttgggaaatttagctgcttagaggattcataataatcacaaaatccctggtatttacagagctcccttttgcagactgtgaaaggcagacaagacaatactgtagtggtaaaggcaccccgaaattgctctcaagttctcttcactgaatgccaggcccttagtctgtattattttgtgtagctcaagggggcaaattgaaaagaatacttttccctattactttctgagagagaccacagagaagagagagatgttaagttaatgtcgaagatatgcccagggttgctgccaagcccctgccctcttttcaggattgcgctgctgaagggaggggctcctgcagctatactggtacaagctgagcttgcccctttctagctgcagctgattggacaaggagtggagacactcgactgatgagtggagccaatcagattctctctcttgatagtttgaattaagagatgtggaaactgggagttgggttcctggatttgaaggtcaggcagactcaggggctggagtgaccatttgggaccaagcagagagaaggggaatagaccatgtaatatctgagagttgcttttcagcactttctgcccatgtatttgttcagcaaattctctgattcctaagccaggagccatcccgtgaggccgttactgcaaacaagctgaaaatcctgctttgtttcttttggacacaacatgctttccttcagcttcagtagacgatgaggccagcaccacatgggctagatgtacatgagatgtgagcaaccacacttcccctctgacggggacagacagcatcacaggtgagtgggagacccacatgtggtccattccagacacccccgctgcttttattagaagccaacatgggcctcccttgagctgccaggtgttgggtgcagctgcccctcacctccctagcttacaggagaaggactgagcaaagtctcttcaaaggagccattattgtgacacagcacagccatctgctccccgcattgatctgacagtggcagcaagggctgaaagcagtagtagaggcccaggagcacaattcagtgaacagccctcattgatctgtttacctgcttgatggctggccaaactctctgtgtccgaaagacacccttggaaggtcagagctggaaggacaccttagggaggcctgaggacagtccaagattgtcacaaatgggaaaagcaagccctaaagatactattgagatatgacctttccaatttcaatcaagggaactcagataactcccactgtttatgggacagccctggggagggggacagggtgctattgtgctttgtagtcctatttgccacaggtagtaaagcaaagagaatatctatttatatgaatccataggactgaatcataagctcttgaacgaaaagaaaaagcacattcttcttaccgcggtaacaatgtgtggtcactagttcagaactcccactgtccctaagccacaggatgcagaccaacacaatcaaagagttctctcggctggaggttccaactggaatgtgtgagttggtggcttctatggtgccagcttttgcttagcctttgcttggtcacatattcagggtcaacctgccctgtcccagtgacaattgtctccagcaggaaattcattatgagccccttttccacttgtcgagtagattctggaaatagtctgctgtcctccccaccacctcccactaagatcccaggagccagggatttagtccctggaatccctgcagccttgatcattaaccactccacttaagtgtggcccatctgtctggttggtctgcttcaatctctggtcccatttcttgctcccccatgggctagcagttttgtgaaactgtttctggatggatggactttgggcctactctcccaagggttgggatttatcttccccatatctattaacccacaaatgtccctgacctgaaagtcacacaaatacctgagtcatgtgaccacctcattcccttagactttgccttcccaaaaatgccagtcctgatgagggtaggagattttgtcttacaatattgggtggctgatagcaagcattggtgtctctcccccattcctgctctaaccaccaccactataatcatgagcattggttttagatgaagaaagaactggctttgaatgctgttcccactactaactgtatgaacttggcaagttagcaaaccacattcttctgatcctccttcttcttgtccgtgtaaagggtgaattaaaacctactcaaggtgacaggtgtagagcaaatgagagaacaaatgagagcatgaatataaagaatttagcatagcgcatcacacctgatactaatatgtaacactcattgagagtttataatatgttaagttctatgcaaagtgctttgtaaacattaccttatttaatctgcacagtaatctagtaagatcctattatccaaaattttaaaatgaaaaacctgaagcttgaaaggttaagtaaattgctcaaagttaacagctagtcagtggatgagcaaacactgattgtgacctcatggagaccaaaaatgatgatttatctaatttaatgtcattgtataatgcctattatataccaggcaccccaaaaatgtatgctgaatgagtgtatggctcccaagtcagtgcccctttgcatagctgggttgagagctcagctctgccaacttactgcttctctctctctctctttttgagggaggacataaagctgtttttatttctgccagcatttgtgttcttatccctagtatggctattactggatcttttaatacattcaaactttctatctgaatggatacatttccataccacctactctttaatcagagattaagagatcttaactcacagattcagcacttggacagagctaggatttttgagctaatgtgtagtcggtatgggatttgcatttaaaaactatttacattaaagtgtgacccacatatgagaaaagactgcgctcttcacttacagctcagtggttttggctctctctttcttctcatagtctatgagatgagaaaagatttccataaagattttatgagtccaagagaaacattactcaaacaggatttatttcaaaggcatcattcttgtggcatgctgtttaaaggggaagcaaagctcatattggtacaattcttatactcaaagaaagtacaaattttgcagaatatcctcttaagacctaccaaggggacaacttcttcaatttggttcaaattagcaaaatataaagcattttcagcatctctgggctcatacttgaaaccagtgataagtgacaataagaatatgattttcccccattcaccctgaaacaaggagaaaggtaattactgtattgttatttttggaccttcatgctctgggacaaaaatatatttatgatgcccaggcactgtgctaaacaccacaaggcaaacaaggcacattttctgctcttaatgacctcgctggtagggaagagacatgtacccataagcaacacattacgcagggagaaaagagttatgagagaaatagatacaagctgggaactcattctggagttctgtcagggcatttattgtctttctgtctagtggacaaactcctattcattttcctgcaaccctcctctgtgaatcctttcctgatcctctgagacagtcagtcttccctccttggggttcccacaaatgttgaagaaaagtaaaatgagaataacagctactaaataagtaattattaagtatataaaaactgttctgtaggagaaaggggcaggaaataattaactgtcaaggaagaagtggagatgcctgaattagttcttgaaaaatgtggggaaggtcgttttggctagggaaagcaggaagcatgaaggcatggcagcatggcagtatgcatagttatggtgtgtttacagaatgccaagcagcgtggggtagttaaagcaaggtgcaagggagggaatggtgtggggaactgaagatgatggggaggaagtgacagaaaatgaaggagctgagttgggatggagtcggattataaaatcttctgttagaaaatttgttcctaatcctgtaggtggtgggagctttcaaaatatattttaacttttacttgtttttctgtgtgcagaaagtaatataagcttattataaaacttagaaatacaaaagaacataaataataaaatgcattagtactgtgtatttaaactacatattcagttttgtatattaattttttaacttaatatcctatattaagcattttcaaatttattcgaaagtttctgaaattataattttaatccccatgtgttgtatcagccacaggtgccagtttatggaaccattaatattggacatatactgtttccttttccccattataataaataatgctgcagtgaacatccttgcacatatcattttgcaccagcctctcactattccctagttccttggtataaatccctaaaagtggtatccacatttcacgttttaattcctaccatgaaaattaccttccaaaaaagttgtgccatttataatcccaccaacaggacatgaagttctaagaggttcagtgacttgtctaagattaaacagctatgaatggagaactggaggcaaatgtgagtactggtatccacggggctatggcagaacttcagtggggagatgggagtggggtggccagaggtaattgagtctggaggactgaaagtgacttaggtgaagactgatggtctaatgagacagcttcaaaggacaggctgtcaatggacaacatttgtaatttcatactttctctaaagctgcctatgtcacgactcttcccacttgagaatgttcagaccaaagagaaatgaaacatatctacctttctattgactgttaatcctttgtagaatagggcattaggctggcattagtgataagggcacatgtgaaaacttgcctgtttctctaaaatttggttcaaggaggattccccattaatgccatgagttcactgcagaggtcaacactgggcatacacttcaatcatccataaagaaaaatggaggtacctatctctttgaggtcacagcatgctttctcagttgtttcctagttaagaaattactcaataaagaatggaagattcaggatccatagttttctcaatcctcataccctgaatttactagctaacttccccctttcctttcttccttccattcttccttctttccttcccttctcttcctccttttcttcccttcgtggctacggatgcagtctagagccaacaggagcaccaaattcaggcaatcaagttatcaaagctccatatcttactcatcacaggcttgaaagggattcagagtcatgtactccagcctacttcataaattctctctaccacaccagctggaggctggtgtttgtccagcccctccttgactcttccaatggtctccccaaggaagctattccattttattacaaagatctttgcactgagtcaaggtttgactcctgcaactacccattggttcagtttctcccagttatttaaactttcttccatagaatggacatttagctacccaaaaacaggggccattttcctctcagtaggtgatatattggtatatgtcttaggctgcggagtaaaaaagacctgggcttccaattttgaatctgccagcaaccagctgtgtgtagttgggcaagttgctaaatatctccgagcctcagatgatttcctctagaataaatgatgacacatttacctcacctcatttagtaaggactaaatgaaatgtcaatagtagggcaaattgtggatggttgttagatgttaggtcccctcacagttgccttttttttttaagtcagtatttctccaaggtggtctctgactagttgtatcgagatagcctagggtgagtattgaaaatgtagatttccggatcaactcctaatcaaccgagttatagtctgtgagtgtgaaatctagacactttcatttgtttagttcagagaagtatccatggagccaagaagttagaaggccttaacacatatgggaactctccaagccttctcagggagtctacagtcaaagacccatatgatccctgggacacatgccttgaattgggaaacaaggccccactttcaagatgtttcttttgcccactctcagatagaagccttccctcttattatggaatttggacttggaagagattggcaatggccaatgaagaccagggctcttcaatataacttagaaggagttagaaggagagggtcagccctagaaggaggatgagctgggcagggcggggctggggttcatgggccagtgcaacagactggaattcagtggactctctaggccaggcaggaagctagagggcctcccatgaccatagcagacacacagtggacacacagtggaattcccagggctttccctgacatgctggatgtcagcgcaatcaactccatgcccaccctctctagtggatgagtctaggctcccaggaagtcctaatactctaatttattctgcttgtcctcttgtcctctcatcctccctttttccctgttgtgtccccgttgtaagctctctcctcacacctaagctgatggctcccagacatctattttcaacctttactcctccccaaaactttagatccttacatccttctacctctggcatcccaggggcacctcaaacttaagatgccatcaccccaggggcacctcaaacttaagatgatcaccccctttgccacttcctgccatcccacacactggccactcaaaccaagggctgacagccatcttattcctcctcccgctttgtccctcaggttaattgcattgctaaccaaatgatgctgtttttaagtctgttaaacctctccctcctctcagtctccactaatactgtctgtgttaattcaggcctcatcatctctcacctgggcaactgcaacaatgagcagtttgtgtctgtgcctgcatccatccttccatcctgtactccagcagcagccagggtggtctttcaaaaatgcaaagctgataatgttactcccctgctgtaaaccttccagcggtttcctattgccttcagaataaaatacgaatcatctggcctccatctatctctccaggctcatcctctctcaattttccatatccttcaggtactttcccaggcatagaagctaagaattccccctttgtccagagccctaggctgaccaagccccactgaagaccatgctttctgatttctgcctctgtcatttccttattgtccctgctcccaatccagctcactgtccaattcagcatggacaggagagacatggaaagaaaaacaactgttataattattgccaaaagctgtgttctgttactatgcattgtgcatagtaagagttcacattaaattcctcattttaattctcacagtatcctgttgggacagacagatgaagaaccagagaccagagagtttaagtagcttgccaaaggtcacacagcagtgtaagcagtacgggtgattcttaagcccacattgtttgacttccgagacatatcagaaaactacgtcaaagaacacgcacaactcagacctatttccagtggcctatgcagaagagctaccctgcttgaatggaaaccccttaagatacactattctcaaaaacctaagtgcttagcctggcttatggaggaggcaatgcaatctaccacaagatgattaagacaacaatgaacttaagacccagccactgctggagaatatctgcctgtgaattcaatttggttcaattcaatccgatttaattcagtgcagttattgagtgcccaccacataccccatagggctggtccagagagaaacgcaggggtccctcctgggaaattataactaacccaagcatgggcaccacatgaggaagcaggaatgggggttctgggatctggggttcaaggcaggaatcttgtggtcagccctggagcacttaggagaagaatctgccaaattcctatgccagtgtctggttggcagcaagctctataatttttaagtagtatgaattctgtgcccatatttcttacaaaatatgtgtatggagaaagataccaccagtttagtctaataggtattctcaggcctaatatatatgaaagaaattgggactggtgagtggttaagagcatgggcttgggagacaaagtcttggctctattacttcctagctgagccatcttgggcaggctaggttaactttctgggctcaatttcctcatgtgtcaaaggggaatgaaaataataccagcctcatagggttattaaaagggttaagacagattatgcatatcgagtgcttagcctggccccaaagtgcctagaaagggtgcaaaaagtgttagtgaatacaattcttatggtcgctgatacttaataaatgtctcctgaataaaagaatgcatgagtggaatgtacaacttaggagagacagatagctagaggatactggatgctgagctaaggctctggactatattccatgggtgacaggagccatcaaagagttttcagcaaggaaacagcacagccagatttggtttagaaaggtcacactggaccagaatagaggatgggcaggagggagaaattctggagacaagcaggaggctgcttcagtgttccaggtgtgagagcacctaaacaaagtcgggcgtactggtgttgcagagaaagggaaaaattggaaagatacttaggaggcagaactggcaggacttggcaaccaagagatgggagcagatgacaaccaccctgctctgtgcaatgtcagaaaagaagaatccagttagggaatcaggggagaagctgatggcctctctggaagcccccagccactgttttcaccgggaatgctgagtgctgcttgttcctctgccccagcacagagcagaggttcatgtgtggcctgcacacagcgtggggcacagtgggcagccgatgggaaattcttctgcataacagatctcagagcttacaactggggccagcagccagccgcaggaaagggtttccccttggcagacaggcctcggctaagggacagaagtcattcctaattgcagcatgtttttcaggggaagtctccaaagctgtttagaaaataaaacctctgaaaacagtccaaataaagggaaagtgactcccatttgtttagagctactttgtgctgagtgccatcactagtttgttctcactcagccttcagcatgactgaagaagaattagctgcacattttacagagggggacactgagactcagaggtttttttttttaaatttatttaaatacgaccatttttcagtggaggaatcagaattcaaacccatctctttgactccaaagtccgttctctttcttctatgacatattttataatccttaattttaaaaggtctgtttcctcggacattcacatactgtggcagtgtaaaatgatcaaatgcttttagaaaacaatttggcaataagaatcaagtatcttaaaaaatattcattctgggaattgctcctaaagaaataatcataaattcagaaaaaaaaaagctttgcacacaaaaatgttccttgcagcaatatttataacataaacaacgaggaacagcctaaatgttcacagaaagaggaatggttaagtaagctgtgatatatccacttaatgaatattttgaggtcaagggtttataataacagagaaaatgctaatgttataagtgcagaataatcaggatacaaaattgtacttagcctcatcaagcgatggtgttacagaaccactgggtttccatttagagaactttcctctccaacctctatcagctccttccaaatcactccagagtttttaaaaaataacactacttaataagaaaaacacataatttcttaatgttatataatgggagaaaaaactctagaactaattttgctgtttttattgatctgtaatatagaatttagtaaaagctatgcttgcctttaagtccctcttattcagaaattctagagctgccaaacctatcactcctctttaatataataattctggaggcagtagtcatataagaagccaaaaaaaaagcatccatgtgggaaagaagaaataaaattacattacttgcagctaatatgattgtctaatctagaaaatctaaaataatcaactttaaaactattagggctgatgagagagttcagtaagatggctggttacagaagaaatgtacagaaatcaatagctttcttatttaccagcaataagcaactagaaaaaaaatgcagtgacaaatggccctattcactataacaataaaaactataaaaggacctaggaaaaaaacctaacaagaaattcactagacttatgtgatgaaaactataaaattttattcaagatcattaaaaaaggcctggaaaataagaggcataccatcgtccaggataggaatatttactgtaaaaattttaattctctccaaatcaatctacaaattcagtgaaatttcaacgaaagtcacagtgaaatttctttgggggaaatctgaaaaatttactctaaaattcatctggaaaagtaaacgcacaacaattgtcaacaaatattttcaaagtaataataatgaaggaggtcttttctgggtagaaaacaaaaattattacaaagctatggcaaaattcaaatgatacaattatgacacagaaatagattaacagagaaataaaatagaagaaaaagtccagttgtagaaccatgaatagagctgaactcagtttatgatgaaaggactatttcaaatcagaaaggacaggtttggagttaattcattattcatttataactaaaataaagctagatctatagctcaaacctcgtacaaaaatataattcacacagattaaatagctaaatgtaaaatataaaaattctgagagttccagaataaatagagaagactatttctataatttccaagcaggaaggtattcctaaccaagacacaaaactgagaagttttatgtgatcaaatcaggagatcaactgatttttgttgttgttgttgttgttgttgttgttgagatggagtctccctctgtcgcccaggctggagtgcagtggcgcaatatcggctcactgcaagctccgcctcccaggtacatgccattctcctgcctcagcctccctagtagctgggactataggcgcccgccaccacgcccggctaattttgttttgtatttttagtagagacggagtttcaccatgttagccaggacagtctccatctcctgaccttgtgatccgcccaccttagcctcccaaagtgctgggattacaggcgtgagccactgcgcccggccaagatcaactgatttcaacacacacacacaaaataaaacttatgctgtgagagacaacaaagtaaggctaaaagacatgctactgattgataaaacctttttacaacatatattgattttaatacatgttaaaaatatacaaagagctcctataaatgaataggaaaaacaaacatgacctgatagaaaaatgggtagagaatatgaacaggcaatccagaaaataaaagtgaccatggacatatgaagagattactaactacactaataattggaggaatgtttttcacccactgagatggataaaaacaaaactttaatttggaaaagagttagggaaatagccactgttatacatggttgatggaaacatgaaattggcacagtctttctggagtacactttagcagagtctaaatttaaaaataatgtatactttgacccagaaattctattttaaagaaagctatcctattaatgctccaatgtgcactgaggtatattcatgatgatgttaactataacattatttgaaatagtgaaaaatgcaattattagggaaattgttaaaaaaaatgaggctgacatatatatatatactgacattgaaacatatttaacgtagacatttaagagaataaaagcaagctgtagaataatatgtttatgtttcacctcctatcctgtgtgtgtgtgtgtgtgtgtgtgtgtgtgtgcatgcgccagcgtgtgtgtgtgtaatgcctaggctaatagaccaacttaataatgcttagggaagacagtggaattagggtagggatttaacacatagacgactttaacgttttattctgtactctcaggtatgctttgaatttttcacaaagagtataaattactcataataaaaagtgggtatatacttaaacacatacacacacactcacacaatactctatgaacacagctctttaaaaacaaagccatacctataaaaaaaagagaaagaaatgaatcaaaatgttcatgcatagagtttctttattcagtttttctcaattttctaaattttctttaatgaccatgctttatgtttacaatggaaataaaaaatataatactcgtctgcttttgtggggatctaaatatatataaaagaatatacatattctttttctttcttttttttttttttttgagatggagtctggctctgtcacccaggctggagtgcagtggagcgatcgttgctcactgcaagctccgcctcccgggtgcacaccattctcctgcctcagcctcccaagtagctgggagtaaaggcgtctgccaccacgcctggctaattttttgtatttttagtagagacggggtttcaccatgttagccaggatggtctcgatctcctgaccttgtgatctgcctgccttggcctcccaaagtgctgggattacaggcatgagacaccgtgccctgcctattcttttaaaattaaatttttttttgtgggctctttttttcagcccgcatcgccaagtcaatcctaagccaaaagaacaaagctggaggcatcatgctacctgacttcaaactatactacaaggctacagtaaccaaaacagcatggtactggtaccaaaacagagatatagatcaatggaacagaacagagccctcagaaataacgctgcatatctacaactatctgatttttgacaaacctgagaaaaacaagcaatggggaaaggattccctatttaataaatggtactgggaaaactggctagccatatgcagaaagctgaaactggatcccttccttacaccttatacaaaaattaattcaagatggattaaagacttaaataaacgttagacctaaaaccataaaaaccctagaagaaaacctaggcattatcattcaggacataggcatgggcaaagacttcatgtctaaaacaccaaaagcaatggcaacaaaagccagaattgacaaatgggatctaattaaactaaagagcttctgcacagcaaaagaaactaccatcagagtgaacagcaacctaaaaaacgggagaaaatttttgcaacctactcatctgacaaagggctaatatccagaatctacaatgaactcaaacaaatttacaagaaaaaaaaaacaaccccatcaaaaagtgggcgaaggacatgaacagacatttctcaaaagaagacatttatgcagccaaaaaacacatgaaaaaatgctcaccatcactggccatcagagaaatgcaaatcaaaaccacaatgagataccatctcacaccagttagaatggcaatcattaaaaagtcaggaaacaacaggtgctggagaggatgtggagaaataggaacacttttacactgttggtgggactgtaaactagttcaaccactgtggaagtcagtgtggcgattcctcagggatctagaactagaaataccatttgacccagccatctcattactgggtatatacccaaaggattaaaaatcatgctgctataaagacacatgcacacgtatgtttattgcggcattattcacaatagcaaagacttggaaccaacccaagtgtccaacaatgatagagtggattaagaaaatgtggcacatatacaccatggaatactatgcagccataaaaaatgaagagttcatgtcctttgtagggacatggatgaaattggaaatcatcattcccagtaaactatcgcaaggacaaaaaaccaaacactgcatgttctcactcataggtggaaattgaacactgagaacacatggacacaggaaggggaacatcacactctggggactgttgtggggtggggggaggggggagggatagcattaggagatatacctaatgctaaatgacgagttaatgggtgcagcacactagcatggcgcatgtatacatatgtaactaacctgcacattgtgcacatgtaccctaaaacttaaagtaaaataataataataataataataaaaagaaaaccctaaagacaccatcaaaaaaaaaatggaaatttattttttgtcacaaatatgtatatttgtgacaactatagtatatacactagtgagtttttcaataaaatataatttgcatttaaagtcatttagcttttggcaaactggaggacaccatgtcagacatatttaatttcatatggggggatattttaaattgaaaataaaaataggattaaaaattttaatcttaaaaaaaattattgatttatttttcatttcaatagtttttgggtgtacaggtggtttttggttacatggacatgttctttagtggtgatttctgagattttagtccacccatcacctgagcagtgtatactgtacccaatatgtagtcttttacccctcaaccccctctcaatcttctcctccaagtccccaaagtccattatatcactcttatgcctttgcaccctcatagcttagctcccacttataagtgagaacatacggcatttggttttccactcctgagctactcctcttagaataatggcctccagctccatccaagttgctgcaaaagacactatttcattcctttttatggctgagtagtattccatggggtacatataccacgttttctttatccactcattggttgatgggcacttaggttggtttcttatttttgcaattgcaaattgtgctactaatactctctattcttttaaagttctgcttactttttgctgtaagcaaattcagtaaaataatttctctttccctctgagtctggttgggtgactttgaagcagaaagtgaggctgggcatccctgggccctcagcaccaacttgagtgcattcgtaggaggtgaatgaccaaatgcagacaggctcaagagcaaacaggtctggtgaaagggttcatgttatcctatcaaaaatgattaatgggatttcctagcataatagtatctgtataataaattgatgatgcttgattatgactgtgaatggatcatcatgctttgcatccatccaattcccacatcactagaaacatctgggtcacagctctgcctggtacaatctgaatggaagaggaggggaaagaaattaaaacagaaagggagctaaaattacttataagaaaggagggggagtggctatcattgagtacttgctctgtgctacttacctcgtaagcacaatttttggcactattctatctattttgcagctaggagcactgaaagattagtcacttgcctaagattgcccagtggaacttggtttatctgagtccagatcctggcctcttcccatgggccttccaggcagaggataggagaggggaaaggatggggaagtgaagcacaaagcagctttcacctacatagagaagaatgtatctgaactctgagcccttttcttcctccccaggctgagctctgaaacttctcctggcagttcaagagagcgatggagggaatgctggggcacatctaaataaagcctccaagtgggagttcctgctcagctatgcatgagctctttgtgacttcatctcccagcctacaacttgtgaaataagcacgacttcactcagagcacagccagaaacatacaaactttccaaaaatatttgaatgttgacagcagactgtcttgcattccagtgaataattggtttgtatgagtgtgtgtgtgacctaaatccacagaacttaccattctgtggctatacaaagtaagtttcatagccctgattttccaaatctcaatggttaattgccaagctagcaggcagccatgcctttttccaggatgctggggtggctgatactggactttgaggcagtcctcttgctcactggctgcagcctgctagaagggcaggagatcaaacatatcccgatgtggggtctacagctgttgtctgacagtggtgacagggacagggggattactgttaatggggccacctggataatggattcttctttttttctgtgcctgcttgctaggaccactgcctacaccacaggtttctgtggattcactcaaatttcagtggctccccaaggctgaagggaaggtggtccttccaagggtcacttttagtgagctgggtctcactccagagctgcctaggcccccagtgttacagctctgtcagtaacactgccttttgatacacgtacacctgtagcaggtggtgccagtgtccttcctgtaatactcgatctttcagagtgggccagctgactgcaagctcccagtgtctgcatccctgtgctcgaaggcttttttcccccaatgctaggccactttgcccatgtgcacagcaggctggaagggctagggagttaataacccctcaggagcagccctcattcaatgactttcaggaattggtgtataaatacctcagctccctcattccttgggtgggataattctaagatctgggttctgcagacctgggtttcctagagtgtccctgtgggattatggcccagacccccattgtggtagctggtatgaccaccctttattagctacagtctcttccctgtattatgtccctcttatctgctagtgtcacctgtgcttcctaatagaacacttgtgcttgaacccttgtctcaggcctgcttttggggaacccaaacttggaaaataccctggttccagaggggcaagaactccagcatcagacacataatatgcctaggagcagccctcttctgggacctctgtcttgttggggcatccgggtcactgactgggtccccatctcctgcagggcaagtctcctctcaggtatcctgtcttccacagggtcccaaatccttttcccccaagatgccccaggtacttctgtggagaagaggtgctgctttgctcctgtcaaccacatccaaccccaacatctttgagcttccacttccacatcagaaaaattgaagtaattcttgcccacctcagtcagtggccatgaggatgaatatcaataatcgctacattattgagtgttacctacatgttgtatgttagattctctgcttaatgctaatttgaaattgacaacagccctaagaaatataaattattattcctgatagcattgttttaaagctaaagaaaccgaggctcagagaggttaaatagcttccccaaatcccggagcagagctttgaatccacatctgaccttagagccctctaggcaaacagcttctcatgatacaggcacagagcacctggtgggaatgcctgcagggtgtatgggtttgtgggtcaggggtgaaagaggcagggattggccctacatgggggtactgggaaatggtctgagtccaaggaggtgtgggccaaaattggtagtagagcggatggggatgtatggtggatgaagtgacagaggtttgggaggctggaccttatattgagggaatcatgggtaagacaaaaggttagcagcagcagggccaccccacgggtggtggctggggaagcgcggcttgaggcattcatgcagagcttgagcccgccctctggagaggcagggggacttggtgcagggatatggcttaagtggccttggcagaaaggtggcaggctacactggccgccctccagaaaggctgagagggggatgccgcatctcatccgggtccctaggcatgggatgcaggctgttcccagcccccatgagtttgtggggttgtgaatattaaacaactttgcagccaggtctttctgggttatgggatgaggggtctgaagccgcagtgctcaggcatcccagggcctggtcctgagcaaccaactcccctctcaactgtagcacctgctggcaccttgacccagtccctgatgagataccgtcatctcctccaagacggaagcagtggcatctccccacgcttcccagaaccccagagtctgggaggcttgcaggtccctaaatccaagctgagttttcttttgttaagtcacaggataaagcactttacatattaatcaggttaggaatatgagagcacatatcaggggactgaaatatgtagattttgatgatgaattcatgctcatcagaaaaccaatgaatcatcctaacttcattatcaggaattatttgatgggggaattggcagagggggtaggagggtaaggaggggagtagcgagggggagaggatttcttggttctcagcacagactgtgttctcttccatcagcacatttttgcagtaggaccatttgtttctgtgacatgggtcttacacatggccacatactggaggcctcggtgaagcttgaggacatcacctggtgaggtcacaccaagattcagggcaaaccaggtagagagatataaataaccccacaagtacaactatttttaccattgttttaagattaccccagcagtccctcctgtgacactaactccctgggtgactttggcaagtcacatgccacccacctgtgcctcagtttcttcatctggcgaaggagaatgatggctgtggagcaacagggctttcaggactggaaccaagaagaggggttgaactcccaacttccaggctccctatgagctaggcacactttgaagtgtgaggatctggctgagaaggagcaaacatgggcagacactctactgactgggaggaggcatctgccattttaaataggtgattggggaaggcctcactgtgcatatgatcttaaaggtggcacctgaaataggggagggagtcagatgtgtggatatctcagggggagaggattccaagcagaggggaaagcacgtgcaaaggccctgaggtgggaagagcacgcgtggcatctaaggaccagcaaggaagccattgtggctggggaagggaataagagggagggtaggagaaggtaaggtcacagaggccgtggtggagggggcagggttacagggggcaagcctgtaaaagagggtattcaggccaaaacagtattgtggaaaggtgagaagatgaaccagaagctaaagtggctcctctatggggtaaactgaggcactgaggcacaagcaatgaggagccaggacaggcagacaggtgaggaacaccacatgaagtagggtttatgtggattcagatcctgctggagccaggtgctgctgtgaccctctcatgtgaagtctacaaacgccggctcagtgctaggtggccagcaaacattgaaggtggtggaaacagatctggatcagacatgaagagcttcgattctgccctggctctgccacatgtttgctgagtgatgctgggactcaatttcctcatctgtggaatctggcaactggacaaaacactttctgttgaactttctggaagccagattattttatttctccagggctttctttcctggggtaaacaagctgctgctgctgtctttaacaatgcaagtaaaaacctgtgggttcatactgtgtatgtccacatcatgactgaggtcaagaggtcacccctcctgcagccagcactgcttccgtggggagcaactgaggacacagccgggtgacaacagagccaggagtctcagcctcactgtactgtggaatcacccaggcactaccagggacaaaatgagctcaattcacctgagatggggagcggcaacagctcactccagggaacctcactgagcgtctttgagggaaatacaaaatgagttgattcaggtttgataaacatgtatcaagggccctccatgggcaaggtggttccacaaatgttatctccctcaattctcccagagacccgacggaggaggtatttccctcccattttgcagatgaggaaaccaaggttcagaagtcaacatggcttgtgagtgtgggtgtaaggtggtctcagtcaagaccctgggttcctagtcactttgtaatattgccccaattaaacccttatcctgatccttggagttagattgagagaggaggacattgaggttcagagaggtgaagggacttgcctaaggtcacacagacattacatggcagagatggcatttcctgccagctcatggagtcaggttgctaaaaaatgctattactatttctcttgcagtcatgataaccaaacatcccactccccaacagcccatctgagttgcggttcttgttgaagggatatcgtggagtcattgccagactccgaagagataaagcactgcaaattgaatgagaaaatctattttcacatcctgatgaagacatagctgacaatgaaagagtgaattgttttagacaaaaacacaaccccctgctttttccttttttaaaaaaacttaagagttacagctttagaaaaataggagcagctgactatcacagataaaaatgcccttttgcctaattggatctttaataaggaatcctaattaatccccctgaataaagaacttttacactggtgttatctcagcccctgtgctgatggggctggttatttccagacacagaataatgaatcttttccagccggggctaggagtcgccagagacttgtcaacttccctatgaaggtaattacttgctaaggcaccaggggaatgtggggctggggaaagggtaattacaaaaagagggactgagggcattgagggggaagcttaggagggcactgttgagccagggctgaaggaagcttggcaactgtgaaggaaaccgctggtggaaagatggaggccacgtcagcgtccaggatgtcattcccagctcagagtgaggcctgaaggacacttgccctcatgtgaaaaatgtcacttgatggagcttgacagattccaataattgtgagagccaaacagacagcaaacagaagtcaggaagcaggcctgcctgtgactcttcctggtcggtgcaaaggctgggctgtcattgcccggagacctctgtggcatccataaagacaacactaaatgaaaagggttatctggacaactcaggccacagaccagcaacgagaaggacgtgacggatgtggctaaatgacacgggccatttatctgcattgacagggctctcttgaaaggggaacgctgatggcagtctgtcccacgctcaccagggctggcatctagggagctggcaggatgtgggagccaaggcctcgatgagcctggctatctgtgaagccagcccacatcaaccaaccacagcccaaggcccaaaagcagccccagggggaagaagctgaagccaatggcataggcccagggccatctctccaggatacccaaggtctctttccaacctccaaaatccagaggggcagaaagagcagaggttgggaggcaaagggccctggcttcaggctgcaacttcctagctctgtgaccttgggtaaatgacctcactgagtctcgggttctcagagttgcttaaaggcacaaaggaaaaatcagtgtagactcctggcatgtcgttggtaccctacacatagtaattgtattttcttccttaaaaccctctcagttccagaaaaatcaccttaggaggcagatcccactggaagggaatctgtggggttggatttatatgtgaaaaattaggaggtctctgtacaccaatctgcatgttcccagcaggttacagtgagggtggtgaggacccatcacctgccttataaaactagggcaactgaagttcagaaagctaagtgacttgctgtgagagaagagtaaaagccattattgttcaaccccgactttccccatgtgcccttcagggtactgccaaatggccctgggacctcagggctgcctggcccaaggagacatgacaacctcttgctgtggcctctgcctcggtcagcctgaagctgcctccctgacttatcaactgcagaggccaagacccacaggaccttaaacctctgaaagaagctgtgtgtagctgtctgcacggagcatatgctgggaggctctgggagcagggtgagaggggcaggggaggaggggaggaaagcccttccaggtgctgtaaccatgaaagggcagaagaaggacacaagctggatttacaagctgggaatctggggctgttcaaagtcttctgtgcccaattatttcttataactgtatgaaaggccttgagagggtcagaaagttaactgaggtcacacgattagttggtagcagaattggtatttgaacccaacattgagtccaaatgctatctatgctccatggtgccctccttggtgtcaggaaagaaaatgaattagatcccagaggagcagaagagaaagaggggtagatcaggatttagagtccagatgatggggatccaatttctggctcggacacttactagctatattacatcaggtttcttaatctctttatgataatattattattttacaagagttttgtggctgggcgcaatggctcacgcctgtaatcccaacactttgggaggccatggtaggtggatcacctgaggttaggagttcaagaccagcctggccaacatggtgaaaccttgtctctactaaaaatacaaataaattagccaggtgtggtggcaggcacttgtaatcccagctactggggaggctaaggtgaggagaattgcttgaacccgggaggcagaggttgcagtgagctgagatcatgccattgcactccagcctgggcaacaagggcaaaactccatctcaaaaaaaaaaaaaagagttttgtaaacattaaatgagaccatgcatataaaaaccttagtacagtgcctgaaacatggtagctctcaaagtgattatactgttgaaggtatattaaggcaggaggaaggcagatagagactcaaagaggacagattgcatcaaagcctactttaagggtgagaaatgatcctggagtggctggcctaggatctgcagagggaacaaaatgggaaaacccagctggggagaaccacgtgtaggtgaggaggaagctaagtctctgaggctcagtttctttatctgcaagatgggtatgccaatacctaactcaaacttgggggtgaagacccaatggggcaagatggcattccacacatgtgatggcctcaattcaatcatagaggcaaacaatgaatatttgcctgtttatttatcttgacattggtcctgttgccaaagggctctgacaccaggcgaggtgagccaagtgccatatgcttttccctttgatgctggtgagatgcggttggctgtgagaaggtgctgagactctaagatctcagaggctatatttattcaacaaattgtcagaaaatctttacacctgtctgtgccaggactctactgagccctgaggattcagagatgatgggccaagtccatgctctgaaagagttcatgttgggaggaggactctgtattctagaaaagtttggcttgtgccagtgcgtcgtaggagcctggggttgcccagtgtgggtggggctgagggagggcacaggtcccaatgcatctaaaggtttcaggagggagacccttgcacaggcttataccaggtagacaaggaggtgagactagacttcaaggctaaactttagcagctccttgaaaggttgagacttcctagttcagcattgtaatcacaaagcttatcacagaaactggcacagagtaggcaaggaaaaatatttgtgaaataaataaataaagtttactaggagtcaatgtgcttcattttatggaatagatgtgcttgcccaaactcacgcataagccataaccaaacctatacgtcaaacataactggggagaaattcaataatgaatcaattcataaaaagacaaatcatttcataatgggcagaatctacttcctttatattatcactctggaaagtattctatttaggcccagggtaactcttaaacttaaatctatttcagaacacccaggaaaatggttaaaaatactgaattagttgagttctattctcaggaatccatgattttacagaggtggggctcaggaatctgcattcttccaaagagcattcaagcaagtcttctgaagcagggagttggtcagtgcaacccagtttgagaaacacaggataagtcctagagggcattttttaaaggaaacacagggtattttttttaaaagttgggggtgtaactgagatggatcagaaactgcagggctcctggaaaccgccccatctggctgcctcttcttcccttaccctgcctgacacaacatagagagatgtccctctatttccagaaagacaatcaactcctgaaaagcccattttctacttcactctttgatgtccttcataatctctttcccaaaagcctctcatgctctatcacatcatgtttctcctctttggtgcacacgaatccacagtgagctgtaaaaatcaccgatgcctgggtccctccctgggcatgctgacttatttggtctggggaatcaccttgtcaccctgctggttctaatcaggatccgagttgcatggactgcactaaaccctttatccctgcacctttttttctggcccggagattaatgtccacaaacccctcagctttcgctaagtatccccctcagccatatctccagtgaccagaagaggtatctagagaagaaagataaagccacatgcaggactggctctggaggctggaggctacagataaggcttaagaggggtccctggcggtccccaagttcactcctgagagtgggaagcctgttcatcaccctctgattgcctttcctcctgtctctctgggttttgtaggccagagacatagagcactatatggactcctggtgggacaggttgctggcaaattgatttcaccccaaccccagggtgggcaagcagacagtacccatcaaatctctcacctccttcctgccagacacagggcactgcagctcagaggaagtgagtgaatagctgaaactgacgtggctgcagaaattgacatcaagtgccagacaggcatttgcttagcaaattggctaattttaacctctgcctcacagaccaaaactctctggaaggaaagaaacaaaaagaaagtgatatttaacacatttctatttctgtgctacacagtctctctctgaggttgcaagtttgagcctaattgatttcttagtcaaaagaaaaaaaagccaaaaaggaaaaaacaaacaactgagagagatctcacattgcaatcaaacctctccagttctgttgtcgactgctgagcttttttttttttttaaagactggccaagtgacttgcataatttaagatcctttctagcactgatcagcccgctctggccaagcagtttgctgattaattattaatcagactgagtttaggatgagtaatcagcaagagtcagtgctaatttgcaaatgtcccccaggaaggttattacttaaaatacttggtggagaggctccatgttaacctttgcaattagccacaggacattgtaactggcaaggcagaagcagatctctcctccaaacaaaccaaccttggatacctactaagtgccaagatgcacattaggggcttgtcacggttctgctggcaatggcaggggaggggaagggcacagaagaaaaagaaatacgtaagtaagcaagaaaatatcaggtattgatgaatgtttaaaataaaacaagatcctctgatagacagcaagggttactttaggctgcatggacgggaaagtcttttctaaagataggaaatttacattgaactctatatttcaaaaaaacagtggtttttgttttttgtttttttaacttggaaggaagatttgaagactgtgaaggaggaggatcctaagccctgggaacagctagtgcagaagcccgagcagggaacctgcttagcccaccctagggacaggatgaagagcacagagaatgggtgtgagtgagggataggagggaagtcagacaggtaggcagtggctggacaatgtagggtcttgtaggattttattctaaatgtgatagtaagccattgggaggctttaaacaggggagacatgatttgattaataaacccaagtcactctaggtgccatctgcagaatggattacagaggggtagaagcagggagacaaggcccccgagcagcccaaaggtgctggcggaaccaaatgggcagaagcagcttcctcttaggaaaacagatgtgggaggtcgtggagaaggctaagagaacagattatgagtggggaggggatgagaagtccaaactggatggaaacaacccaaatgtccatcaacagatcaatggataaacaaaatgtggtttagacatacaagggaatattattcagccttaaaaagaaatgacggcccatctccttgtcgctactgttccattttctgcctatgaatctgactattctgggtattcttctttaatgggcatggagttccatttgggaaggcaaaaaaggtactagagatagatagtggtgttatccaccactaaatagccaatgtgcttaatgctactaagttgtacacctaaaaatggaatgataggtttttttgtttgttttgttttgttttgttttttgagatggagtcttgctctgccgcccaggctggagtgcagtggcacgatctcactgcaagctccacctcctgggttcatgccattctcctgagtagctaggactacagtcgcccaccaccatacccagctaatattttgtatttttaatagacatggggtttcaccgtgttagccaggatggtctcaatctcctgacctcatcatctgcccgcctcggcctcccaaagtgctgggattacaggcatgagccaccgtgtccagccgataggttttatgttatatatatttttccgtttttttttttaagagacagggtctccctatgttgctcaagctggtcttgaactcctgagctcaagcagtcctcccacctcagtctcctaagtagctgaaactagaggcacatgccactgtgcccagcgatatgttcattttaagattcctgttaatatgcatgaagcccagaagacccttgaggactgaaaatttaaatcaagagccactggcatctagatgatattgaaagcccatgtgtgatttgttggggctagctgggaaagagaataaaagagaggagagtcccaggaccctctgggtagtccaagcataaaggctggacagagagtggacgttggaagaaacagcaaaacagactaagaaggaatggccatagggtaaccagctacatggtttcataggagccaagagaaggaaatagttcaagaaggactggtgatcagtgtcatgtgttgccaagaggctgagtcagatgaagatggagaaacgacactggaatgggcaacctggaggttgctgtcaattttagcaaggtcagttttagtgacaaagcagggcagaaactgagaaagaactgtctcagcaattggcagtggctgagccattccgtggtagctgagtgggatggagtaataggggtttgatgggtgctgtttttattttgattttaggtggcagatattggaacatgcctttatggtgttagaagtgctcaatagagagaacaattgtggaatgcaaggaaaaggagatacatatagtagggaaattttggaggaagatgagctctggagtacaggagagggctggcctttgacaggaaccacggcatcttgtctacagaagcatgaggtgtggcagagaactcggctcaccaagcatctcatctgctcatccccgtttcctggctcccttgcagcaaagctggactgtgtgactgtttgtggccaatgaaatatgagttggaaattatgtatagcatatctgagctagagtggtggaaagccatgctggattctccactcattttccctgtcatggtattaaagaaggccacatatttcagatggtgtggttagaatatggtgcaaccccctcgagcctgggtacccacatgtgtgatgatgtggatcagagccactcccactggtccatcacaaatctgtaacatgagcaagaaggaaatctttgtggtgttataccactgagttttagggttaataaaatttaaaaaaggaagtggcaagatgtgagcctggggtggttacttaggcaagggttagatccagatgggccttgtgtgccctatcaagggattgaattttaatctgtagacaacagaagatgattgaaagcttttgcctggggcttagcatgtcagatctgcattttaattaagccattctcgtagcagtgaggaggatgaattggacagtgccaagatgctgggagatcagtaaggaggctattacatccctcaaagaagaaaagatgatgggctgaattcaggcagtggtagaaaggatggaaaggtacagtatattgggagaacttagcaattaattgaatgtggctggtgagagagagggattaaatagggatattcccagatttctggataactaggtggggaatggtaccataaactaggaaaggacacagactgatgattttatgggtcaattatgagcaaaattgagacaagttaagttggagatattggtggtccatcaaagtggagatgtccatcaggtagctggctctacagtttgactggctcagtgggtaggctgggctagggagccatatttgggaggaaataggtagtacctgaaatcttgagagcaggtaagactaccctgggagatgtgtggagtgagcagagcagtacagcaagaaggaatggacatcaaaggagacacggaaggaatggccagagagatccaagaagaatcagaaagagtggcatggaggcaagcagaaagcagagcccccagaggagaaaatgactgacagtgtaaagtaatgcagaaatgtccagaaggtgagacctgaaaaacgccttctggcattggtaattggaagtggtagtctttggaatggggtaggggtggggttggttatttgatgattatctttttttttttttttttttttgagacggagtctggctctgtcgcccaggctggagtgcagtggcgtgaactcggctcactgcaaactctgcctcctggctttgcgccattctcctgcctcagcctcccgagtagctgggaccacaggcgtctgccaccacgcccagctaatttttttttttttttgtatttttagtagagacggggtttcaccctgttagccaggatggtctcgatctcctgacctcgtgatccgcccacctcggcctcccaaggtgctgggattacaggtgagagccaccacacccggccctttgatcatcatcttaatgtgagtgatttcaggaggaggctggagggttgaagagtgggagtgaagtaggtaaggaatgaatggggagagaagacttgagggtagccagtgtagaccactcttcaagaagcttgggtgagaaattcccagggatgctagagatctacctcgtccatgaagccacctcattttgttcaaagaaactctgccttctccctccccaaatgacccaaactgttgagatccaccatatgtgaatttgaactgttgagtttcaccatatgtgaaatggtgattttgccatttcatcggactgtcattgctagttttttgtgtgaatcctgcctctctggtgagtctgtggatgtcacccatcagccactggataaagagaaactaggatgaaaagaagtacagactgggctgggcgtggtggctcacctgaggtcaggagtttgagaccaacctgaccaatatggtgaaacaccatctctcctaaaaatacaaaaattagctgggcatggtggcatgtgcctgtagtcctagctattcgggaggccgagacaagagaatcacttgaacctgggaggtggaggctgcagtgagcgagattgtgacattgcactccagcctggctgacagagcaagactccatctcaaaaaaaaaaaaaaaaaaaaaagaaaagtaaaaaagaaaaaagtacagactaagggatagaactgaagacttaagtcagtcttgggaacctgggaagtggttgcagtagcaggagagacgcaaaccaacgtgaaacaacatgtaggttaagctgagagtgagtggaacaaacattcatggccaaacatgaaaacagagaccaggagggggccttgaacattcagaatgaagcaacatcattccagaagacaggtcttgccagaacaaggggctctggaggacccagaacaactccttccatctgtcttagcggcaccatcaggcatctggcagctcctcaagagaggtcgaggacagcattttgttctctggtgcccttcacagtcctggcacaggccgcctcgcagatgaggcacttagtacaaacctgttgcatgcagtcagacccatggggggcaggccagctgcccgacctcagcttcccatgcacagaactttgccaagtcacaagctttagcagagccgctgtgcccactgcgacaacaccagttcacttcctgctcctcccagctgtgacttttgttctctttttgagagcaagttctcactagtggaagcaaggaagtcacattgatactccatgtagagtgctggagccctggccttcactcctccggacacatttgtgccagcagcatgctaaggcactaatcttttcttactgctccgcggcagagcttgtaatgctatttccaactccaagagatacaggagacgagattttaaagggctggttatttatggcttggctcctgatggatacagcagatgcaatttcatgggctccatcaaaaaaggacagttacttagtgtgacttaaagagttgtgatgtgtcaaggaaggagagagaagcaaaggcgtcacaagcccacaggaaggcaggaggtctgaggctcggttagaatgggccttattcgcttaccagctcagccaacatgggttcagcatccttagtcatgcaccatctgagctgttttctgagtgtctctgctagcttgagaccttgactctgccttgctcctgacattcaaagaggaaacctcagaggacaggtaccaggcctatgctacctccatgtacgaagttcaggagcaaataggacattgagatgataagcctttacatgtgcagctccctctgcctggaaagctgccacctgagttcttcccctgtggctccttctcaaaagtcaggtctcagcttaaatcctaccctcctcagagaggtcagatttagaatagggtccccactgctgttattccccatcctgttcatttcctttatgacatgtgtcatactttctacatttatgtttgaatattttactaacttcagtctcccccaaatagaccgtaagttccacaaaggcagaggccttgtcttctccaccattgcattcccagtgccaagttcaatgtcaagcaggagaagggcctgagtagtttgtttgaatgattgaatgatgatggagagatgctggtaatgaagatgaaatggtaagatgacagtgaccataatgaaggagattttccctatgaaagacgatgctggtgctcattgtgaagatgaccgctcatggtcctgccagggtattgaacaccaagctttcaggtgtagctgttgattttatctgaccaccttcaccagtcttatcccaatgactgtgaattcgtaaccaagggcagctgtgtcccagcacatccagccttatcttcttccttcttgcagccttgacttccctattggtgctcattttgtgctggagagaccaatgggcattgccattccccactccaccccagcccacttcttctcctgtgttcctctcttcaatacatggccccaccatagtcattcagccagaacttgataatcatcagcccctcctcctctctaccccttcatagctgcctcagttcaaggctggattctcttgcctgcagagtcacaaaaaaagttttatagctgatttctgggccttcctgtttaacccacttaaaattcagaatgattattttacttccctgcttaaagtctcttaatagctttccacagcttatggaatcctctctggcttatgaacaaggggcagggttcttgctcctggtccatgctcctcctgtgttcattttgggcctcatatcctgcacttcctctcttgctccctgcacctgacttgcaatgccccaaatgcaccagggctcttttcggctccatgccaatggcaaaatcttacccctcagttcaactcaaaaatcatcctgtgggactaatttttccgagcccttccagcatcaccgccctcttacaggaaggttgatgacttgtttcaaggacagtcttagtttttgtcttgccagggcttccactcccagcctgagttttggggagggcagacagtcacatgatctggatccagccaatgaggacatcccttggctacactggtattgaggggtgggcacatgactcaggctggtccaccaaggtttatccgagggcttttgtaggacccattaggaaagatatgctccctttctgctgggattgccaagagaggtaggttatagggagctgagggtggtcccctttgccacctcttgggaaagcctgcctgagaatgaaactaacacacaagagagcaaagccttgggatggggagaaacattatttgcataccttgatccagcactgcctgaagtcaagttctggacttttcagttaaagaggccagcacattccctttgtagcgtgagttagctggaggtgggtttctatttcttaaacccaaagaatcctggctattacatttctccttatttcctaggggaacttctttatacctcttagaaaagcacctaacacatgatattgcaaagcatttaattatattctgcctctttgccccgactgtgagcttcagggtccagcacagtgcttggctattacataaacatttgtggaaggaataaataactccttaggaacccagactgtggctttgtccctctagcacctaggagagcctcgttcatagaagagtctcaataaatgattacagaaaataaataggggaaaagtaacaaagaacatgaatgagctaaaccaatggtttgataaagcatatgtgaataaataaataagtggatagttattattaacaaatctccattggcgtgcaattctcattctaactatatctggatctaatggctcttaaatgagatatctagttaaacgtcactgagatcaaatggttctagttggctcaaattccatgggtaaaatgcctaataattaaagcaagatcattcaagaggagaaagagtgttgctagcaaaattttcaaagtgaacgtctgcagagtagacagtttttgtatcgccacctacaaaaacaaaagcaaatgaatgaagggaatgaagtgaagcaaatccgtcaaagctctaaggacatgaaaaggagggatgaaattaaggaaatttaatgttgaaactcaaaagggttacttgctggacctagagagtaggttgagcctgcttcccagggaaattctctttccaaaaacagccaaagtctacccagtggccacagggccaggatctgggaagtccagacagatagagcaggcatcctattcttctgcaggtggagggagatgcctaggctcaaaggtagatgccagagccccggggtgggtgcatgctggacagcatcttccttagagaatttctgggactatttcttcttggactgtgtcccagggatcaaggaactcccacactttggccaggaggactaggcagaagccctagaagaatgcgcttcccaccacctcatctcctatattaaaatggtatgcatccttctcgacctgtctcaagtgcagcctctgccttgaggccttggtctcctgccccaggacagtgtcctcctctgagccctggaaggtgctctcctttctcttcctactttgaatgtttggtggagtttattagcacacagttttgtggggactgggcctgggagtgtggggacatagagaatgggcaggcagagcccatccagggtgatccgagtgaaatagataaaaaaagaaaatcaatatacagtggccagggcaaggaagagagactgggaaccactggccaaaactaacccacagagtcacagccaaggaaattggaggggcagaggtttgttccaggatctacacagaaatcccacgggtggaaaggagctttggacgacccccgcatcatacacccccccacacacactcctgaggctggcacttccactggcccccaagacaagagtggcttcaattctgagtgcaggtcagactctgtctgccttccctgttgtaggaagaatttgccccttggggaggggtagaggaaagaaggagagaagaaggcccaatagaaccctccaaccacatggtccagagagagcgagggggcacaagcagagatgcccctcccatctctggtagttgtctcctgaatgccttctccatacttatggtccctgcccccctactctgtgagcaccccagtacaggggctgtgcctgactcactgtggagtacctctgctttcctagtcctgcacagagctcttagtggtagctgaattggtagaatcctcttctgcttttctttttctttttgctttttagacagagtctttcttactctgtctcccgggctggagtacagtggcacaatctcagctcactgcagcctctacctccagggctcaggtgatcctcccacctcagcctcctgagtagcagcgactacaggtgtgtgccaccacatccgtctaatttttgtattttttgtagagacaggtgtctccatgttgcccaggctcatcttgaactcctagactcaagtgatccacccacctcagcctcccaaagtcttgggattacaggtgtgagtcactgcatccggccctcttctgcttaacaaagcagctaactggccagtgtggggctagatccaggaacagaagtgatgctatccataatgtgcttgccaagtgcagctctgggaagatagttccaacaaaatcactgtcccctcttctaacttttgcaaggacatcctccagtctcacccagagactctccccacactaaccttatctgagtttccaggcaattccccttgaggctagatagagtcagggcagccaggctgtgcctttctgctggtgagatgccactgggctggaaagctcatatgttggcttcagtgggaccaccaaaaatagggccaacgaggctctgaattgctggggttgctccatcttactcttttcctctcaaagcctcattccaggagtattgtacttatggtgagccaggcagcagttgccacgtttcaccctctcaaagtgttttgtaggttggtatactgagacccatttttcagatgtggaaacaggctcagaaaagctggtaaatatcctaagatgacacaactactgagaggtggctggttttgagcccaagtgtctctgctgactcccaagcctacccccttcccagttcgatgccatggtgcaggctcgatatctaattccagagaaactgcacaaacttcctctcctatattctaggagaggatgtctggctttccctcctctcttttaatctggggatggttctggagagactcagatggagagtgttgggtatgagacagaggaaagaggagacagattctggatctagtggcttctcagggggcttcactttgctgattttctcaaccaatggagaggtcagttctgtgatgggctggagatcacttctactcagtataacgtgatcctgatatccttcagggacctacatccccatattgttaaaagggtcttctgtatccccagtcccagtcctttgaaaaagtcctggggcttcatgaggaagcttatcaaaggtgagagtgttttcttagaacgtgatggaaaggaatggagctccatgatggtcagagccaagtgactgggtcagagcagagcagagaaagaaaacccaccacccccacactccagcagggtcagtgagagaaagtctggctcctacattgaactggaaatggaactgtgtgtaaggggggacaggtgtgtacatgtgcttaaggtggtctgggggtgagggatgacttggtgatgtgaatttggcagtgacttggaaaggtatgtgtcagagacgatttggcagtgtgtgtgtgtgtgtgtgtgtgtgtttgtgtgtatgttgggtgagggctgcacacatgtatgtgtagtcagggtgtaataccaattcttctctgtgggttgtaaccctcagtcagtccaagcccagcttttgctcatggtcacacacacaaaaatgcaattaacttttagggggagtaagtctaaaatactagggaatagctcaacatgtcagagctacagggttcagtgctcaccacagtaacagctttttcctgttcaaaacatgtattgttggattcccaaaggctggaccgggaccagcaaaacagggagaactggcccactgattgctgcatgtatactgttggccactccagtgatgggcacatactgttatttatgtgtgctccccgcaccttatctttcatgatgtcaggacaacacttccaattgattatttcctgccacagttttggctttgaattgtcctttgttttatgaataatattctgaggagttggcaggttttcttctaacatccttacttggcaaaataaaaaatgaccaatcctatgtttctccaattgtttggaaattttactagtccagaagccctaatttgttgctatcccgtttagggggaggggaagagtgtggaaactgagtcagggacattgcatgccactctcccttctgaatcagtgggaacttgttatctggtaagggaggtagtggattttttttttctctcaaaggaattcttgtcttcttgataggtgaagggggtgcccagttgtccaaatccatctttgctaacaggatctgttgtttttctatgccttggcacagaatgcaagagaacatcctgaaatcttaatgtatgcttacaaaagcagtatactcataaaccagcagcatcaaatttttacaggaatccagggatccataaaggagaggggcaagggagagagctgattcttcccacacatacgtcctgagtctccaagtttgtttatccataattgctatgcaagtataaattagaacaacaaatgcatccatcctggcagtggtgacaccaaccctgtaaataattataatgtaatcttatagcaaagagttctgagtgactcccctaataatttcctctgcttaattccttccccactgagtgacttaataggaaaaggaactctttcagatttgtttcactccaaaagtttggacaacgtgtagactcacacctggagggcagaagctgtaggagaccatttggcccatggataaacaagtgagtcgaaaaggccttgggactggaagacagggaactggcaagggtattcgtcttggcacctgtttatagaagtgaaaacttgggaaccacctaacaagaggtctgatgagtaaactatgctacagtcttacaagggaatgctacatagcccggaaaactcatcacagatatcgcatgtcataatagcatgctgtcatggcttggaagacagcctttagtatcagattaacctggggttgaatcccagctctgctccttactcgccggtgtgatctcaagcaggtagtataacctctctgggcctcattttcctcttctgtaaaaggaggaaaactatgctacttacttcatataatttttatgaagatgaaatgaaattatagctctaaagagcttataacctgtctggcacatattggtagtaaagggtcaacaaatgatattattatcagaccttgtatattttggaggcatctgtgatggtacaggaaaacatttcatgacacaataattagctaaaaatatataactacagatatttttagatcctaatttggtcatattaaatatatataaatagccagctagcttaatctaggccaagaaaaaaggtcaaaggggagtacatcaaaattgtaataattttaatttttccatacctttgtagattttccatgttttctacaaggagcatatgcattacacttacagtcagtaaacaggtattttacaaaagaggcagaggtccaagggtcttcacactgcgcagatcatcaggattccagttgagtgaagactcaccttaaccttcaacccaactcctagcttaaaatcaccagcttttcctcttggactagtttatagaatgtcatcctccacagagcaggttgtcctcactcacctgtgcttctctcagccctctgaccagggtaggaaatgacctggccagcttcctgtgagaagctcatggtgacaccagggtcttctgactcccatgtcggctcaccttccactgcaccaggaaacttgagttttctgcttatgctagttcccaaatctgagcctatacttgggaagaatccattccccctttatccctcttaaatatttaatagtcacacttggctcctaccatgggtttgtctgattttcttacctaacagatagatagacaatgagctccttaaaaaaccatgtctcactcaactggtgttcctaccgccatgaaacctggcacagggaaggtgtgcaataaacgtgccccattcccctccttttctcctctccttcccatcttcctcctccctactcccactgactgccacgtctctgtcttctctgactcttgcagacacccactttctgctccgctcagaatcctcagtgacacctcctcccacccctatgccctccgtccatccactcctggagcacagccccgccagacctggccgggcccagccccgcacccagggcctccaccagaacgctattcccactgcggcaccccctggtagccaacgccgtgactcctgcctgacatcaggaagtggaatccccaccttcacctgacactatgcagcaactaaggctccaacgatgccccatccttgcttgaagtacacctggacatatccttctattggctcctcatgtgctaacaaaagtcctcctgataacacagccacaatgagaatacaagagagtgttccaaatgccacaataccacttgtgatgcttctcacccaaacagaaagccagatacttcctcaagccatcctcaatttgagcacatcctgcaagcccaagtctgggataagcaacgatggcttcaataactcatatcctccctaacccatcaacaactgagactctccatgaagcacactacagaagagcctgcacttttttagcaaagccagaacaagagggagaaagtaagtcctacccttcagacactgggacataatgcctttctgatgtatcaggacccttggagtgggaagaattaagactaaaaatgttctagtctcagcaatggtcacttatggttctagtccctttttggatgctatgcatatgtcttccagaaatggaacaatattttgaatcattttactagaccctgtccacatcctgagaccagaacatttttagtcttaatgcaagttattcaaccaagacccatcataaaaatcttcagcaagaacatgtttcaaatcagatatcaaaatcactataaaaattaccccagctctaaaaatatgcagtgctttttcattaggatgagatgaaaggactctaacagtaggtataaggaagtggctaagaggcctctggctgcaggtccaggcactgaggagactgcaagcatcccagtaattcacagttgcagagaatagggtaggaaaggaaggtgatgttgtgcttaccagagggaggagccttctgtcccagtgacttccagaaagtcgtaaccatcctccagctggaagtcaataaacaccagggcgatggtgtcccccagctcagccaggatggtccatgtgcagtcggcattgttatggtactccgaggggaagtgggggctggagatgatgccactctggccccgcagggtcccaccacaggcatcatcagctgtgggcacagagagaagaggcttacatgagtagtctggttttcaagccctagcactcaccatgggctatacctgcaatacatccttctgtctcccaagagtacaattcacagtttgtggacatagataaagcagcaaatgactttgtttggacaagtccatctgagaagcctaacagaggaagtgtcattagagctgggttttgatgaatgagtaggagttcactagatggagaagagggggaaggacatttcagggaagaaggaaccaaatggtcataagcagagacatatgaacgtgcaaggcatgtctaagataaacagctctagatgactcatcacagggtaaaaaagatgaataatataagatagtaatggcatgtaggagaagtcacatggcagagaacactgagccaaaaagatttggagacaggggagtgcattggaaaggaaatggattttagggtaaggaaggtctagatttgaatttagactccacaatttcccagccacctgcataactttgggaaatttattttttttaaggctcagtttgcttctctgttgtgataactgaattagatagttaatgtgacagtaactagcattagccagtgactgacatgtgggtagatgctaatgctagattctcctttttccttctacttcatcttaaggatcaaaggcagtgaagaaatgtgattaaacttgcattttagaaagaacactggctatggtataaaggaggtctgagtcagggaagcgcatgggatgctcttggtatcaccaaaaccaccacagtccaggtgaggctggatgagatcgagctaaggtcgtgtggagggtgggagaggacttatttgagagatatttaggaagcagaatctccagaattcagcaactaggaggtataaaatccaggttgctggtataagcatctggatggatgaaaggtgctatttcctgaggcagaaaacccaggaagggagctccttgtggtatggaaggcaaccaggagttcagttttggacacgcagaagtgggtatgtctgtggggcctccaatggtgagatcagattaacagatatataggagccatctgggctagagataaaagtgatcttgtttagcagctctgaactattcttactaatgttctttacagggtcaagagaatcatgagccaactcatagcatttctcaatgctaacttctaagtttctatgagtgcagaaatgtaagatatacacctactctcccagagtaggtgcttatgaaggtttccctcctatacccattaactgagcacctactgtgggccaaatactgggtagggccagcactacaatgtgaaaagcttgatttcctctctgccttcaaatgcttctgagggaggaggtgggcaggcaagccagcaatggcaacacagaatagttatgatggggatgctcaaggcgcagtgatagcacatagttaggaagggctttatggaagagacagaatttgtgttaatatattcattcacttattcattcattcatttaacaaatgctaactgagcacctactatgtgtcagccactgttctaggtgctggggattcagctgtgaataaaacaaaaattcctatcctcccagagcttacattctggtcagaaggataaagacaactccaagataaataattaactctatagtaaatgagctggtaagtgcagaggaaaatgggctatctggtgttgggagtgggggtgtggatatttcagaaagggtggtcagggaagaccccactgagaagttgacatttgagccaagacttgaaggaatgagagaggaagacacatggttacctgggggaagagcattcacggaagatagagcagcaaatgcaaaggtcaccagggtgcagaggcctggcaccgttgaagagcatcaagagacccaaggactgggcgcagtggctcatgcctgtaatcccagcaatttgggaggccgaggtgggcggatcaactgaggtcaggagttcaataccagcttggccaacatgatgaaaccctgtctctactaaaaatacaaaaaaaaaaaaaaaaagttggctgggtgtggtggcgcacatctgtagtcccagctacccgggaggccaaggcagaagaatcgcttgaacccaggaggtagagtttgcagtgagccgagattgtgctattgcactccagccagggcaataagagcgacaatctgtctcaaaaaaaaaaaaaaaaaaaaaaagagacccaaagggctggaatgcaggaagaaggaggaaagtggcaggggaggcagggcttccgagggcctgagaggccgctgtaaggatgtggacttttactcggaatgagttgagaagccagtggagggttctgagctgaggatgatatgatgtcatttgtgtattaacaggatcccttgggatgccatgtagacagcagaccagagagggcaagggaacaaggtgggggcctcttgaagctaccccaataatccagtgagaggtgatggtggctaagaccaggtggtaacagtgagacatagtcagagtctggcttcatttccaacactgagctggcagcatacatcagctgagggtgcctgcctggtaggcctcaggggagagggtgttttaggcagaaaaacagcaaggacagttcaagttggggagtgtggcatgtttagggacttattaggcaggaccgtctgaactgaaagggacatgcagagatgacagagctgggctggacaggaaggcaagagctggactgcgaaggtccttgaatgccgagtagaggagctgaggttctgttctcctcccctcttcctcctttgctaccctcaacccagcttcccaggccccagaaagcaggaagggagggaaggtaggcaagattggccttgcttggctttaaatccagttcagtggtgctgttgatttgttttatcaagttgcacagtatttctgccttgagtatctctctggcaggaggctatgatgtctgacatctgaggcagagtttgtcgccttctgatgtaaataaattcaccatgaacattaccagggagataagccacaggagccagccaacaagtgggagatttgccaatattgttccgagcaagcaccgggcccactggtccccaacagtcctgtcactggccctcactacaccaggtggaactgtcttcgccctgggcacaatggctgagtcttgactgtactggggaaagggatcatggtgaagaaagggacatttagcccgaaccttcaaaaaagcacaggagtgtgctggaaggggaagaaatagaggggttccaggcagagcaaacaggccctcagaggcaagaaggcctggaagggcatgctgcttgggggaaggccttgacagcactgccgaggtgtttggactttcctctgcaggtgcaggggagtcatggtaggtgtggagaagagggttttcagcaggaagtacaagtccagacctattttagaaagatgatttggtcccatagtaatggatgaaagatatggtttggtggccagggaaggttgccggtggggagatcagagacagagaatggagaagaggttttcccatcatcaaagctgcaactaggcagggaggaaagagaagcagcaggaagggatttaggaggcagactgtggaggaatgagagggtgaagtctccaacagaaaatggatggtgaaggagagagcagagacagggacgctagaggagacgcagctctgcaggaagtgacggcccttcctccctgctcttccccactcccatgctgagtgtgagatcctggggaataaacagatggggatacctatgggcctgggatcccagagactgtgaggcagggaatcagcaggacagagagggaagctcccaccacaggagtggagaaggctggggactgaacagacctgtatggagcaggcagaagcaaagatacctgaaagaagagaaggtgggaagggaggggcactcaggtggaaagtaagcaggggccaaagagaaacattagagggggagggagtggctcaggagcaggcacagccactctgtgtggccaagtctccaatcaggcccttggtccacatagtctcatttaatctggcctgcacatccaggtggacaacaaagaattccagaagaaaagcaggtcttgggggaaagacaatgactccagagccttctgcctacttccagtcttagaaacccaactagatattccacattgctctcaaacccaacccaaccaaaatcactctcatcctttcctcccagaagcctagccttcttccagactttcccatcttggagggtcagcactattcacccacttcctcatggcagaggctcaggggacatcctcaactcctcccacacccccacatccagccagggactcagctggcagtccatctaggtggctgtcaatcctgtcccccgccatcactgccattgctgtaccccaagccatgtcacactccaagttaaccacagccatgaagccccctcctggtctccaagcctccttcctcctccagcccatccattcttttggtttttcagttttttaaattttatttttaattgacaataattgtatgtccttatggaatacactgtgatgttttgatatatgtatgtattgtggaatgactaaatcaagctaattagcatatcaatcaactcacatactttttttttgcattgagaactttatcttggagcactcccttaaaaaatttattgttataaaatatttgtacatttttatggggtatgcgtgttattttttgacatgcatagtaggtgatatagtttgaatgtccctcccaaatctcacgttgaaatgtaatctccaatactggaggtggggcctggtgggaggtgtgtgggtcatggggatggatgcctcatggcttggtgctgtccttgtgacagtgagtgagtcatctcgagagctgattgtttaaaattgtgtggcacctctccctcactccctctcttgctcttgctctggtcatgtgaagtgcctgctcccacttcaccttccgccatgagtaaaagctccctgaggcctccccagaagctgagcagatgccaatgccatgcctcctgtacagcctgtggaaccatgagtcaattaaacctcttttcttgataaattacctagtctcaggcatttctctacagcaatacaagaaaagcctaacacagtaggtgtaatgatccattcagggtatttagggcatccatcacctcaagagtttatcacttttatgtgttgggaacatttcaagttctctctcctagctattttgaaatatacattgttgttttaactatagtcaccatagtctgctattgaacattagaatttattcgtccttctacctaactcaggggtccccaacccctaggccatggaccgggacctgttagaacctgggctgcacagcaggaggtgagtgttgagcaagttatctaatgcctgatgatctgaggtggaacagtttcatcctgaaaccatcccccacctcctgtccatggaaacattgtcttccatgaaattggttcctggtgccaaaaaaggttggggaccactgacctaactgtgtatttgtacctgttaaccaacctctcttcatgccctacatcctccaatcctggacacacacagccttcccagcctctggtaactatcaatcattctactgtcaacctctatgagatccacttttttaactcctcgtatgagtgttaggtgatatttgtctttctctgcctggtttattttacttagcataatgacctccagttccacccatgttcctgcagatgacaggatttcactcttctaaaaaaaaaaaatagagatggagttgtgctggacattgcccaggctggacttgaactcctgggctcaagagatcccttgcctcagcctcccaagtaactgggactatgggcgcatgccactgcacctagctaatttcattttttaacatctgagtagtattccaccatgtatgtgtataccacatacacacatatatattacatataccatattttctttatacatttatctaatggtgtgcacttgtgttgattccatatctttgctgttatgaattgtgtttcagtaaacatggggtgcaggtatccctttgatacattgatttcctttcctttggataaatactcagtagtggaattgcttgatcatatggtagttctatttttagtcttttgagaaatctccatactgttttctataatggctgtactaatttacattcccaccaacaaagtataagagctcccttttctccatatctttgccaacatctgttgttttttgcttttttaataatagccattctaactagggtaaaatgatacctcactgtgattttgacttgcacctccctgatgatcagagatgttgaacattttttcatatacctgtttgccattttaatgtcttcttttgaaaaatgtctattcatgtccttagctcactttttaatgggattgttattattattatttttttgctgttgagttgtttgagttacttgtacattctggacattagtcccctctcagatgaatagcttgcaaatattttctcgtctttaacaggtcgtcttttcactttgttgatggtttctttttctgtgtagaagctttttagtttaatatagtcccatttgtctatttgtgtttttgttgcctgtgcttttgaggtcttagccataaaatctttgcctagaccaatctcctggaataactcccctaagttttcttccagtagttttatagtttggggtcttaagtttaggtctctaattcattttaagttgatttttgtatatggtgagagatgggtgtttagtttcatttttctgcatatggttatccagttttcccagcactattgaagcaagcgtccttcccctaatgcatgttcttggtgcctttgctgaaaatcagttggctgtaagtatatgaatttatttctggactctctattctgtttcattggtctgtgtctgtttttatactaataccatcctgttttggttattatagccttgtaatatattttgaagccaggtagaatgatgcttccagctttgttctttttgctcaagattgctttggcttttcaggcttttttgttgttccttatgaattttaggattgttttttctatttctgtgaaaaatgacacgggtattttgatacagattacattgaatctgtaggttgctttgcagcctctgtccattcttcacagaggccagagtaatacgggaaaccatgggcctgattacaccactctctctgttggaaccatcaataacccccattgtcactcaggataaagtggaatacccgatgactcacaaggaccttacagggccttgcctcatgccagtctctctgtccctactatctgcagccaccctggcctcctcccagctcttccgattcactaagcattgccttgctccagggcctttgaaagtgttattttctctttctggaaacttcttccctatctcgttgggcctgactgccccctcgccctcagcctttaggtcccgatccaagtgctgcttcctcgaggatctttacagaaatagaataatccctcccccatcatatactttctgagcaccacatattttgccataattaatgattttccataattaattgatcaattatatcattacttagttaacatgtagatagcaaactccatgagaacagaggccatgtctgttctgtccctagcacctagcagatttcctggcatacagcaggcacttgactaatatctgctgaacaaataaatgtaacagaaaactgaagctcagagaggttaagtaatgttcccaaggtcacatagggagtggctgagtcaagatttcagttgagtgtctctggtaccaggatggtagtctcctccacatccctgcttgatagtggtttggtaagccatcccgagattttcaaacttcccaactgtaggcaatgatttctggacttgtgctagaactgaggacttgagaacttgagatcctctggccagagctaccagtctcctctgaaggcggcacctttaccattttagccatccctgcctcttgggctcatccgacaccctggcccttgcatcatcctgttttgattgaagatcctgcaaaagctgtttggaggttttctcccactttagacaaggcatcatatttcatggttacaactccagagtcataaaatataaccttcagctgacaccatagtcctaaaatattcatttacactttctccttctctggcaatgggcattttgcaccaccattaagtcatgcatattctcaggtgcaggtgtgttatgctgatagttgcctttccaagtttatgactttatttatgatcgactttaagttctacggaaatctcttcaattagccataattttagagaactctccctcaatcctctttgatttctgttaactctacaatgactgacaaatttcaggcaggaaatggagaaaacaggacattatcctctctacttcaggccagctctagggtaccatcttgcatgcctagaagatttggggtccttggaattggcttctgttcatatcatcttccccaggacccctcagcctctgtggaaatgaagatgccaacaggccccaaaggagaagccaccatcttccaattccagtgcaagactgagagcaccagggcaggagtgccccaaagttgcggcccacccccttttcttgtggtgaatggtttcgtgtgcctaaacatgctggggcccccagaacttgctcaacttcttcagtcccctcttcctgggggctttggactctgcccatttatccttggctttatcaatgacactccttaaaatgaagaaatgaccaattctgagaacatcactattgctcccagactcctatagttacagccacctaaggtatccttctgaggggaagaatgtagacaggacatggtatttgattacatgacactccttagtgagctttcattatgggccaggcattgtgcaaaatgcttcacctgcattttcccctttaatcttcaaaccctcgagagcataggtattatcgtgcacattttacagatgaggaaacagaggctcagtgagtttttaagacttccttgtggtcacatagctactaaatgttggagctagggtttgaacctaagaccttgtgactccaggcccacaccattacccacctatttgtctgcctcctgggcctcagtcactataatcctgttcctgacatgggctaggagcaggctcctggaagcaccagaccctggagatggggttttccaggcatgagacgcttcctcctgctcccttctcttctgcctgggggcctttgtgctgcctcaaaagtgctggtccagctaccagtgcttaagtggaggtgggtgaaccttgggtctggctttcttcataggatggaaaagtagtttccagcccccaccctgaagcagcatctgtccaacagaatgacctcaggccctttcccagaggtttctctcctcaggaatgcatggaaggtcaaggggaaaccgcaagagactgccagtccctgactggtggagccatgcaggggatgcctgcacctgcaggccaagctctcaggccctgaaccatcaggctggagaagctctggaaatcacagcatcattgtgagtctcctgctgtgggccagaggccaccatccttgcctgcagtggagggtggtggtcaagatcatggctgttaggcacgtggacttgcgctgaatcctggctccaccactctcaagctgtgtaatcacaggtaaagcactgcacctctctgggcctcagtttcctcacttgtaagaggagataacattaccttaacctccttgggagttgtgaggattacaacaggtaatgcaggacctggtacttagttagggctcaatatggtggccagtgaggctgtggcagtgagaatgacaatgatagatacccctcactgagtcataactatgaacaaggccctctgctatgtgcttagcatttatcaatgtgaacctcactgccaacttatgagttaagtaccattattattcccatttacaaatgagaaaactggggcatagagaggttgagtaactggtcccaagccactcagccagtgggtgtaagtggcaaggccaggatttgaatccaggtgactggcctccagagcccatatcgtgaaacgttctggtatagtaacagtaattgcaaaagtgatggaaggctagttatcccagtagcagtagagttaccctatcgtaaagagtggccttgggtagctgtggtcgctgttgaggccccagtgctcagaatcactcaaggtgcacactgcacccggcatagtgtttagtgccttctccatgttgttaaatttgatcaacacaatggtgtccagcatgcagtgcccagaccctctttgctatctacagtgttgccctcttatgcctttcccagatctctttctagcttaggactccttccagctgcagaatcaatgcccccatttggatgtctcacaggcgtctcaaacgttacctggacaaagtgagctgtcttgcttccctttagggcacatgcttcctgccctctgtgccagtcatctccatcttggtcattggcatccccacccaccagccctccaggaaaagcctaggagtcaactttggccctttattctatcagccatccaacccatctataaggtctgttggctgtatccccaaagcacagccccaatctacgcctgtccctccacctctactccggccaccctcgaccaagatgcagcaactccagcctggttgcccataatagctgcctcctaactgatcttcttattgtggctcttgctcagctagtatccagagtgatcttttaaaaaaattaagttaaattggactatacttctgcttaaaactctcccctggttgcctcctgaactcagaaccaagcctatactttttttttttttttttttttttgagatagagtcttgctctgtcactcaggttggagtgcagtggcatgatctcagctcactgaaacctccacctcccggattcaagagattctcctgactcagcctcctgagtagctgggattacaggcatgtgacaccacgtccagctaatttttgtatttttagtagagatggagtttcaccatgttggtcaggctggtctcaaactcctgatctcgcgatctgcccgcttcagcctccgctttcttaccttgcttcaccccatccctgccctctccacccacccctcactctacttttgccacaggggcttgttttctgttcctctagcgtgtccagtactttcccccacctcagggcctttgcacttgctgcttcttttgccaggaatgccgttttccaggtcttcacacaacaggctcctccttgtcacaggactcatttcagaggccacctccccacagaggcctcccctgactgctccgtctaaagtagccttccccatcactggctaagactttacttcctcgtagctcctaccaccacctgtttatttggcgtgtgtatctgttttctgcctcctggctgctagaatgtaaactccaagagatcatggaatttggtcagatttgctcatcattccaattctctgagtctagaacaatatttggcactgtataggcagtcaataaatgataattgaattaatgactggctggctcataacaggcactcaagagaaagttgttgagtagccaagtgaataaaatgaggacacaatcagccctgtaaggctgctacttgtgtcccacctttaaaactcagaggggtttagcagcacccctggcaaccacacagctaggggctggcttacctagggttgaacccaggccagtctgactctatgcactgtccatacccgacaccactgcttctttttcacattctgcaggtttcttcccctggggccagaaaatttggaatacagctcagcgcttgcagtccaagcttctgcagaccgtattccgtcttccccaggtatggtgacagcctgccgtgtttggcttgaacctcagaggctaagcacttcttgctctggccagctttctccctaccacctgcctctcagtccccagtgcatatgaattccgtcacttccccatgcagccttctttgatccagggccaatggccctcataaatcagaggcctgttgctgaaatccacatgatcttccctcttgtggatcaaagagatgacacaaagctcagcacctcccagggacctctgcttttgaaaacgtgcccagtgtgacacaaagtgaaggggggtcacaggccccatctccttccctctgtcagctggaccaagccttgatgggtcaggatctttgggatgggcctccttgggggtcggccttacacctggctcccccctattcccagctgttccctattcccccactcctagtctgtgctgtgtccccagaccaagtccaccctccagctgggcacatgacatttcctagataaaacagacacacacggctttccagtctgctccgggaagctttggacttaaagagattgtcactcagagctactgggcaggtggggtaacccaggctagtaatttccctttcgggcttgtatgctagcatgattctgatggtgaattagacccatccagacagccgttcattcagcaaatatttacggaccactgcccagtggatgaggtttacccactcgcagatgccagctcttgagagttctacacgagaggaagaaaggccaaaaggcttttaatgcttcccaagtatgaacctgttcactctggcatgaccaccactcctggcacaggatgggtgtatggtgggtaccctttgttcctgtttagcttggcctcctaaggaagaacagtttgggaaatcacttttataaaatcactgacattattgaggatgtttcttaggatattcttgtagcttgtggggattataatagagatgaacctgaaggtagggaggtgactgggggtggggggaagccctagggggtctgagagttggaaagtcattttattctctcccagcctttgagcagaaccacatctcagacccctcaggcagcagggggctggaagcccttctagaagcaggatttgacatcctcagctggcttccctagggcgtttggaagggagcattctctggtgtggctaaagtggaagctacttaaaataagtctaagagacagactggaaagattggggtggggctctttctggaagagccttctgctccatgctaaggaatctgaactagaccccgtcagtgatgaagagccactaagggactgagccactcagttttgtcagatctgtgccttagcaagttctccctagcagtacaggtaggaatgggctggtgtgagcaggagagaactggggcacacctgcctacagagggtcaaccttcagtgaggcaagtgagagacgagagagcctggaccatcatctgaagagcaacagagatgtggagggggtaggctggtgcagagggacatgggggccgatgatgcgatgtgaacagcaagaaaagcaagaatgtaagatgccctgaggggttcagcttggccactgttggtggggacacttttcactgagctggggaaggcaacaaaaagagcaggtttggggaaagcaggaagagtgaggttttcatgggccaagtttgaaacaagctgaggagaactttagcatagttcactctccacaggggcctgaagctcaggacagagaatggggttggaggtggggattggagagttgccccctagtaacaattacagcaacacagtagatgagaaattccaagagatggaagaaatccccagagaagaggccgagctgggccctccagtatttaaggggaatgagggtggaaagtcagtgaaggagaaggagggaaagaatcatcatcatttcagacgacgaaaaaagaattggaagacttcagagagtcgtgccaccaaaagacatgccacccccgcccaggcccatgaattactgtgtggtgtgaatgccagaagagtggtatctctccaccctgctccttccctcggaagggccagcccttgctgcccgctgtgcctggacacaaagacactgggttgtgagccttgattggacatgaagacatccaagaggtagaagacctccatgaggtgcccctcatcacttatctctggctggtggggtaacaaaaagatatgttaacatccagccccagagtgtcttatagaatgagagttctctttgttcaggaaaatactaccctatacctaaatagcttggaggaggaggggagacattagactgcaaggagatgacaaaaccaagaggaaaccaggctcttgtgcctaagaagttgatggaaattctgaaatgggctcaaggtgcaggcagcaccaaggtggaagaggctggagaaagaagagagggtacaatgcacatcacaggggaacctggagcctgccaagacagaagccagggagaagcttcccgggaggaggggccaaaagactgtgaagctcctggttgctcatactttcattttaagtcatttgcattgctaagatgtaagctccttgcattgccacaccttccataaagcctgaactacatgcagacgccttcgttgatgtttttgtttgttggcttgtattttgtcttttggagaagtaggggatccaagaaaaatggacccagttcccaacctaagttggcagagcagaagcaggggtagggagacagggcattgagttcaagattcagaggaagctaaagctgacagattcctggagatattaggagggttagtggatttccaccatattagcattggatattgctgagtattttacttccccaagcagagtgatacccccgctgcatccagtaattggattacatttgtttctggtttttatcttgaacaaaatagcatggcatttatagtgctgcaaaaagaaaaagaactgcagtttatatttcataacttagacacttgattttatttactatcatatttcatattctatcatcgtgtcacaactctgacaccctccttggaagatcagaatgttaacggtaacatccttaaggcagggggtgggtaaggatgctataaggaagggcagatacagcagctttcaggctgtggttaggccacacacctgtgtaggggccaaggtctcacctgattggtttggtaattcctgaagtccatcatggaaagaggcagttcctgagttaggaatggggcctgggaagatgggacttaggaaagcaggaaagggaactctagttcccttgtggtccaccaagaaggctcaacatggccaaggcccattctattggttgaggagaggtaaacaaaggtgaagtcaagtggcaactcagattgattggctgtggcttgcctattgggagggaattcacagctgtgtctggacccaagcagaaagggtgcaatgaacaattaattatgtctgccatgggattgggaagaaggggaataggtatacatgccatgtaatttttatccttggtgtcaataacaaaaagtgtgtgcatgtggcaggaagaaggagttgcttatccctggagctagtcttttacagtaattacagaaaatcttcctccaaaagaaaaataaaatttgaactaaaggaggagctagttattccaatgacttctcaactcctggaaatgttcctcccagactgatatatggatgttcaggatccatggaatttagagatgagcgttactagaagaaaagagtggtcaatagtgcaaaggtttcttaagaggtcaagaaatacaagagccaaaacaattcccatctgatttggcaaaatgatgcaaatattgagggcaaaggccagtctgcagaggagtaaatgagaagggaaaaggagggacaaggctggatggagctttcaagatgctgggctatgttgatggcatgggaaatcttacagtgtgatgtgattgattgtttttcaaaggtggttaaaaattgtctgcatgcatcataatctcaatttatgtacatatttgtaatatatgcatatgtgcaatacgtattggaagaagatggaaaggacatacattaaaatcacagttaaaacaggtaaattttctttcttctttattcccttctgtattttctaagcttttaaaaatgatcgtgtgccacgtatggtggcttatgcctgtaatctcagcactttgggatgccaaggccggaggatcatttgagctcaggagttcaagaccagcctgggcaacatagagagactctgtctccatgaaaaaaaaaaaaaaaaaaaaattagccgggcatggtggcacatgcctgcggtccctgcaactccagaggctgaggcaggaggatcgcttgatcccaggagtttgaggctgcagtgagccatgattacgtcactgcactccagcacggaggacagaggaagatcctgtctcaaataaaattaaaaaaaaaaaaaaaaagaaaaaagaaaaagaatgaaagaaaaaagaaaggaagaaaggaaaaaaaaaagaagattgtgtaaggaataggctgggagtagagtgacaaatgtctctgttgcctgaaactgagtgggtttccaggatgcggaactttcaggactaaaattgggaaggtcttgggcaaatatgaacaagttggtcaacctagctgggaggctgaggccgacacagcatagaagagaggtgtttttctgggggagggggttgttggagtaaagagattttgagcatatttggaggctgaaaggaagaaactattagatagggagagaggctgaatttataggaaagagaaaagaataattcctacagtgaggtcagtacgaaagctgttgggaaagtgatctggcttccacaagaggagagagggtctgcaataggaagagaaatgatgtttcttctgagacaggagggctagaggtaagggaagactggctacatataagtttgttgatacaggggaaaaaatgagggagtgcacacttgagggttaggaggtcaggtgaggttgaaatacccctagaacacttgaggaccctgaaaaccctctgtgctgtccagacttgggtacccccctccctgctggggtgtagctttgccctttgagactggatgtcactggaagctccagcatcacctcccagccactgccccactctgtcagaccccttgctggccacctacctctgcaggaaggcagggggaagtcccacgtggcgctgttctcagagccagcgtggcaggtgagcacggcgtggccctccaggaagaagccaaggttgcagctgtagcggaccttgtcaccgaggttgaaggttgaaccctgctggatgccattgggcagcctccctgggttcccacatgtgtggctggggagaactgtgaggagaaacagagaaagagacgggtaccccgtgagctgggctggagccctgacaccgggcttcctagtagcaactccctaggccactcgggcttcctggaactcatttcttcttctgtgaacagcattgcccactgctgatctgcccgcttctcaaggctgtagattccctgggaatgggttactcataagagacaagggttactcaaaatctcacacatgagtttacaactggatgtccaggtctcttgccttttctaatgcgcagccatggatgtgaattatgttcatcctgatcactagagatgcaattccaggaatattactttaacctcttgggcatggctggcctgatttcagactccacactcctcactaaataccatggaagggacataaggcatggcataagagtaggtgctcattaaatccagtgtcctttctttcatgtgtgatccaccctggcagccagaggggcactttggccccgcaggttcaggggagttgaaagggttggattaggcagaataggcagtgaagtgggaaaacaagaacccgggttctcatcagcctgactggtttaaagggggaaaattgggagccaggaaacaccatgcacagtgtgtggccagagccaagcaatcatggtcacctgcaagtgtgctctcatgaggcagaggaaatggtcttggggaaggtgcaagagcaccatgacctggcaataaggagggagggaggacacagattctctgtgcccataagtcagtcacctgttctaactgacccagcttccccctgccctctgccttgtcccccagagttagaactgcctgtgccttaaaggtcaacacctcctatcattctaggatacccccatggggtgaggagtaggggtcttagtcatgcccagactaccgtttaagtacctctccattaatccacctggcaatgacttattgaggctgtctctgagaggccatgcagccggatggtggtaagtgcagacttggaagccaccgtgcttgagttcacttcccagcctgaaatcttaccacctgtgggaccgtgagtaagtcttttaacctttttgcactttagtttcctcatttgtaagatagggagctcaacagcaccttccttatatcaaaataattgttgcaagaattaagccagttcaggtatgcaaagtgcttaggacagagcctgatgtacagtgagtacaacgcaagtgaatctaaccctcggtacagtgggtgctgtgcacaattaatggcacactaagagttatgatgggacaggaacaggtagggaaccaaacccagctgggggagaggtcagagatcacttcctggaggaggtgacatctctgcagaaccctgggagattagtaagacttagctaagcaaaaaagagcaaacagcatgtgcaaaggccctgaggccagagataacccaggagctgagggagcctggagtaaaagagtggggtggcagtgatggggaagtggaagtgggcaggcctggactctaaatggcccccctagtccttgcaataccctcttcctgccaatgttgctgttagtatctgccttccagaaccctctaccagctctgatgatctcagaaccctctgaaaaaaggtattccctcccccttcctctcttcctcctctgagaggaaacagctcagtgtagagggtaatggtagactttggaaccagcctgatctgggtgtgaaaccaggtgccatcatgtcttattctgtgtgaccttgagtcacatgaactctctgagccttagtttcttcaaatgagaaaggagtgaggccaataatatttagcggttgagggagttaccaatataaatgctgcatgcctggcacaacgcccagaacatagtaggtgctcacaaaatggcaaatgttctcattccattgggccacagggccatgagggcgtgggcctagtctggttcataggtatatcctgggagactagcacagtgcctggcacttgtagggacatatgtgcatgttcattaattagttatttggagagttactcattcatgtattaattccttcatgcaacaaaaattcattgtgggcttaccgtgcttggcacagtggggccagccctcagaggcttatatttttgtgagagtgaatcttaaagactgaagagctcttccttgcccattctttacctgtgccaagtgagatgatctagatgaaaagatttacctctattgccctgtccattggcccagcttagcatttcccatgatcccacactgctagtttacttagcatttcccatgatcctgtgctgctggcttacttagcatttatcatattcccctgctgctggcttgcctggtgtttcccatgatcctgtactgctgctggcttacttggcatttcccatgatcccctgctgctggcttacttggcatttcccatgatcccatgttgctggcttacttggcatttcccatgatctcacactgctggcttatttggcatttcccatgatcccctgctgctggtttacttggcattccctatgatcccatgttgctggtttacttagcatttcccatgatcccatgttgctggcttacttggcatttcccatgataccatgttgctggcttacttggcatttcccatgatcccctgctgttggcttacttggtacttcccatggtctcctgctgctgacttacctggtgtttcccatgatcctgtactgctgctggcttacttggcatttcctatgatcccacactgctggcttacttggcatttcccatgatcccctgctgctggcttacttggcatttcccatgatcccacactgctggcttacttggcatttcccataatctcctgccgctggcttacttggcatttcccataatcccatgttgctggcttacttggcatttcccatgatcccttgctgctgacttacttggcatttcccatcatcccatgctgctggcttagttggtacttcccatcttttgctcttggcttacttggcgtttcccgtgatcccctgctgctggtttacttggcatttcccatgatcccatgctgctggcttacttgatacttcccatgatctgctgctgacttacttggtgtttcccatgatcctgtactgttgctggcttacttaacatttcccatgatcccacactactggcttacttggtacttcccatgatcccctgcagcttgcttatttggtgtatcccatgagatcccatgctcctggcttatttagcatcttctatgatcagtccctgctgctggttcacttggcatttcccatgatgccctgctgctggctcacttggtgtttcccataatcctatgcaggtgtcttacagcagaggcaatgactgtgatgtgtgtgtgcttatgagtgtggggtgggaagggcaggtcaggtaaacatttggagaaaaaagcaagctaaggtgaggggagggagccaactaggggaaatgagctgagaactggtgtagaactaacgtgtcattttccgcaatgagacgcaaagacccaatttaattaaattactaatgtcaaatttttaatgaacctgcttctgctttgggctttcttccttcgaaattaatgactggaacatcactataaataaaagtcgattcttcttaaaaagtcactctcaaaagctcactgctctttacttaatgagctgttcacaatcagaccactctgacctgatgcttccattgggacctgggtgtaatgaatggggctcatttccaaccccacctgcttttttatgccaagctccactcctgagaggtcccacagtggatggagaaaggccagactttaggctcagagagacatgggttcaaatccccgatctggctgcgcaatcttgagctgtaaactttccctcactggccttcaattcttcagaaactggggatactttttcatcctgtaagggtgttttcatttgctaggactcctgtaacagcaccacaaactaggtggctgaaaacaacagaaacttattttctcacagttatgaaggctagaagtttaaaatcaaggtgtcagcagagccatgatctctttgaaacttgtaggtgaatccttccttttctcttcctagcttctggtggtttgctggcaatttttgttgttccttggcttgcagatgcgtcattccaatcctctgtcttcacacggtgttctcttgctttgtttctgtgtctgaatgtcccttttttataaggacaccactcatattggatagggtacacatcctaatgacctcatcctaacttaatcatctgcaaagaccctgttccaaatgaggtcatattcacaggtactgggggttaagtcttcaacatagcttttagggagacacaattcaactcatcacagggctgttgcgcagattaaaattcaacttataatacctacccctgagtgcctagtacgtttcaggtcctggactaaaagcttattttacttttagtccaggacctgaaacataccaggcactttatcttgtgggatatggagtatcctcattttacaggtgaaaaaaaaacaggcacagagagcttcattcacttgcttgcccaaggccaaacaactagaaaatggcagagctaggttgaggacctcggtctttctgcctccattgttcagcactctggaatgtgagactgcttctgacagaggcaaagcatccaagcacatagtgggtgcttaataaacaagagttcccttactcctttcatcattctaggcactgcaataagatgaagagagattacccgactgtccagatttaatagtctgatttttttcccagtctgatttgccagtcctgtactttttaataatgtcaagggcaacatttaaagtgtggtcttttgttatgtgtctaatgtgcaacctgctggacagacataggagattggagataagctacaaagcgaatcctttctaaggcaccgtgttctttgatttttttttttagaatgtccgtgtattttttagcacagatactataaccgttcatgctctcccatctataaagcttccctttgattgcttaccaaatgaagagggggatatttacatccaacgcagcccagaacaatattattaaagcagtgcctgacattgaacaattccattgtagattagctgtggggaatttttgtctcttctacaaagcccgactcttgccaatcaacgtaatattctcagtgattgcatgacaatgaatctcctctgtggctgaagtgcagcaaaagctacatcatgccttcttttatttttaatttgagactttggttcccttattataatgaagagtcatttatgctctctggacaagcaccctccatatgttttgatttcttctcttccatcaagtaacttgtttcatctccatggccatacgattgataccaagtggtaggctagttgggaagaagaattcagggagaaggatttagtcttcccacaatcctcatcatggaaagaagagaaggtgatgcctgtgtacgtgtgtccatatgtgtgtgatctgggggcagtgggcaggatcagggagggaagaataaaaactactcttttttgagtcccagatctgtgctaggcacttctgcatcatatattagcttacttaatctttacgactcccttatttttagcggtttggccttttaaacataattcatagcatacttactctgtgctatccttaatgtcaagtgcttttcatatatttccatccccaaagagttttctatacttgctgtctccatttcctctccattcaactgatatatatttatattttattatacatgagatatataattatacattttatatatgtcatatataaagttaatatacttcatatactacaaatgatatgtatttttgcttgatacatccatctgtttattgttagtctcaccttgctacagtgtaagctccataaggacaggcattttttggtcttttttgttcaacgctgtttctcagttccaagaacagtgcctgatgtataataataacttcataaaagcttactgagagacttaatgatcttatttaatcctcccaacaacctatcgagagaggtgctattattatcatcacttgttgagataagcatagttgccagagatgttggagcatttatccaaggccacgtagctcactgcaggggcagaggcaggttttcacatcactgtctgggattccacatttctgcctgcaataggccattcttgcacagtccattccacaggaagtccatagtgactactgtaccttgaaacattctcacaaggaattcacatgcattctcctgagggagaggatttggggtgacaaccaggcaagctgacctctaggttggtcctgtatatttcctgctacctgtcaatcaaatagaggcagaggtgccagggcatcagatggaggatgccacccacaactagtcagagggccccgccctgctgggctttgccctaaccattgtcaggcagaagccctccgccataagcctattctctcgactcatgtttgtgattctgcaaccttcagcatcatggttatgtggaaagttttataaagatactgatgcttagaccctgtccctaaacctgctgaatcataacgtgagaaacagagcctcggctgctccaggagactgaaaagctgagattgagaacaactcccactaacctattcatgtaagttattccactggcccagctgggtttatctctctgagctttaactgctcaatctccagggcctttcttgtttttaggtttttacttctgacagcagcaaatgtggcctctctcctagagtttcctgtcctccataaaccacactagccctataacttccttctcatttgaagaccctcatggtctcttccctggacttctgtgcccaactctgatcttctcactgctggccttgccctctccagtgcattgtcctcagcaatgctggagccagcattctagaatgacaaattcaccatggccatgccctattgaccctgccaggagcccacattataaaagtaagttccttaccaccaaggcacaggcaaacacagaacctatggtcttctgggtgactctcatgagaatacataataatttgaaagattaatttttaaaaaaaggaaataaaaagaaaaccttaagaacctctctgttgccatcagtacgaattaaagcttaggcctaggctgcccccatccttgtgatctgactgttgctgacgttttttctgccttctctcatcttgtcctctctaccttttctctcaaattcttcatctggcaaactccatcaaagccacacttaaatgtcacctcctccgtaaagccctccttgataccctaagtgtcttgtataacccataagatcccacaagaacacatcttgattgactataaatactgtcacaatgtcattggcaattggctgttagaatcctgaatctcctggcccatgaaataggcaggctccctctgttcattttgttaatgttgcaatctcacaagcccacattttacatgattgggtttttttggaccccatctaaggagttacgtgggggtttccttgcgcttcaattcctgcactttgttgtacattgtaattcattcattcatccacttataacaccctggcttccaaacaggagctgagcctgcttgttgtaattgtttctttaggtgtctattttcatctctggactccttgaggggcaggaacagtgctgtattctttatatatctagcatttgatttcatgtctggcaggaagcgagtgcttagttgaagccggaatgtgttgagtgaattaaatatatatgtatacataataaaatatatattatatattaatcagaattacacacacacacacacacacacacacacacacacacgaagcaataaatagtgtaagaattggcaaacattttccatacagggccagatagtaaatattttttggccttgcaggctatatggtctctgtcacagggacctgattttttccatgcagtgtgaaagcagccacaggcaatatgtgttctaaccaaactttagttataaaaatagccagctgacccacagaccacagtttgctgaccctgaactagtgtttattcagttatgtacttatgtgaggcatatgattcatatctcaggaacgccccccccccaactcctgtgataaaagcaagtgaggaaagctcagttttgatgggagtcaacgatgggaagggactgtggggcgagtgggctgcaccagggaaggtgctggacagaggtgactagcaggtactggaagagacaggcaggtggcacttgaagattgagacctacatcaaatttccttttccctaccatttggccctggggacaggtgggcattgtgctgactgcagggaagggcttgtgtatttatagcctccacccttccccattaaaataggattcatttttagtctttatagctaatctttaggttggtaaagatgacctcattttaccaaagagagagttgaatttagagatccgaagggtcacacagctagtaggagtagtgaaagtaataatagtcacggcttgagtgtttactatgagctgggcacattgcttagcattcttctatttcatcttatgcggacggaggtactacaactgtctcctttttacagggaggaaactgaggaacagccgggctaactcttacccggggctacaatgcaggttgggatcaaagctggggttaaaacccaagctgcttgatctaagggctgtgccttttaccatgttgtaatcttgatctcccaggattcaagacccttgtttgtttcactgcttccccagtgtggagtccatgctcttggtaacttcagagttcctctccttgccaggcctagaggattcccaacccacatccagtcagagctctccttggcccctttcctccaacctagactagctggggctgcaaagacatccatcattgcaccagaggggccacagagaggctgtcagaacagaactctccttgctgcttcctaaccacagaacccatggcttcctctcttccacctgggattctttaaagaagcaccaccaagaaggaaacatcataggccccagaatagagctgccaagtaaaatataggactcccagttcgatttgaagttcagaaaaacacaaacccttctacagtataaggatatcccttgggatatttggaatatgcttatactaaaaagactttgttatttgaaattcaaatttaactgggtttcttgtattttaatttgccaatttgggcaaccctgacccagagggaagaggtatctcttctgcgtcaaagacttcaacctcttaaaaagttggggccatttctctggggaaatggggcagaggaaaaggggaagagctagaccctgcctttaaggaatttaatattgagctggaagagtggatgcagagggggatgtttcagggcctcctagggtaggacctgagaaggtttgggatacagcaagattgcaggggagcagggagccacattgcctccttcctgctcctgtcactctctaagggaagttcagtttttccaaaccagtaacacgtgctgcccctgtttcagaagactgtggcaagccttggtcccttggaggaagagcattaggctggcaccaggtccttcatcctgcggcctatgtgaacctctccagcacctgccctgctgccccctgctcagcccgatctgccccgacagcaccctagcccagggatgatcaaatatatctagacagaaaaacacatggaaaataagtggtaccctatggtgaaacatggctaaatactgttagtattaggcttagaatagctaaatatgcaatttgaggctaaatttgattaattgcatagtggggtagaaaattattttccggtgtgttctatgatacactggctgagaaataaacttaataagaaaaacattcagtgtgtcaggtaattttaaaaaatacaacagaaactccctccctcttgaagaaaccagtgctcacaagtttatctgagagtttctgcaggagaaacctgcttaaccttgcttaatccagaatttccaaaaatttgactacataatcactgccctgactttggaactttactctcagtaatgcctaataaactctgaattgttctgcgaaacacattttgggaggtgttggattctggaataagataaacctgagttgctttactttctgtactagtcattatgaaaataaaacaacaatagcaagggtacttgacgtttacatagaactttccaggttaatgtgaaaatgtttttcttgacaaacatgtctcccactggaacatgcaaacaactgtttgttctgggggcaggattggcctaaggtcttctatgacccattggctagtaacttgtggtggtaaaatcaattcttacaaaagaagtaaacttgtcacttccagaggaatgtagcatgttaagaaaggacaaagaggacaaagagataccttctttcttttcatctgacaacttttttttttttttttgagacggagtcttactctgtcgcccagggtggagtgcagtggcataatcttggctcactgcaaccttcacctcccaggttcaagcgagtctcctgcctcagcctcctgagtaactgggattacaggcgcgcaccacccaccatgtccagctaactttttttttttttttgtatttttagtagagatggggtttttaccatgttagctaggctggtctccaattcctgacctcaagtgatccacctgccttagcctcccaaagtgctgggattataggcatgagccaccccgcccggccacctgacaatttttatagcaggataggttttctgtttgtctgggtcagaatgaccctcaggctttgggaggtttatggccagggctgccatgtttggcccacatccctgtccagctgcagatagaatgtcatctcctatggcctcagccctgaaccaatcctggcaaaggagctcaaagaggaggaggctctgaacctggctggagggtcctgccttgaggctggggtttataactattggtgaggctgcacacctggaaggttactctatcccttgccagggctgtcctaacagactgcataactagccttgttatctccttaacctcccccagggtgggagccctgctctgggccaggctctgctgcccctgcccaaggctgagtcttagtcccctatatcctgctggctggtagggaagtattgccttgaggacctgcattacttgggatgcccataatgatgtcccacacatcaactaatcccttagacaacagaactccagagcccctatttcctccacttggctccccgtccacggccctgaagccccagcacacctcacagccatctctcttaaggcaagagacagctgaacttgtattttactggaagaagcaccatgttcccaaggctccagacccacggcctctctccttccaagaagagttagacagaggggcccaaagaggaactgaggaagaggcgtctgaccaccatcaaccaccttctgcaaatgatggtgaacagggcgactgcaaaagacagggattcaacgtgtggtgcacttgagttcccgtagggtgtcctgtgaatcctcatcctcctcacttcctccttcagcataagcaccatcgcttacggaccacttctatgacaaacttcacacttaatcctttctcatttaatgctcataatagcactgaggtggatactgtgcccattggacaggagaggaaactgaggcgcagagagggtgagtcacttgctcacattcacacagcatggaaccaggggaactggggtgtacacctagtcagcctgactttggcaccttctttcttagctgctgtagaagtgaaggaagagttggtgagtcataagactatcttgctggctacagagtctgctttgaggctttgtttcctacaggtctccctaactgggccaaagatggtacttggtgaacattttgcagtttgaggatcaggaacagtaggaaaggagagcccctgcctcatccattaattttcactcatctctggagtccaactacttctccaaaggcttcatggaggaccctgtgcagggggaagccatctgttcaggtcctctgaagtcatagaggcaggtggtagaatggactctaccctctgccttctgccctggacaagctccttaattggaagacccaaaaatgtcttacacagaaacacaggcatactaacacacactcacactcaacatgcacaaatccatccattcacatcccctttacatattcccctttacaagagacatgcacacatgtacattctcatacacataaacatgcatatataaaaacaggcaaattcaggatgcgtctgaacacagctcttacattcacacacatgacaatggatacaacacacttactctcccacacatttgaataaaccactcatgtttatgtacaagccacgtccatctcaagataccgatccatttccatatagcctctttggattaataaacttttgcacaggtatctctttatacaaccagaacagccctcagaagccagtgttatatcacacactcatggggcctgcctgacacttgtgtttaagctcctgttttcccagacacagtacagaatgcagggatagaggcgcagaggtagatctgaccctagagacgcctcaagcatctgctggctcagtctgtgatttcagaggtagggatcaagggctgtcagggtcagggagacacagggcatcatggtccagaaaatgtctctggtgtcccatagacctgggtgtgaattccatctgtgcctctcctggctgtgggttactggttgtataacaggtatggattaggagagtggactctggagctgtactctgggttcatggtcaaaccccagcactgttacttaaatagtaagctacttcaccttcctgcatctcagcttcctcagcaataaaatgggggtaataatcgcacccagcttagagagctgttgagaggattaagtccaataaaccaggcaaagtgcttatctcagtgtctgacacacaggaagtgctcaataagtttaggatgtgattacatataagcccctggattccctgggagaagatgccagggcagtgtgggagaggctggagctgaaaaagagagaagccgggtacagtggctggggagggcagatggccccaggagccagaacatgggatgcaccctggctctgccaggcaggcggcatcccttagacctacactgctcttgttgagccagggagcggtctgttgctttgaattctaaagacctcccgtacagcctaataagaatcattcgtgaatagtcctacccagctgcaaactgaaatgcaagaggagaccctgtgtatcaatggactcagaccttgtcccctctctgatcctcgcctcagctgccctgtgctgccctggctcaccagccagtggctcacaacttcagggatgaggggaaggaataatttggagaagtttcctggaagaggcatttggtatggtcttgacagagaaggaaggatgttccagagacaagaagtggcacatggccaagagtacagaagcccccactgcttgctttccaggctcttgttcccagggttagtgactcctaacttcctgtgtgcaaaatcccagcccagaccttcctcctgactccagaccccaagtcttgctactttcgggcttctctaagtgaaaatctcagaagtgcctccaactgcacatggcccaaattactctcctgcccttgccccaaacccatctctcccctgggttccttgcatctgggactggcccatcatccagccagccatccaagctgagacctcatctggtctcacacccagtctcttgaattaccttccttccatctctcatatctgcccccaccccattgctcaggctccaggaccaggccctaccctatctcagtttcttctcttggacttggagatagcctcctcattgttctgtcttcagacttgccccaatccaacccattctctaaacaactagtaggatcatggctcttccctcctaaaagcgcttcagttggtgtcaagctctagaatatcactcaaggtcctccatgagctagccccacccatgtctccaactgtacgtacccgtctcctcctcacacccaatgttccagcaacaatggctctccttatttctcctccagcagagagagagagagagagagagagagagagagagagagaggagagtttgtgtctatagtcatgctggtgtgttggtgttacatgagcatgtgtgtgtctatatatgcatgtaaactgcataactatgaaatgtgtgggtatgtgggtatgtgcagggacatggcatgtgggtattcaggtaggagagcctgttgaggatgggcattgagggaaacgtggttgagaagccagtggttggcatagttgggcaagatgacatttacagcaaaggctaggctactgacaggcccaggaactcaaggcctgggagttaggtgttaccaggccctaaatctccccaggtgaaaaagagggagctgcactccacactctctagacctggcctgcaactgtcctggggcacaggtcatatgcatagaagaagccttatgccatgtccctgggtatcttgtctccctccttcctattcagccaaggattgggatgcgtctgtcttcatgtctctgaagagctgctgttgacctcattgttccaccatggtgattgttcaccaaagatagaaagctgttaattccagctcctaactgattacagcattgagtcgggcatcatccagaaccttgggtgtttttctagacacctgagaaccccaatttctctttccccttggtcctctatctgacaatctgacccacagtcattcctgactgacattggccaagtctccaaccttccaccctcttttcccaggccagtctgttagcacacatctccagggctggagagaggctgcggaagccagcctggttctctcttccctcccttgagcaatgagacaagaatttgtctaaatgttagggacattgcactccattctgtcatctgttcaagaggcacatggcttactggagctgctcattcattaactcattcaactggtgtcttcacaccttggtggtttgctgggatctgatgatgaatgtcctccctgccctcattatgcttacactctacaaaaggtgctcttgtatttaaaaaactatcagagcccatcccgggctgcaacccctaagaagaggtgaggccaaatgacctttaaggataggctctgtgtcaagcaattatgccagccatttacatcgttgactgccaagaaaaatcaatctcttccctggctttctcccacctaccccctcgcccgtcctccacttcaggttccctgccaggctcacttccttctccaatcctcgctccaacactcacctgcctataaaacaaacccaggcaccatccttaagcttcttgtgactctttgatgccggcagaagaaactgtctacttcttagcaagacatttaatgtcctacacaatctggactcagccatctgtccaggttttcctcccgctacttccatccctaccacaccctcaaccacgcacactcctgctccttcgtcacctctccttctgtgatctctcctttgtgccctttcacgccccttggcctctgcagttgctggccccacctctgaagtactcttgtgattttcatcatctggcaaatccttctcaacctttcaagactcagttcaaatgtcacctctgggaagacatccccctctcctccgtggagccaagtggtccagtgtgctttgtacacacctccatggacactcagcatggtggggaggccacaggagccaaggtagagagaaggagaagagcagttaagggctgagtcctaggaaactctgaccaagaggctgtgatgaccccaagtatcttgagaatgaaaacttggctggcaatgtgtgaaatgccaccaagatagctaaagccagaacaggactgaacagagctgttgaatttgatggtccagttacagaaccagtggtattaagcagaggaaaactaatagagcaaagaggtagaggtctgaataagaataacagtagtgatggtggataatcttcaagtacatgaagttcttctctgccccagggcctttacacaatattccctggcccagaagttctctgtcttccattctgcattgctcattcatgatcgtttttcagcactcaactcaaatgtcacctcctcagagaagcctaccctgacatttaatccaacctcagctattctgcctcaccaccctttattataccttcagacatttaatcctgacatttaatccaacctcagctattctgcctcaccaccctttattataccttcagagcatttacagtcatgagtaatcattttatgtggttcttgtttttgttgtttacacacacacacacacacacacacacatgcacacacacaaacatttaagctccatgcaaacagagaccttgtctgacttttttcacttttgtatcccagcatatagcacagtggccagcacacagtagacacgcaaaaactatttcttgaatcaacgactctatgaatgaatggatgtataaatgagtggatggatgacaacctcaatgaacttagctttctgtgagattgtcagccatatgtttactgaactcacgtcacagggcttctgttccttaaacattccgtaaggcattgggcaccagcaaatgtttgctggatggctgcacgtggcaaaaaaagtctagctccaccaaaattccatcttcccttcttggggcacacagctagacaacctttcctagacctccctgcagttaggtggaccatgggcaaaagtgatacaggccatggccaggcttagcccataaaaacctccatgcagcctcctgcatgttcttcctacattggctggatgttgttgatcagacccaaggggatgtgtgtctccaaggtggaaggaggctttatccctgaatttccaggtggagtagagctccccaccatattaaacacctgcccaggacagatacatgagcaataaatgaatttaaatttgcagagccatggcctacccattctctgctacacagccagaaccagcttctctcacatgcccctgaatcctcgcacagtctgtctgtcctgcagcctcaacctgtgccaacttgcaacgtttccatgatgcctacagcccagctgacccaggaacctgccctctctaagcttgcagtagaacccaatctctgtagctcatagtccttatagagtctgtagctttttctgagatccatgggctagaatccaagtgggtctttaccagtttggagtcagggatcttttgagagaagataaaacacatggaccctcctcccaggaagaaaggagccacaggcccccgagttcaggcatagattcctagtgcttttgcccagcatggctcacctgacagccccattccaagcttaaaatgtccctgccagaaaagggccttgcctgttcaagctgaccctgctccctgagagatacggattgattttattgactcaggagccagctatgagcatgtccaaaatttatcagactagccttcatttgcagggcacttcccatggataagggtacaagcccagtgctcagaatcccagtaccactgcccagtgattctggttccctgccatgctcactcccttctccaatcccccatgctatcatggtacctcgagcaagtcctttccctccccaagactcagtttcttcatctataaagaggataataatataactaccccttagggttgctatgtggacccaggcagataatccatgcaaggcacctggcacagacctagggctagtattatctccttcaaccccctcccctgagagtcgaagtaggtatagtactatcatgatcttgtttctacaaatgaggaaacgaagaccgcagaaatgaactaacttgccctaggtcgtaaaccttgtaagtaacaagcctggactcaaacccctaaacttgactgccttccacagctgattggtactgggttgctatggaaacctgtagggcccagggtaagatctagtggaggccaagtgaggggtatgggggtggcagttctgttggtggtggggggagggaacactgacttaactccggccatccaaatacccacaattatacaattgagggtagccagggttaagtcagcctccggtaaaggagaaggaggtatgttcataggagcactatcacaacagccaagcgggagaagcaactccagtgtccatgatgggtgaatggctaaacaaaacatggtacatccgaacgacggaatgttattcagcctgacaaaagacgggaattctgacacatactacacagcatggatgaactgtgaggacatcatggtaagtgaaatgagccagtcacaaaaagaacaaatactgtatgattccacttatatgagacacctagagtagtcaaactcattgagaaagaaagcagaatagaggttaccaggggctgggggagagggaaaagaggagttagtacagactaaagggtcagagtttcagcttgggaaaatgaaaaggttctggagatggatggcggggatggttatacaacaatgtgaatgtacttaatgccaatgaactaactccacacttaaaaatggttaagataatgagtggtgttatgtgtatttcaccacgattgaaaataataattcttttaaaaggaggaggaggtcaaggtgttcatttatcacccgtggaccctgtctcgccatcccaaggaggaagagaggacgatcccgagtagaacgggctgctgggccacactgcccggatccccatctgcctttctcctgcctcatttccaattccagaattattcatcatcaaggagctgccagagatggaatgtgaattaggagctcagcttgattttgttttatcttattttcccccacgaggcgccgcctgagtggggcggggtgggagtgtgccgagctttgttgtgacttgtcgccaagcaaacgcggtgtcagcttccacgcaggaggctgagcatggagcatcctggggcctgtgcagaggatgcttattccaggaaataattacccgcgtgtcccttcaagttggcccaaaaaatagaacactcaggagtgagtgctgttataccttcttaattagtttcctcatttaacccgggtcattactagaaaggcattcaggctctggagacagaccacgttttgatcttttactcccgcttactcatgggcaatcttaacgaaagtcactcagcctcagtcttctcatctgtagaatgaaatgtagaataatgaaagtacctatattgtagggttgtggtgaggattgataaaatgtcatgtgtgaagggcttggcactgatatgccagtgtgtggaagctgactttgtgtcaccctgatcatcaccaccatcaccatcatcatcatcatttctattgggttgctttgtatatgctgacactattagacaaaataaagtgccggcgttcagtctactttctattgttcatctctccattcaaacatcccacttacaggtgccaaaccagccacacctgggggttggtgtcctcctatggtggccacaccagtgcatgatgtaggctgatctccacctcgacactggtaccatgagggagctcacatcaaggctggggcctgtgttcctggaagcagggtgatgcggcaattaacacaccagatctgagttcaaacctggcttggccttttaccaactatgagatcctggctctgttctttttaattatagtaaaatatacataaaatgtagcatcttaaccatttttaagtgtagtttagtggcattaagaatattcacattgtgcacatgtaccctagaacttaaagtattaaaaaaaaaaaaaagaatattcacattgttgtgtaaccatcaccactatccatccacaaaactgttttcatcttgcaaaactgaaactgtacccactacgcaataacactccatttccccctcctcccaggccctggcaaccaccagtctactttctgtctctatgagtttgactagtccaagcactgcatataagtggaatcatatcgtttttatccttttgtgactggcatccttcacttcgcataatgtccttgagagccatccatgctgtagcaggtgtcaggccattgtgtgtctgctttttaagttatgcagtgcagaaaacatcacagcttagagttgctctgaagatggaatctctatctaccctcttgctcagaccaaaatcttaggaatattccagaatcctctctatgttccacccccacacccacaccatcagtcagccctgctgagcataccttaacccaagcactcctctttggctcctgtgctacctccgtggcccaagccccagtctccttcacccggtgtctccaaaggtctaactgagctccctgattccactcttgcccccacagccactcttcacacagcagctagagggatctgttaaaatacaaattagagcatgtctctcccctgcttaacacccccctaaatcttctcatctccctttaaataagaatcaccctcctgtcctggacctgcagagtctccgtggccagtctctgctggtgcccttgattccttcctcaccatgctccagccactgtggcccaactttctggtcctcaggcttaccaagttcctacctcagggctcttgcattcacctatcacctcccccgagaggcctcccctcaccacacaaatcaaagaggcagaagcccacaggtcctctctccaaggctgtcttatttcaagtctttgcatgacacttatcacaactggctgtctttcccccctttgtttactgtctatcttccctactagaaggtacgctccatgcaagcagggagcctctctgactcattcattagtatagacccagtacctggcagagagccattgctcaataaatacttgttgaatgaactgacaaatgagcaatgaaaccatgtatacagagcactttgcatgctgcctggcaagacgttgtactagatggcagtcattattattatcatcattgtcatcataatgattaccctgggcctcctgcctcattgatctgcaaggctagacctcgctttaagatttgggacaagatcaataagtgtccaggactttctgtgtcatcaaaggagctggaattcatcaaaggggctgtgagtgaacaagtttcatgccttataggtctgtgtgttcaggcttaatgtcaatgagttctacacaatcctatcccactcccaggttggccaaagacactaagattgctgacatgagaaggtctaggaagggcaggcagggctggagctggaaggataagccagtgggaggagacagaaggggcagctgagagacagtctctctggacccacagtgactgaagaccgacagcaccatgaccatcaggacctgaaaggttcccagatctgggttccctgcagtagagacaccgaacagaaccctgatcctgccaataagcaattcatttatcaatagaccttccagatctcctgccatgtgcctgtactagacccattaactcagtcactgtgtgtgtgtgtgtgtgtgtgtgtgtgcacgcacgcatgtgtgtgtgttggtgctgctgctaggtgactgcagatgccaccctgaaaaaataatcaaacagctctttgagggatgcttcatgcagggtttccatggcaacgctttatgaaacagcaaggcgaactttggtaggctcgctcccacccccacgccttttcctgactgccacagggatcctcattccatgaggctgtgtttttccaaagcactgggtcctcttggctgtgggaccttgacttgattacttaccccctctctgcctcagtttcctcacttgtaaatgaggacaatgatagtacctatcacatagcattgttctgagaatgaaatgagtttgtaagtgtaaagcacctcttccatggttagtgtgataagcagaattctgaaatgcccctcagcatcccaccccttggtcccatctccacaatcccctccctttgggtgtgaataggacccgtagagatgatgggctgtcacacccatgactaggtaaagttatatggcagaggtgaagggatttttttttgcagacataactgaggtccctgatgagttgactttgagttaatccaaaaagaaattctcctgggtgagcctggtcaaatcaggtaagccctgagggtttagaggttagagacttgaagcagtagagacttttctgctgaccttgaagaaggaagccatcctgattttacagctgtaaggaaaccattctgccaccaatcatgtgaacttgagagaggccctcaggtctctgataaaacctcagccttagctgcccctggatgacagctttgtgagacccttagtagagaacttagttcagccatgcctggacttctgacccatggaaactgtgcggtagtaaatgtggtttaagctgctatgtgcgtggtgattttttttatgcagcagaaagaaagctgaaacagttagtgtttaagagatgttcatgcttgtggatatgatacccctctgcccacacaaggccctcgccatgctgtgttgtagctgcctatttatctcgactccctgctgacctgtgaccttcccacacaggtgcccagtaaaggtgagcccctgctcaattttccagatcagataacatgtgcttccctcgtggtcacagtgagatgatgtctggaaatagcaacctgctgatctaggtggagaggaaaggcgcctgctctgaagactatggatgcttctctttgtttattctgagcctagataaaaaatgccacagagaaggcgtgtggtgacacgtgtgacactgctggcttaattgccaatgtgagaaaacacaaaagcctgaaactccgcaaaggcagggatcgtgtatgcctcatccttatcaactgcccagcacagtgccagacacacacagatatttaagtcagaaacgagtttttgccttccatttccattcaatgtagaataaaacccaaagtcctccctgtgacctcagaggtgggcctgcgtgttctcgccccagcagcctctctgtcctcaggccctacctctaggtgaccaatttagtcccagtttgcccgggacatatccaggtttagtactgaaagtcccgtgtcccggaaaatcctctgtcaaagcaaagcagcacagttgctcaccctgccccctctccctcctgctgcccttgactccttccataggggccttcaggtggctcctcacacctgccaaactcaaagccctttgcggtgtttgcaaaaactcctggcttcacatctttcaggtctcttttcaagggtcagctcctccaggaagccctcccagactgccctgtcccatgtaatgcagctcaccactctctttccctgaccctgcttttgttctgcatgccatttatcccaatctgaaattattttttgattggcttgccccctggctgtctccacaccagaagtcaacctctacaagggcagcggctttgttgcattcctgctggatcctagcagcgtgggcataggtcaaatgaatgaatgaataaagctttgtctggcaacttgactttcggcccctttccaaatcctgatccccacgtgacagaagccctctgggtctcaggaggtcacaatggtccacagtgaggaccctaccctgctcctgcccccagcccactcttaccatccctggtgcctccagggctgtgctgactgtcgtcttccaactcaagctggcctcttgccccaccctatattcttcctcaggtggacctcctgggaatccccagaggcccacccccatgggatgggtctcggcctcagaccacctcctctgtgctggaaactgtctttcatttgtcagaggtttgagcaatctcacatctgctctgcccctggcatacctcactcaattattcaacacacaaaatccacgggaggtagattcgctcacacagacattatcagaccactgacttggaaccctgatgctctctggaagcagtttcttcctaattattcaataatttattttataactctgtggagcagtctgggccagccatcggggacagggacattgatcagacataggtcctgccttcaaggggctcatggtgttgtgggggagacagatgtgcagccaaacaattacagagagataagggggtgctgcagtggaagcctgtgccaggcaccatggaagcccaggggcaccgcacgcatttcccatggaaacagagactctcatttgccaacctttctgagctcaggaatcagacgcctcctctcccagctaacaggatctctctgggggatgagagttttgcatttcagtctcagtacttagcagaagtctatgtatatgatgtctttagaaagcgcccactgattagggacatatctggtttgagggcgactctggaattagtgagttattgggaggcagtgattcaggaagcatgtccatggcaggtggggtctgaagtgggccacatctcccatccttttcctgatccctgtgtgggcacagacaaccccaggccacaatttctgactccatctcctaccattctctattgtttctggtttactgggccttatatgaaatccaggccatcaatgcgctacagcgcatcagccccctcccctgccaatcccctacttgccagctgtagtcacactttccaaggaggagcacccacaactcatggcttggcagcctccctgcctggtctcaccattgccccagagccccctgcaggtgcatcagtgggtgtcgaaggctttgcagctgatgtcactgggcatcctaacaagggcctgtgcttcccccagttcaagaccagcctgatcccaaaccccacctctttctcacagcctgcctctgcctctaaaatcccattaggcctgtgtaagactgaggagctgcgctcactgggacaggagtcttctggccttgcatgccctgtcctgcttggaaggcaaaggaggccagtatctcagtgacatctgggagggagtggtaatgtcatggtgtggttccaagcacggttctggaatcagataggcctgggcatccaccttagctgtgtgactttgagaactacactgtacctctctgaccttcaggggcctcatcagtgagatgagagtgagatggtttgaatgcgagcctagtgagaggtgtttgggtcatgggggtggatctctcatgaaggctttggtgctgtcctggcagtaatgagtgagttctcactccatgagttcacgcagttgatcgtttaaaggagcctgaaatcccctccctttctctctttctccctctcttgccatgggacacgctggcttcccttcaccttcccccatgactgtaagcttcctgaggcctcactggaagcagatgctggcactatgcttcatgtacagcctgcagaaccatgaatcaaatcaacctcttttccttataaattgcccagcctcacatattcctttatagcaacacaaatggaagaatacagggagttattaagacttggggatgttgagaagattaaatgagatagatcatgtgaaaaacacatgtcacagacactggcacctagtaaggactcaataaatggtacactagctgtttgggatggatggaatggaaaacattccagcaaattcatgcggtctgggcaagagagaggatgctcaggctcctttgcccaggactcgtactgcagggccagcagcctcactcacagttgacatcttccttgcatgcttccctccctctgttcaggcttcatccatttttaatgatgaggagcatgtctgcctgaaagcggtccctggggagggggagcgagttctatatgtgggcatgttgctacttagggggcttgctcttacccaaaagagttgggggtttagggggccacagaaagacttcatttgagtaaagcatgtgcagcatctgtgcaaacacacatgctctgtggaatccagccactttcaagcaaggtcagcccaggttctcataggggatttgaagcaggattcacttgacaaacatctgatttacaaggaaccttgagggaaaaaatttattactgcttctctactccaatgccccaacagcttcccctcttactcagaggaaatgccaggtccttccaatggcctgcagggccccaggtgagttgcttcttccctgccttcctctctactccctcccttgctccagcctctggacctttgtacttgcagctccctctgcctggaataatcttcctcccccaaatcagcaagattgactccctcatatccttcaggtgtgtccgcaaatgtctgctgctcggtgagatcctctttaaaattgcatccagacccatctctccccacctctattccctgcttcctttttattcatagcatctaacatatcatgcagaacctgtaaccacactgtttattttctctggaatgcaaactcatgaaggaagagatttctgtttccttcattcttgtccttagggcttagagcaatgtctggtacgtagttggccctcagtaaatatctgtgaatgaatgaataagggaaaggaagaatgaagagcaggtgtcacctgcctgagagtgcagatcttgctgtcaaaagattgagagtctaaagcctgtcttcctcaccctggatccaacaacagtgtcttaaatgcaaccccagccacaccattctcctctcaaagccccttatggggcccctcacctaatctgaatacctacccctggcttatgcaacagtctcctcactgcatctgctcttctgcaccttgacagcccattggaatctctgaggaactttaaaatacagatgtctgggttctactcccaaagattccgatttatttggtcttggatgaggtctcagcatgggctctcttacagccttgttgaggttataattggcatatatttaaagtgtacacactttattttaacaacaaatatttaaaatgtacactttgttacattttaaagtatgtatactcctcttaaaccatcaccacaatcaggataatgaaggtatcaatcattcccgagattttcctctggacccaccccatgcagtccctttctcctctcctctctatcctctctccccaggcaacaactgatctgctttccctcactctcaactagtttaaaatgtccagaatttcatataaatgtaatcatacaggactcattttggtctgacttcttccactcaggatagttcacttgatatccatccatgctgttgcttgtatcagttccttcttgtttattgctgcatagtattccactgaagggatatactactatttatttattcattcatctgttgatggacatttgcattatttctagttttctgttcttacaaatagaaccactataaacatttgggtacaagtctttgtgtggacatatgtgttaattttccttgcagtaaagcctggaagtagaatggctgtgtcagatggcagatgtgtctttaacttttcaagaaactgccaagctgccaaggtgtttgtccaaagtggttgtgccattttgtcttctcacctacagtgtacgagagtctccctgagggtgcagatttttaaaagatccttgggtggttctaatgtggggttggggattagaacaactgctctaaacagtaagatctttgagattgaagtggtgccatggagtggtggagagaaggcgctgcagcaagactgtccgggttcaaatcctggctctaccacttcctagatgtgggacttaacctctctatgtctcaatgtgttcagctataacatggagatgataataacagtgcctgcctcacagggctattgtgaagaaagaagtacatagaatgtacttaaatcagcccctggcacatgatcagcatctcatccatatctgtaattctctttgaatctctgcactcctagtccccagtaaaacgtgcttggcacatgttaggctctttggaggtaattgctggatgaatgaagaaataagcaactggaataggacaagggcagaggttctagaagccttaagttttgtatattccaggtttctgacttgttttgagataattttaggactcatcctcccactcccaacaagacttctgcttttttgtttttatttctgaggatggggaccccaagcctcttctctccttctgatctgtccaggcagatggatgcacaacccctcccatcatatgaaagcccctgctcccagaccccagaagtgaggccttcctggccctagatggttgaggggtagggcgctgcagcactgggagttcaggtttcagcaccaggtatatctggctttatatcctgactctccccttaactatcagctgagtgactggggacacatcactggacctctctgtgctctgtgtcctcgtttatgaaatggtagtgctcataacacctctctagcaagactatagaggatcagatgagaacttgcatttagcactgtgacaagtagcacatggaaagcactcaggaaactcaggaatttactattcttcttcacacctcaaaggtgcagaggcagagggctgcttggcccaggcacctggactgactctgtccctctaggttgcctcaaatcatcaagcttccccttggtaaaccttatggagcttgaatcaaagtcacccaggatggggttagaattcttctctccactcatcctcttcccctcgaccgtggagtgaagaaggccctcctgcttcccactttccacagagggcctcttgggggaaggcctgataaagagcttatggtgatgtgtcttccctgatttgcagggcctcatcattcttgtcattcctagctttataatttcactgtctggctctgaaattatgcaagagaacaaatgcatgccacacttagtgccataaacacacaatctccaggttcttgttgaagggtcctcttgggtgctggtgaccctctccatactttcaagttgctccagccaaggccacggggtaagtgtgatggtgaaggatgcccttgtgcctcggcttgatgctgggtgctatcaggaagtgctccataactggggtccttgccttctgggattctcatctaatgctacattgatattagacatctaggcacaacaaccctctaaaaatacttcctgtctaccagtttattaaatacaggtaagaatggctacctaattttcagggcacagtgctggatgaaaatgcagggcctctttttcaaaaaatggttcagaatttcaagatggtcatagcagagcataataccatgcataggttcctcggtgacctgtgtgacctcacagtttgtgaacccaggaagctggccctgaatgcggatagccacattagaagcacatcctttccataagccatatgactggcaacagaatgaatgagcaggcagagtcccttctcagggaatcacagtctaatgcaggatgcagagacgggagaaaccagcagtaagcacagcacagggaataagtccagtggccaaggaacgaggtggaatggcatgagcttagtggaagtagctcacctgctctggggagacaagggagaggtcagagatcacttcccgtaagaaatgatgcaagacccaaatcttacaggacaggaaacctacatggctccctgaacttccagggagtttcctaatccaaggagtccagccttgagcctctggtcttgactccagattctgccagcccaccagcagtgaagccttcttgactgcaattctaggccaaccttgatctcacctgcccatccctagaagcaaccatgaaaattttctgccctgatggttgcaaatccttgaaggcctggtctacataaagtagatctttgatccaggacgtaattcccaattatgctgaggcttaaatgggaatcacatgtgccaggaggctggcatgtgagggagacactcagctagtgaagaaaccttgttgaccttctcaggatcttgggttctagggggtttgttgttggggcttatgtggcaactcctgtaaagtgataagaatcttcattttattgtgaaaaatcatttcccaaaatagagccaactgcccagggtggtgatgaaactgaaaagtaagcgagggagtctaaggaagtaatggtttttagcaagaaaatagaagctgcgggtgaattaaggagtggatgttgagtttgatggtggctctgatttgcaagtgtttgaaaacaagaaaaagatgatttatgaaatcatttcagcaagtgcttcagccagggcaaaaattgcttattgagtgggaatgaatacttttgtgacagctaaaaaggcggttgagagtgttgtgagtatatgcccaggaaacccatgactctctgtggaaatgcgcctagacaacagctgggagccacgtcaacatttccataaagcaccaggtggtggaggcagtcctgtggctgctgagctgacctttaagtacgagaaaaggtttaaacatttcgcaaacgttttcccttgccacaggagaagttaataggggcgtggtattattattcatcacgattctatttagtcttagaagctttagttaaactccatgcgaatgtgttggtcataatgatgtggggtgaggtagaggagagtatattttagtggagaattgattttaatattttataaatggctttgatctcatatttatggaatcattaaaggtctgaagaggtcaccaaaacactttttcttaagtacacacttcacagacttttttttttaaagcggggggtggggggtagtctataaagatatttgaggatctgggaatgtcaggttctcaggatatgcctggcttgaatttcaaggctctacacacacaggtagacatccacaccccagcgtgaacaaatgcatgtacactcctgtttaatcgcccagcacacctgcacccacaggtgaacccaggcacaagtgtgcacaccctctttccctacaccataaaggtatctctattgatttctttatctccgtagtgatccacgtccccctctgcactccccacatcaaatcccagccaaacgtccatgatggtcacccaacaggtgttctagaggtatcatgaaaaacaatacattaactctttgtaaccaggaagtcagggcttccatctgggagggaatgcctcacggggccttcccgatgagagtagggccaataggtttggggggcctcactcggggcaatgggtctctgagaagagcccagatcacattctttgcttcagttttatttgcactttctgacctccagtctgtgaagaagaacctccacggggcaggataaaccttgagatgaaggaaggagggcttgtctgaagagccccatcctctagggtaacagagagtcagaaggatgccatgtcttccttacatggttttctgcaaggcggtcagaaaccacagatgagatcccatcactgcaggagtattcttagatgctaaagcatggaagctgcccatctccgcgactattttcaacccctggctaactatcactggtcagccttgccccatgagcctagtggtctcctctttaggaggaagatgagaagcccgacccattttccagcctggccctgtcatagtcccacacttcggggagcctgtctagaaatgaatcaagctggttctttgagtcatgttaggtgagttatctttgcatctcatgcttccttaacttagaactcacatgggagctggggtgagtcttaagcccgctaacctcttgctgtccatctttagagttttttacaaattccaggtggcagatggcccccaaggtgactcccaacaatcctctagcatctggtgttcatggcttcttgtattcccatcccctttggtatgagtgaggcctgtgatttgcctctcaccaacagaacatgaaaaaggggatgggatgtcacccctatgattatgctacattgtgtaagactctgtcttagcagattagagataagatctgcttgcaggcttgatcaaggaagggtccatgttggagatgccatgtggcaaggaattgaagttggcctctgggatgaaagggctgcctctagaacctcagagtggcctccacctgacatccacctgtcagacacctgaatgagcttggaattgaactcctcctccagatgaaaatgcagccccaccatcacttgacagcagccttttgaaaccctgcactgaggacccacaaggccatacccagaatcctgacccacagaaactgagaatgtacatgtgttattttaggctactgagttggtgacaattttataactgtgattaactataactgtgatcgttggtaattttgataatttattgggaacaataggaaactcatacacccagcttgttctgggactttaccaccttgatgctactttttcaggcctctgctagccttcaaccttgtcagtcacatgtcccccttggcatgttctggacacatcctgtctgttctctagctcccaggagtaggtcctgtaagtcactcccagcgttgttcacttagaggtgatcattgaaacggtgggagtcagtgagatcataggagaaagaacatggtcagagaagaacaaaacaaggaccaaatcctggggaatggccacactgttcaaggcagctgctctgaattgaaatgtgctttaagcataacatacacaaccaatttcaaagacagtgtgaaaggaacaatgtaaaatattgcattttacattggttacatttttaaatagtaatatattgaacagatggggttaaagtatactactggatttgattcacctgtttctttttcagtcttttaacatggctactagaaatttaaaattatacacatggctcacatttgaggtttagatcacatttctactagacagtgcgatggatggatggatagatagacagatagatagatatagagattttgaaattatttattgcgtagttacagatgccatgcactatgctaagtgatttataatactatctcattggaccctacctgcagccttgtgaattaggtattattatttccattttacacatgtgaaagttaaggttttgagagttaagtgactttcctgagatcacactaagaattaatgaaaaggcagaaattcagtcagtcccatctgactgcaaagcctgtgctcttagccactgtgctggctggctccttagatgaatgaatgaatgagtgagtgagtgtgtatgcttcagattgtaagtggctttcctcagatcacactaagaatccatgaaaaggcagaaattcagccgggcgtggtggctcacgcctgtaatctcagcactttgggaggccaggtgggcggatcacctgaggtcaggagtttgagatcagcctcaacatggagaaaccccacctctactaaaaaaagattcaaccgggcgtggtggtgcatgcctgtaatcccagctacttgggaggctgaggcaggacaattgcttgaacctgggaggcggaggttgcagtaagccgagatcacgccattgcactccagcctgggcaacaagagtaaaactccatctcaaaaaaaaaaaaaaagaaaagaaaaggcagaaattcaaaggcagtcccatctgactccaaagccactgtgctggctggctccttagatgaatgaatgaatgaatgaatgagtgagtgagtgtgtatgcttcagatggtgaagaaaggtggaacagtttcagctcttacacaccagacctctaggcaatagcaggccccatgtggtgatggtgcccaagactcaatcccctccctctttttctccctccctcaggaatccctgtgtccgcaatcgctaatcccaccctcattccagatcttgcccattgtctctgctcccgtaaagtgaggccagcttgtgggatctcaaagtgacatccaatggcacccaagcctgagctcaggcctgggcacccaggagcagatgatactacaggtgctctcctggcacattcctgccccccacccttcctggcaggaaagatcagatgcccactcaacagggcagctctccttcccagcccgggccttccccagaagggagatggcttcctctgaggctcatccccagccttcagggcctacctgagtccaggtgcgtgcagggacagggctgggcccctggggaggggcccctatgtccatatgtgtccacttgctccctcctgcttccctgagcctcagagcaggcaggtgattttccaggtcacttaactggtaagtggcaaactctggatttgaatccaattctgtgtaacccctgaatgtgtgctctgtttaccgtaacccatgctgcctctctcctcaaccaaccatgtgcattgttgcttaattccctctgcctcagtttcctcatcagtaaaatcaggatgataacaatcaggttgctgggaggattaattggggtaatgcatataaacagcttagcacagtgcctggcacaacataaacactcagcaaatgagagcaatgatcattactagaaccattatcattatcattatggcagcccttgcggtgtctgccgggactggtgggaagtcactagcagttaacaggatctccttcaacgcttctggcacggccaaggacaccttcccagagagcaggactcacgattaacatgctgcagatgaacaccagcctttgtcctcccttgaggccccacctgggccacattagctgtgacctctagactccctgaggccggcaaaagtgtctcatgtgcatgggtgagccagtgtggcggcttcatggaaatgcatgcccgcgaccaatcttcctccggccttatggtggggcagccactgggtccagccctgacactgctcacaggctgggagatctgcagggcctcgggaaacatcgtgcctggctcaggtctttcccctgatcctggttgcttcagcttttgtgcaaagccaggcacattccaatgtcttttctgtgctgtgcgtgggtgagagcagagccagcagcttccgagcagctcttggagtcacatcctcgtgaaaggacagagctgggttttccccgtggagcccagtggcaagcagctgattacttctttgccttctctgcaagcttgggagggtcatgtgggattggttcaagtgccttcggcaggttgggcgggtgcctgttttgggaggtgggtgagagggggtgcctccaaggaacccaaattctacctgacttcaccctcccagcttggttcctcagagtgccctgggagccatggagagttgacgagatctattcctgtaagtcttccaaagaggcaaaggagaatttgggtggttagagagaggcagcacaactgactaaatcacagctcgatacttcttccagcccaggagacaaatacttataatattgatatttccatcactggtactccctagggaagctagtcctcaaaggactgctgcgtaggaggtgaaagcattgctaacattcacgacagccaccccttaaggatgttccaggctggggcagggaccgcgggagtaggtggtgggaaactgcagaaacggactccctggggacttctggacagcagagggggcagtgggatgaacagggcttgagagaacagagaaaagaaaaaggggaatgtggcccagcccttgctgtcctcgaggctaagccaggtccctgtgatactttgacagcacagtgctgctttgtggctggtgccattagagttcatagtaattcatttatttgatgattaattgattcatagttttagattcaaccacactgtggcaggcttaataatactcctcacccccacccaaagatgtccatgccctgatttccagaacatggaaatatgctgctttacatggcaaaagagactacagatgtcattaagttaaggatgaggtggggaggtcatcctggattatcctgatgtgtccaatgtaatcacaagtgtccttataagaggggggcaggaggattggagtcagtaataggagctgtgaccgtggaagtaggagatcagagtgacgggaggacggggccataatccaaggaggtggcttctccgaagctgggaaaaggaaggaaacatattctcccctagagcctccagaaggaatcggccctgccaacaccttgactgtagctcagtgagtctgattgtggacttctggcctccggaactgtaatagaataaatctgtgctgtcttaaaccatcatgcttgtagagatttgttacaaaggccataggaaaccaacacacagaccacgacctgcacgagcgcaactgactcatctactgatgtttctccaaggctctgcacaggacccgaagcagcaggatgagccttcacagctaaaagactatgagtctccattcaggcttctcccttgcagactgagagacggctgaggttcagagagggtaagccatccatccaaggttgcccagttgcaagtaggcctcagcctctgaccccaagactcagctcccagccacccctccagacccaggccctgtctttctttaaccctctcctcaaccagatcccaggcctggccgtgccagaatccagccctgctaggatcctcccctgcccacactatctgccttaggatgtgctgggcctattgcccagcacgctggcatgtccccaagctgtgttgacagcaggaagaacactcaatgccagtaagcagactcggaggaggaggcagtgcagacagctgagaggggacattgctacccactagggaggccaaggggcttcctgcacaggagatggggtctgaaatggaatgggagaagggtcagcatagaagctaaagctgggttccattattcactcattcattcagatattcattgaccccatgcactgccccaggctttgcagaccctgagggggtcctgggttgaatcagaaaagcttcctgccccaggggactcccaggtcagggtacaaggtagctgggtgtgataactgcattgagaaggtgaagtgcacctggtgagatgattcttctcttctctttcttgcctgcctgttagtgcaggaaaatgcacttgagggtagaaggagcctaagaggaatggccatgcaccctgccctttagcacgtaagagctggctggggagacaggactcctacacgagaaggaagagcccccagggtgcctgagcagggacaggctctctaggcagatgcactgaggagaaggtgccttctagtttggggaatggggagtgaccagggcagagctcaggtaaaagcctcagtctttataggaaagacgtcaacacactgagaggggtaggaagaatcaacggatgaatcagaataatgggctgctgcagtctgagcagaactgccctctgctcagccacatggatgtgctggccacttcccttcttctgctgcagcccctgcaaggagtctgcagagctgacagccctgagcaatggcctggatgctgtaaacacacatcattcatttgcctaccttaagggcagcttgtaagtctttctttgtgtgtgttttcatcaagaagtaatccttacagccacgaaaaatgtccaataacatttctctcccttggcaaacatccccggtatatcaaaggctcaaatacacaatgcagcggctcacagggacaggtgttggagactgctttatagcagcctgaagaactgtctgttggtcacatgggctcgcacaaatctcacatggttccagaaactgataacccagcagcatacagaggagattcctcccactgcgtgctcattctgcctttcttctggaaatgctcctctgagccaggcatagggccaagcactagggacacagacatgagccagtcaggctgtctgtccccaaggagcaagttttactgaatgctgtgttaagtgctttatatattgcaaaagtcccagaaggcactccaacgatccccattttacagatgaggaaacaaacagagacctagagaaatttaagtaacctgcttgatgtcccagggctagtcagtggcagaggtgctttgcttgcatggaactgtgagtgtcccaaagtcagaggctgagagttactcatctcagcacagggctcgacacaaagcacactgcaggagaatactggcaagtgtttgagcatgagcttgaaagtcagataaggcccatctcaggatccaattcctacattgcacattaaagcctccaagtcccacagaacggaaggagtatctccaaggaatgaccttcttaggactggagcttcctggccccttctacaagagcaaactcagatgactgcacacttttcatctttgagtgtccctaataaggcaaatgaagagggtactctatggacggaacagccaccctgagtcagccatgatgccagatgcttaatgcctccacccagttcacctcacaacactctgaagccaggcactttccactgcacaaagctctgctcagactgcccctggctgggcaagctcccaccctttccttcaggaggctggccccaggctaggtgtaggaaggaaggctgggaagaatcagtgtgtcactctccagggtacatgcccagcaccagagggcctggcttctgagggcatccagcctacactcagacctcctctgcaaggtgcagtggatccaggggtacccctcacttagactggagtccacttactgtaatcacaagggctcctgacagttttagagtcatgtatttattttctgtctcctgggttagagtacaaacagacttttcttcactgctatatccccagtgcctggaacagtatcagggacataatacacggtattatttaaataaatgaatagatcccttttagaagacattcagtagatccacagatcctccctctcccaagtgtacacacacacacacacacacacacacaagtgcataaatgtcccaagtccaccgattagggaatctcacacaaagtctggccatccacccagattccttctgtaataagattcctgacagccaaaacctggtttattccaagcagagatgatgctacacaggtgccatcgaaaggaaccaccaggggggaggggagggcctcccctctgtagcaggtgaagggcatctggaagctggtgcagcctggttggactccactgacgctccagtggcctgtgcggatgctctctgtgtgcatggctgtgggcctgctttggggatgtcgaactgaatctgagctctgcttccctcttgatagggagaaacccagcaggtggaaccagtgtattcctcgctccctccaccattgcctctaagcatggctaatgagtatatttgacctcacatgctcaccccagcagctccacaaacgtcactcaagatccctcctgacatccaaatgcagggggcaccgcattttaagttaaaagttatatcctcacatatttcatttctctattctcaacagcaacttgctgatcattcccaacccttcgatgctgagccaagggacccgggttgctgtctcacctgagtagaatgtgctggtttgactttcagagctagctcaggatgtggatggctgcaggtctccattgccatggtgagacacagaaggggagctcatctgtcttgcccaagggctgtgaccagggccagagtcatgcacaggatcaggggcagcagatgattgaggacttggtaaaatgggtttaaacaaaggctgatggatccaaaagggggtggttggggataaggaaacaaaatctcagaacccacctggggattcccagcctagggtgtaactttagccccggggatctggcctctggcttcatttctccgctggctccaacccaccattgcagcactatctcagcaggatgtgggatgccctctctgccttcctggagcaccatctgacccagggaggttcacggaatctactccagctcagagcagggctgtggatcaggaatccctgacccaaggcagaagcaatggaggcaacaccaccagggcatgatgcgagtggtccaggagtctccttattccaaatctttcccgctgccccctcaaaatgcctgagattccaccatcagagaaccattcttttgatgaggcctctggctctgccacaatgtgacactgggcaactctgaactgctctgaccctcatttataaggtaggacactaatacattcctctttgggctgtttgaaaagttaaatgaaggaatccatatagagttcccagcatagttcttggcatatgaaagctgtttgactggtattggttctttaccccttccctttaggttcttcaagtgtcgtggagttcagagcttttccagaaaagaagtggcagtttatgggatatgggggagggtgtaggggaaacagaggacagaaattaattcacagcacaggctgttattcaagcaaagaggcagagagggacaaaagcaggtaagaaagttcaagttaggaggagaggggtaggaagttagcaagaaaggatggagggaaacaattccacctactctgagccagatcctgtccagggtgctggaggtaaacagctggccgggaatgactaccttcccatagaactcccagcctggcagcagggctgggtggggagtgggcagatgggcaaacaggcccagtgaatgttggtggtgagggaggtgagtgggcaagaataggaccctgtgggaacaggagattcaacctcatgaatgttcagataccctccctattacccagcaaactctcctcagtccatccctccatcagggcagaacaggaccctgtgggagcaggagattcaaccccatgaatgttcagacaccctccctattacccagcaaatctctgtccatccttccatcagggcactctctcttaggtctcacctgctcaaagccctcagtggtgctctgttgcctgcagcctagattccaagcaacttccagggaccctcaggacaccccatgaccaatcccctgccaacccctcactgcacctccccatcctttactgcagcaggagcactgagctgtgctcttgccagctcctgctcctgctgctgcctctgcctgagatgcccttccctgacccaacccttccacatgctgaccctgtggaataagagcccaagaaacagaatctacagtggtgggactggaagcctcaactcagatgtcccctctccccagccttcctcttgggtcatttgttttttggtcaggacataaaaggatataaacattaaattagaaaaaaatcgcaacagcttctataaactactgaaagagtcaacagaagcgggcaggggtcccggtcggggctgacacgattcacaatgtgggaagggcaggtgtgaggtggagcacacctctaaggaggactaaggcttgctgagagctcatctgggccagccctgtctaaaatctttaagtgtgttgtttatccttgcagcaactcagcaaggtggagactttattattcccattatatggatgaggaacttgaggaagaaaaaggttaagcaattttcccaaggtcatgcaggtactggggaaggagatgagattacaacacaggaagtctgactccagagcctgtactcttggccccaccacattgagcatctcattatgtctggtgcttcaaattttgtctttgagaagcagctgggtgtaatgggacaatattctattattcaacatacaagtcgttatttcattcattcccaacttattatttagcaccgtgttccaggctctgtgaatctctggggattcggtgctgagcatgacacatcacagagggcagacaggtagacccgcaacccactccagggcgagaaagatcatgatgagctgtatagacagccgtgggagctctgagaggaggcttttcagccagacctgcagggtcagggtcaggaagggcttcccgggcagagagaggtctaagtttgacacctgaaggatacgcaagagttaatccagagaagagagggaagagtgctctaggtggagagaacagcagatgcaaaggccaggagaggacaccgtacctaagaaccctagaaactcagagtggctgggatgatgcaaggatgcttacgagccacctagccctggcacagacccttctgtctctcctgaccccgctgcatcttcatcctcctcattgtttccaggaatgagagctaacatttattgcatgtctatgatattccaggcatcatactaagctctttgcaaaattatctcactaaatcctcttaacaactccaagaagtgagtactattgccatctctattttacagaagaggaaactgacgcacagagagttaagtaacttgcccaaagccacatcacatagtcaataagaatcagagtcaggatcaaccacagccatctccaccctcccatcattgcaggtacatatacctttctggaagctcctggacttgaactccacgtttctgttgctttgtgtgcccatctgacatgctcctgtctcacctgctggtttactttgcccttctctgtctttctgaggttctccttgcccaccccatgccagatcccctgccagtgagatgcccagggtggctgtgcccagtaggacctggccccgtcacagctgcccaggttcccttcctccttgtgtctgaagcagggtggagtaggggtggttgtcagtgcagagagccagacaagcctattttgtgttttcctagcaggtttcctatggcatctttgaattaatgggacagagatgaaggaggcatttcggctaccatccaaagcgtcgtcaacctgctgagaaatagccctgccccttcctcctactgtgggtaccagtatccaagggcactacaggctcagtgcttcccaagcctcttgtccagactggctggcagagcgactgtgaatgccaatccatttgagaaacagactggtaacaagagaccctttctggctttgtgcagagttcttagcccacagagcctaaatcactacaagaaaggaaagagaagggagacagcagccattttgttgccttcactggaaaagcttgtgtgtgttttatgtgtgtgtgtgtacttttgtgagcctgtgtgtctggtggtgagtgtgactggatgtctcagactatgatgcaggggttaagagcagggaccccagagcccatctgcctgggtccaaagcccagctctgacttactagctgtgtgaccttgggcaagttctttaacctctctgagcttcagtttagagcaatgccaggcatctagccagtgctttataaagattgactattgttatttttgggggttttagtgggtttctgtgtctgtgtaagtctgggttctgtgcccgctttagagatctgagattcttgtaggcaacttggtagatagaacaagtgtcctggaaccaggggagagccttcactgtggaccctttcctggccaaggcagtgggcaccagtggccagaaccctcaactcttatctggggctgggactctggaacctggccagttacaaaataaagatataaggaacctcctgagaagtttcacagactcagactatcccacctggcatggtccttagggatcatcttagaacccaaatccctctctcataaatgggtaaactggagcctcaggaccactggctccttccttgctgttatctgaggtaggttgcaggaagggtagctgtcagtgcaaagcactggcaggaatattttgtcttttcctaacaggtttcctagtaggtcaggtctcacagtgaaacactggctgaatgaaggaaagaatcaagatcttctgactccctggagagacaaagaatgattcattcatatacatcccaagcactaacaagaaagggatgacttgttccagggccaggtacacagtaagcactcaattaagacagttgttttattttcttcgcttgtgcctttgaggaactctctgtccactcaaccattgctccagttcctccattcatccttccatccatctcatatttatgagcacctactacgtgtcagaccgtggactaggtgctaagtccctgctctctagaagattagagtctagtaggggtggtaggcagtcatcagaaagcccaacaagtatatgcaaatgctaatcattgttctcactgaagatgatgaaacgaaggaaaatggagaaggataatctgatcttgtctctctgataaagtggtattggaactcagatctgaaggatggggtggggaacttccagaaggagggcctggcatgtgcaaaggtcaggtagtgggaggatacaagcctatctgaagaactgagagaaagtaacatggtggagcatgggaggggagggaaaagttacttcagaatagaccaggcgaaccagtcttatttgtgggcccgtgagagatacccctggggtctcttgggcacacttctgttgggagagaggagaaagtgcagggacccagtattgcagaggcagtgggtgatgtgagtgctccgaagctcttctgctccccagatgcagcctctgctctggttgttttgcagtccttactcccggttgtttgcagttcaacattccagctatttgcactcacttcccacttatttgcaggccttatcctcaggagtgtgcagtcacagccccagctgttcataagcactttctcagctgtttgcagcttccaccctcagctctgtatagtcccttccagctgtgtgcagttgccatcctcgttatttgcaattttcatccccctttgggcatcaggtaaggcttgctcaagattggttctaacaacaagactcattactagtagcttataattgagtatctgacttgtgctaggggctgttttgagtacttttacctatactttctcatttgatcgtcataacaaccccttcatttgttcatcacgtatttccgtcctactctatatctggccctgggccacgcactgagtatacagtagagaccagaactagatatgttgccactctcctggagctttcagtctcatgaaggagacaggtgctcatacagcaatgacactgccaagtatgtaatcatagagccagactggcccatgagggaagcaaaggcatttgggctggacaggccatcagaggagaacccctgggacaatgagtctggagctgagagctgaggaatgggcacagtgaggttctgctgggatggggctgcaggataagaagcacccccaggtggaaggggtcccctgtgcagatgcttcagagggagggctgagaaagggcagagagggcagtatgggaggcctgtggaagtcacactgggtgccctgatcagagtggctgtaagtctgctgatttgtgccgagggcatgggtgaaggcagagaaggcaatttagagctaccatagctgtccaggtgagacaagatggaacctcaggctagtgggtgacaggacggtgaagaaaagtggaaagtggacagatgtcagaaacattcagaaggcaaacagaagtgggtgatggagagatcagtggccaaaatgactaccagttttcttggggggctactggatgaacagacgttccatcctctgagctgggagcaacagaggagaaccagggcgggaggaaggaggagcaagatcacaggagacattgagaaacagacctttgcaaaggggctgcacagtggcacagtgccacagtgcccaagccctgggctctgaagccagactctgtgctccagtcctgaccctctaccttctagtagtttgtccttgagaaagccatttaaccacaccgtgcttcagtttcctcattagcaaactgtggaagggaggagagaggttatcctgaagcttcttggactgggagtattttaaatgagttgatgaatctatcacaggcactgtacgtccccagactctagcttagtatgtggcacatggtaggaactcactcaattcatgttgaatgactgaatgaatgacggacctgtgaagagactcctggaataggttataggagacctgccagttggtggaggaaaggatatccctggcagagggagcagcaggtgcacaggcagagatgaccgcaagggcatggcaccctcaaggcgctggatctactgtggccttggtggagcacagggcacagggagggctggcaaagatgtgggtgaaggggtaggcagaacccagctcgtgaaggctttgtacatccaagacatttggaccagaccctaggagtccaagggagtcttgagggactcagaacaagggatggcagggctaggagcccaagaaggatgaattaaaggggagtgagatgaggagggcaacacttctaagaaggcagggtgtgagcagagacctgcaggatcaggggagtggggacccagctgtctacagatgggctgttacaggaagagcctgattgccagagcctcccattgccagcccagcttctcagacactcccttaggggtctacagttatgacaagggccctctgcagagggagactggaggcagggagctgcttagaaggcagtgcaacaatccaggtgggagatggctttttaaaaaaatatccgatgattattttttgagcacttagcagatgccaagaacttatttatggcctcatgctcaaggatgtgggcaatgcagcaggtctaatcacctgcctctcccctccttgccacctatcttggggcatctctctacttgggaacatttttccctgtgggaagttctagcgggcaagaagggaggaaagaactgacatcaaatccttggagactggttatgtagaaagtaatttcaaagagtctgcaggaatatttgcagatctggtctgtaatctgcaagacttcctcttcttggggacagacctggttctcacagaacgtctgctgtcttagtctatctctccctgtagcagaaggatgtctcggtggtcaaggctaaagtgagaacttgtgaagctgcaggtcacaggcatgctttctccccagcccatcacccatcctactacctctgaggtcagggacatcagaggacaggatctctgtaaaggagagaaagacgttttgaggaagcttgtttctgtgcatgtattgggcagcctgcctccctgaagctgttagccgagagtgaacattaacatctcagggcagacgaaagacttgcaccataaccaggggtgttatgaaaaatggacataggccgggtgcagtggctcatgcctggaatcccagcaccaagggaggccaaggcaggtggatcacctaaggtcaggagttaaagaccagcctgaccaacatggtgaaaccctgtctctactaaaaatacaaaaaattagctaggcgtggtggcgcatgcctgtagtcccagctactcgggaggctgaggcaggagaatggcgtgaaccctggaggcggagcttgcagggagccgagatcgcgccactgcactccagcctgggtgacagagcgagactctgtctccccccaccaaaaaaaaaaaaggacaaaatggacatagcttgggccttcccttactcctgagtcagaatctcatggaggaagccagggaatctgcattttgacaagctcctcagtgatcctgatttagactaaggcagtgcttcttcaacagtgtagagatcacttgtggatcttgaaagtgcaacaggttctatttcactcggtgtggggtgggggctgagttctgcatttctaacaagctctcagggggtgcccatgcagctgcttctcagatcacactcaaagcagcaagacactcaagtgtgaagctctggtttccaaacttgctttttaagaaaacaaatccctcccaaaagaaatcttggtctgggtgcagtggctcacgcctgcgctttgggaggtggaggaagaaggattgcaggagttccagaccagcctgggcaacatagcgagactctgtctttacaaaaagtaaaaacattacccagatacggtggcatgcatctttagtcccaactactcgggaggttgaggtgagaggatcccttgggtccagaagttgaaggctgcagtgagctgagatttttccactgcattcaagcttgggtgacagagtgagaccctgtcaaaagaaaaaggaaaggaaagggaaagggagaagggagggagggaaggagggaaggaggaaggaaggaaggaaggaaggaaggcaggcaggcaggcaggcaggcaggaaggaaggaaggaaatctcacacagaaccccagaaccccagtgtataaaagaggtgatgttaatataaaagtattgcacaaatgggtaatgattgcttattataaaacctctcaaagaaaacaaggcagctttgatgaaggcagacgtgtggcgttaacggttcccattgctatcgtacatggacctcagaatccatcatattcaagccaagtgtgtgcagtaacgcaatgccacagcttcaaggcttcaccagcaggtcgatggaggggaagctgtcctggagggatggagccctgggctgtctccctttcactatggagactcaaaactcaggacttagccttccttccccatccaccccacccctccctgggaagtagtcacagctaaatttagctgggagctaggctttctaggggaggcgagagtgagagggaaactgtgaggaacaatgccaggcacactaattagtggtttggcagctggggaggacaggagggactgcggtgggccaggccctgaggctgcccaggctcctctggaggaaggcaggacgtagccacgtctgcagggcttggcagagaggtggaagtggtccatctgttgggaaggcatggggctggcttggagggtgcttgtaggaaagatcaagccagtggagtcgaaacgtacccgagtgtgaatcctggtgctgccacttgctcactgtgtgtctctaggtaagttgtttaacctctcttggctttggataaaaaagggacactcaatactttaaggaggttaagtaggataatgtatgtgaaagtccctgctccccagtagatcttgtgcctttgttttccctggctggaggtcaaggtccttggtgcactgccaagcttagtcctgctggtacaaacctgtgctccctttcaagcctccagtctatagagcggaggcctggaatctctttgatcgccccacccttagaggaatgcatggggcctcagtccactcgcaggctgccagggcacagcgactcatgttctggtggaaggagcagtcactctctgctctgagctgtttcccttgtccaacccctgagcatcagttagcaccctggatggagatgctccattaataagtctgactgccccaacccagggagctccttgagggcagaggtggcacctcattcaccttggcaccaccccagtccagcccaatgcctgccgcagagctggcagcagccaggattactagaatgacagcagccagttcctttcctctttacatatttatgcccaataatcccttcaccttgaagctttccactcagctccggcttctggggatacaaggctcaggcccttgcagcaacaccctcctacctctactctctcaatccatgtctttctgtacctctccagcgctgctgaaagcttgccttctgcaggaaatcctccctccttgggtaggcaggggaagggaagggaagctaacacgtaacatccttggcatagcaaggagtcctcacattgcccctagaagggatgtatccttgccatgcccattttacagctgaagaaactgaggctcagagaagcatgaaatcttgtgacagagcgagtaggtagagccaggcatccagcctgggcctgcttgttctcagtgccctccccagagctggctgccttcatgcttccctgccaggccatgactcagactgttccctaatcccagttcctctcagaacttctggcctctgtctgtgctgtatttgctaatagcttaaagtccttccaagtctgctctcctggcttcaaccccaagctgccacagtctctcagacagggctcctgactagcttctcttctccaaatgggacacctggagcgtaactcagggcactgggcatgaaggtaaacagacctctgtcagcatggactccagggctcctttcctcctctgttctgggaccaaggcacggacatgcagcccctgattgcaatgtggcacagtaggtgcaagcatctggaggaggtgagaaaggcagcatccttctcgtgtgtgtgtgtaaggcttgcaggaggggctgcagggtctgctggctccaggttgcaggtagaagatactagccatggccgatggcacagcagggatgggggcttagccaggcattggaacccctctgcccagaggggctaagttcatcaagtagccaatgaatgcacagacctttatcccccagtagaagacagccttgaatggtagactctggagacacacaggcctgcattcaagtccttgttcttccactacctaattccataaccttggacaattcccttatctataaaacaagtaatgataccccctatgctataggtatgttaaaggatattaggatcaactaacatttaccaatcacatggtattacactattctatgtgctatacacataccagataatttaatccgcataataccccagaaggtaaatttattactatcaacatttagcagaggaatatagagttgagttgacttgcccaaggtcaccctgctcgcaagtgctactgctaaagttttaacccagggagttgggcatcagaactcaatgtcctaaccagtatattaaacatttagtagcacgccaggcaaaagtctgacacagagcaagtatttgtttagatacctcccaggagcatctcttccatctctgctgtcaattataattcctctgtggataaattgcaaggcttgacctcccacccagatctccttcatgagcttcagaccttcaagtgaaattaagtcctagacatttctaccaggagcacctcacccttgccgtgcctccaaacagactcttcatcactttacccatgcactcacctattccagacctgctcttcctcctgtgtcccctaaaatcagtagcaccaccatgcccctgtgttcaagttagaaacctggatcatccaacattctttctcccagcccccacatctccactgctttaattcacacctgcatcatatctcacccgacctattgcaacagtctcctaggataaactctccttgtctcccattcctcactcccccaaatccagtagctttagccattcatggagctctcctgtctgcagagcaaacacttcatgtaccaagtgcatttaagacttttcttgagctggctcctgctgaagccgtaactcaggtccattcatttgttcatctctgtctccccagagtctagcgcagtgccaagcacacttactgggcttaatacataccttttaattaaagaaatgaatgaaggagtgaaatctgcgaaagtcactccctgctgtcagatgcagctttgtgagcagtggctggagtagccaggacatggaggagacccgagtgacatgtgatggcacatgagctctgcagagggcccttgtcacaactgtagacccctaagggagtgtctgagaagctgggctgggaatgggaggctctggcaatcagtctgtccccttaacagcccatctgcagagagccaggccctcacatcccccaccctgcaggtctctgctcaaacgctgtcttcttagaaatgttgccctctctgtttcattctggaatgtcctgccactctctgtttcctaaccctattttagttatctttctagggccaggtctactattattattttgggttaagttgttgtctcctgtggctaagccacggtctccatgagagcagggacttgttccactttattcaggactgatgcccagcaattaaaacaacacctgacatgtcacagaaactcaacaaatacttgttgatggaaaaaaaaaatactaagacaaggaggggatgctgatagggaatcaatcatgttgtatcggcatcttattcaaaatacgatctgctaatagccttttcaaccaatgatgctagaacaactgaatattcacacagggaaaaaatgaacctcaactctcacttcaccccatacacaaatattaacacaaaaggaatcatacaactgagtgtatatacaagctagaactataacacttccagaagaaaacaagagaaaaccttcatggctttgggacaggtaaaaatctctctctctctccatatatatatatatatatatatatatatatatatatatatatatatatatatatatggatgcataaacaaattatagtatattaatatatatgaattatatagaaataaaacacacatatatatgtaatcttataactcactaataagacaaataattcaatttaaaaatgggcagaaacttgaatagatgatttccaaatggtcaataaacaggtgaaaaaatgtttatcctcattagccatcagggaaatgaaaattaaaaccacaatgagataccaccacatacccattagaatggttacaatgtaaaagaataaagataccaagtttcagcaagggcatgtccaccatacatggctgatgggaatgcaaaatggtataactactttggaaaacagttgagcagtattttatgtaaacatacacttaccacacaacctagtaatttcattcctaagaatttacccagaggaaatgaaacatataatcacacaaagacttatatttcaatgttcattcacagcaggtttacttataatgaccccaaaccaatgacccaaactttcaccaaaaggatatttggatggataaagaaattatggtatattaataaaactgaatagttttcagcagtaaaaaaaatgaatgaactcctgatacacatgacaacacatgaactaatctcatcactgttatactgaaaaaagtcagacacaagagtatatattgtatgattacactgtacgattttgctatgtgaaactctaggaaagacaaatctaatctgacgtgacagaaagcagatcagttacctgcggtcagggatgggaggagaatgactaagaaccggcacaaagaaacttttgggggcgatggagatgtttatgtcttgattgtggtggtagctagatggatgcatgaacttgtgaaaacgcaccaaactgtacactccaaaatggtgtattttattgtatattaattacatatcaataagagtgatttaaaaaagactttgggaggctgaggctggcagatcacctgaggtccggcattcgagaccagcctggccaacatggcgaaaccccatctctactacaaatacaaaaaattagcctggcatggtggcctgcgcctgtaatctcaactactcaggaggctgaggcaggagaatcacctgaacctgggaggcggatgttgcagtgagctgagatcgtgccactgcactccagcctggacgacaagagtgaaattccatttcaaaaaaaaatttagactaggtatcaaaaaaagtgataggatgtagtagtaatgtaagatatgtagtagtcagaagtccaaagatctattcatgggctgtgagctcactcctggaaatggagttagaaccaattaaacagttatttaattggaattaatgaggattcaccccatttaaggtgatgagagtgttgcacgaaacacattactctcccctcaccccacactttctgcacgtggaaagcccggttctgataggcctatctcctcacactctttgctgctctggggctgtctcttccacaccctggggagaggctatgaagaggagaatcagtcaccccaaactcaagggacttgggaaaaacaatgggctcttctatcagacctatcttgatccaaacttcagctctgccaagtcacttgatctcttcgtaccttacattcttaaatctaaaaatctaagacatttaaacagtgccagccttaggttgaggccaggggtgagcctactgagctcacccagttacctcctaccctttcctgtctcctccagattagggttgccagataaaatatacaatcccagctaaatctgattttggataaaaatgaataatgttttagtgtaagtaaatattgcatgggtcatacttataatagaatatcgtatgggacatatttatggtaaaatagtgtttgttatttatgtgaaaatcaaacttaactgggtgttttgggtttttttttttttcctcttttttagagacagggcctctgtctgttgcccagactggagtacagaggcataatcttagatcactgcagcctagaactcctgggcttaagcgatcctcccaagtagctaggactacaggcactccccaccatgtctggttgatatttttcattttttgtagagacagggtcttgctatgttttcccagctggcatggaactcctggcctcaagcaatcctcctgcctcagcctcccaaagtgctgggattacaggcatcagccacctcccatggctgtgtcctgtacttccaattggaacatctggcaacctgattccaggtggctcctgatacacagtccttgaatctttagggttccagagaacactgaaaccttttagtttaccgctgtacatcctacatgaacttgaaagtgtgggctagaaaatcttggaaattcttccatcgaaattgagaagagaaatggaacaggtggagtagaacccagcaacagccatagtcataggtttccctgcctcagccagctttgcaacaggatcaaagtcagcttactccaggagtgcatgcaattaaaaaatccccctgaaagggagccaaaggaagacacggtcttgctgttctgcagaggaatactggatctggtgaaacaccacggggagtcagaaaacagctctaggcagagggaccttgggcaagtcatttaagctatctgtctctgactcaataaaataggcctcaaaacaaacttaaaatacaaattacagagtaggaaaagacagccataacatatataatggacaacacagtgataccaagaatatattaagtggtccaagtcaataaaaaaaaagcaaatacccaacagaaaaaaaatgggcaggagatatgaacaggtaatccacttgaaaaaaaaatcacaaacacaaatggaggataagtatatgaaaagaggcaccgtgttgctaatcaggaaaatgcaaatcaaaacaatgagatagcattatttgacaatcagattggcagaaatgaaaaagcctgataaaatctaatgttgggagagggtaggggaatcaacccaggtggttagtgggagtgtaaacaagctttggagaagacagtctcacaataacaaaattacagcccacatagtctttgatgcaaaaattccactcctcactttccatctgacagacattcgtatataagctcataaaagtgcattgatgatggtactcatgacagtacggctcactgaagcctcgacctcccacctcagcctcctgggtagctgggactataggcgtgcgccaccatgttcaccaggctcaccatgcccttctacttctttgtatttttagtagagatgaggttttgccatgttgcccaggctgttcttgaactcctgggctcaagcaatgcacccacttcagcacctcagcctcccaaagtgttgggattacaggcgtgagtcactgcacccagccctagcatggcttttttaacagagatcactggaagcaacttcaatgtccatcaataaaatgttagataactcggccgggtgtggtggctcacgcctgtaatcccagcactttgggaggctgaggtgggcagatcacgaggtcaggagatcgagaccatcctggctagcatggtgaaaccctgtctctactaaaaataaaaataaaaaaaaaaattagccgggcgtggtggtgggcgcctgtggttctggctgctcaggaggctgaggcaggagaatggtgtgaacccgggaggcagagcttgcagtgagccgtgatcgtgccactgcactccagcctgggcgacagagtgagactccatctcaaaaaaaaaaaaaaaaaagttagataactcatggcacagagatccatagatccaccaggaagaatgaatatgaatagagaaagagctctaaagacatatgacatgaaaaaaagcaagtttcagaatagtacatcttgtattgtcccacttatgtaaaaaagtatgactgtgtctgcatatgtatatgtgtattgtgtgcacatgtatgtgtctctatatatgtatatgtctgtgtctatgtatatatctctatctagatacatttacagtgctgtgaatgtatagaaaagaacctggaaggttacgcatcaatccatgaaccctataaacctctgagaggggaaggcaggagagggctggtgaagggggaccctcagtttgtagtttgcattgtctgaaaattttatagcaaaatatactattaacatttatttttattatttaaaaacttggtttacagaaccacaacaggtcacactggctccctccctcaccttgcttctgtccatctcattccactaatgccactgatttccacttgccttttctctcaagaagggcttctctctttgggagtcctcggacttgtgttctcgaccccatctcagccgcctctgcccactctgtgtctcctgggcccttctctatcagcaagtccacacttctacaccctcagccagcctctccctctctctctcgtcacttcttttttcctttgctacttctacctccagccaccatcttgctttgctctcatgaccaataatattgaaagagaaatgcattcctttgcctatgtctctcataattcataactctatactatctagtttctatctattcctatcacattaaggaaacacttccttggaagtccccctcctggctgccccacccagttgctttctctcaaaactcactctcctagacccccttggaaatatttaccaccactcttttgcttgtttgcagtggcctcccctgcccgcaccttatctccatatccattcttctttgtacggctcaaaggctaccccttccaataaatctagccctttctttctagtaagtccaatgtgtctagcttataaccacctctaaatgtgaatgggttaaatgaaaaaggtcacgttctgttaagaaggcttttgcccatgggtggagacaattgtttgactccaggatgtgtgaattagtgaagggagacactggagggcaatataacagtgaggatacccttaaaggaatctaggggagagataaaaagataattgaggcagagccagtagggagatctgaaaagggtggttaaatttgagggatttttcagaggtagaataaataggacataataatccattggatccagcggggtatgctttgggttatgggagtggggtaggtgagcgagaggaagaagggagaatgagtgacaggcaggcaaatttcattgagctgggaaggcctgtcttccccctgatgagtcccctcttcctccagagctagctgagtgaccactgcctcccactaggccagctctcccaatcccacgctcacagcaccatggatggccgttttcacagttgtcttttacatatgtttaggggctccttgattaatgtctgtctcctactctctcctttaagatccatgaaaggaaggattgtacttatttttgtttttcattatatttccagagcccaactcagtacccagcacatggtagatattccataaatattcatcttaaaaaaaaggaatttagttagttcttagttaaaatgcccttcaccctagaaccacttccctaaacccacttctacttctcaaacactgatgggcccaggaatctaatctcattggcctcattcatagatcagttggtttacgtagctaagcagtatttccaccgggcacggtggctcatgtctgtaatcccagcactttgggaggccgagttgggtggatcacgaggtcaggagatcgataccagcctggccaacacagtgaaaccccatctctactaaaaatacaaaaattagctgggtgtggtggtgcatgtctgtaatctcagctactcaggagactgaggcagaagaatcgcttgaaccaggaagtcagatgttgcagtgagccaagatcgccccaccgcactccagcctggcgacagagcaagactccgtctcaaaaaaaagaaaagaaaaaaaaaaaaaagaagtgttttccatgagctctcatcagtcctgaacccaatgggttctttgcaaatgtttccagtgatgaagagaaagagaagaaaggttctccaagagtgtaaattatccacaagtggatccagcaagactccaacgaagtccacacttggacgactctgctgtcttcgcttctcacaaaatgacaagtcccagttgtatatgcacgtggggtctttggctttaccaaagttggactcacccaagttaagccctcagctgcaggactacgacactgtcaccatcagaggctgccaagtagatgattcaacagggcctagtggcttcagggctaagctctgggacatcggaccttgtctttttggactccacttgttaccagcccagcaatctaggatcaaaagccagtctggcctcctgcttctgggatatggtctctgcaaccggcctctgggtcaagacccagggcttgtgcaaaacttcgattcctccaaaggtctgagatcctgctcagctctcaggagacagaaaaacatggcagctatctcaccagtccccacttctgaaccaccccctcatgagtttgttcaaattcagcttccagctacagcagagctatgagagtttaccatatctctgctctcttttcacccaggaaagaaatggacttatcgcgaataggaaaagcaacacttttaaaattccaaagtccagttgtgttcatattcagtaaccgggagcagtggttcatctagatttttctgttgatatgcacctgatggatattattcccaggtgtgactccaactatctttactgatgtgcacaccctggtgctgatgcacccctcgctgaggtcactttgtgggaaatacaattgacaaggtagggacaagcagccaactaaaagaaaatttgcacaatagacacaacaaacaaagaacaaatgtcctaatattattcagacctcctgcaaattactgaaaaaaggaaaagaaattcaaatgacctatgaaaatgggcaaaggatatggacagaaaattcacagcaaaggaaatataaatggccaataaacatgaaaagatgcgcaacctcactggtaatcagagcaatatgcaatcaccatgccctctggctggatctgccacactttccttctgccccaatcctggacacacagtgtccaccaaaataaaactcggagagggatgaaaaagtgtcagaggatgatgacaagccatactcggtcaagctttgaatccctccgccctggcttttccacgaaaacctctttgcctaccagccttggcacaggtgtgtggattctgcatatatcagctgtcagggcacaacacgcagggaacaaacagaatgtcttggcagcaagtcctactcatcctgaagctactgagagctgggcagacaagaggactgagccaagccctgaggaaggagacccaggagcttgcatggactggaaggaaagggttgctcactcaaggggccacccctctaggcaggcagctggggcatccaaaggacaccaccatctctggacttgtgtgcctctcctggaagatcaaattagataaatcatggaatcagttctatgaatcaacttatagaaaactggaaccgattctacgaagcagaaaagaaaaaggaaggaagggaggaaaggaaggagaaaagggcgggaggaagaggaaggggagggagggagaggggaaagcagagagaaaggcaggaaggtaagcagaaaggagaaaaaagggaccggaagaagaaagacaataatagataatatttattgcatctggcacagttctttgcacatattatctcatttaacctgcagaataatcctttgagagaattattctgcacatgcagaaactgaagttcaagtcactttctcaaggtcatacaatgggtaaggaccatgtcagttcatcacatactgggttttgtgttctcaaccctcaggccacactgaatcactctgacacccagcctctctgcagggctcagacctaggcaccaaaggggctatgaagaaacgagagtcggtttccctgctcatcgatgccttggaagctgcctgggcaggctgggcccaacaggaaggacttggagagctgcagaggctgggatcatgtggcagatttggccccagtggaatggctcagtgagagaagccaggtcatgactcggtgtccaaatatgattctcagtccaggtatgtctcctgcgggtccctgcgggtgcctgcgtgtccttagtaacggcattattattctcctctttctgcatctggtctgattaatctaatttgcacatgtgaatgagaagctgctctgatccatttaatatgttgggaccgcatcccagctcatttgcatggtgggcctggccaacagaggtagctcctgttccctgtcttcctcccctctctcagtcccaccctcccaccaggcaaattcttgctgagcaggcaaacggtgacccatgctgttgcttttaggtcttaaaacccattaggagtatattaacaaacgtgctgagagctcatttgagtaataaaaatcttttttttgtgtgcagctaataaaacagaagaaagaaaagagagaaagagagagttggaggggagaaagaaggaggccatcttcccaccacagttagctaggatgaaatgcgaggatctgtctgcatatttactggaactgggctcctttgcttcagtaatgtgactagtgatgggagaaaaatgtagtggcaatctaaggaatgccttcttttctcgaagcctctgtcatcagggtgcagtccagcaagataggatgggcatctcctctgcccctgaggtgcagaccaaggaccctgttatgattttgaatatttgttgcctttacaattcatgttgaaatttaatccccaatgtggcagtattgagaggtgtggccttcaaaaggcgattaggtcatgaggctctgtcctcatgaatggattaatccattcacggattaatgggctaatgggttaatggattaataggcaagcatgggaaaggaactggtggctttataagaaaattaagagagacctcagctagcacattagaatgctcaggtctcttgctctgtgctggatggtgccctgcatctcctctggactctgcagagtccccaccagcaaaaaagccctcatcagatgtggcccctagtccttggatttctcagcctccataactcagcctccattcctttttaaataaatttcccagtttcaggtactctgttataaacaacagaaaacagactaagatctccagctcacgtacatgcaaaatgaccagtctgtagtaggaccagttgtggctataggcccagaggacagtcaccttgtccaggtgtccttctgtctgcccagcttcgttaactttgctgcttttctcacgcaacgctgctcagactgcagcctgcagatctgtagactcctagcctggcagccctcagatccagttctctgcttctccctgtggcagcctcagctggcacaggtgaaagagcctggtgttgtgtctggtacatggaggaccagctacgtaatcagcatctagtacacaatgaaaaggcagggcccctggttaaaatatgattattaatttcaagaggtcaacagaagagcattaaaccaagctcagggttcttccctgagcagggccctgtatgactgcataggtcagatatctatgaagctggctctggctacctgttagatacttaattatttgtagttgatgtgtggatgcccccagagagttgatcctcaacttaggaagtctaaatatctgggttgcataaacagcccaggctcccggattctgtccttaataaggacattgaagaagaggctttggaaggtcctccccaggtatggccagcctctctgatgcctccttctggtttgagtggccccagatgttccactttcccctaacagcccattaaggccccataagccaagacttatctaagtccttttgtgtgaatccaggagaaaagctgcatagaaatcctcttacagttaatccctttgagaataggggctaaatctacaagactgcaatgccagaggaggaggcaataaaattggagaggacgggcagtgggaagggtcttccctgagatgaacaaagaggcagggctgtggcaggctggacagctttgaaacggatgtctcaaggttgagcttgcatccaggtgtatggtaactagatactttttaaaaatttttttttattttgctatttttttgagatagggtctcattctgtcatccaggctgaagtgcagtagcgagatcatagctcacttactgcagcctttaactcctgggctcaagggatcctcttgcctcagcctcctgagtagttgggaccgcatgcatgcaccacctcacccagctaatttttttttttggtagacagggtctcattatattgcccagtctggtctcaaactcctgggcccaagtgatcctcttgccacagtcattcaaagtgctaggattacagatacataagctgccatgcctaaccagaaactagattcttggccctgggcaaatccttgaacctctctaaggcttttccccagttctttaaaatatgatgaggataactggacatacactccaagatattcatcatagccttgtttatactcaaaaaaaagaagaagaaaaggaaatagcattaatgtccttcaagagagaattttagtaaatgttactatatttgcatagtggaattctgtataactattaaacaacactgaaaagggagatttctttttaaagatgtccagtgaaggtatttacattttttaatctctcttgaaatccactgacaacaagaacaaaaatacagaggagtagaaactgtatctttagggaaacaaggaaatgggtcttgaccacaaaccattaggcatatttgccaaatactgagaaacgtgaatctaaacaagaagtgttgacagtctacacagtaatcctcagaccttcagcgaaattttcttaaaacaaagtatctcagtcctcaaaaggacttcaataaactttttgatgaaagtgacaagatgtgggaatgtggaccagccatgggagtgtcccgcggaaacctcttcagcatttcaagcaggaaggaatgtgaggagactgaaggagagaccatgtgccttttcacccgaatgatggacggccctgtctctgtcctagagaggctgcagagtaaggcagtggacaaatgagacatccatccccaaaccaccacacgcagcagctttggcacagagcaaagagaaatgccggatctggtgagaggacaaatggaccacaaaaccataccggcaatgcagaaccgctcggttcataatcccctttcccaggccccagagttctgcacactattctttggcaaatatttggtccaactcaaaaaaagggagagataattagtagggaactagccagagaagtgtcatagaaattacaaaataaacaaacaaaataagaaaggaagaaatgaataaagtaaaaggctatggaacacatagacctcagagggaattgtcaaaggaagcaagatgaattcagaaaaccactgttgtctaatctcaaagaaattgcagagtttttaaaaaggaattcaaagaaaagtttcaaggacctaaaagaaaaattgtaagataagcgaaaaccatgaaagatgagctgggaaagaaaaagaagtaccacactgaaaacagctaaaacaggaagagaagagagaggaggtagaaggggaggtggaggaggaaagggagtagaaagaggaggaggaaggaggggagaaggagaaaggggaaggaggaagaaggggaggaggaaaaagaggagggagaggaggaggaggaagaggagggagagaaaagaggaggaaaaggagaaggaggaatgaattaaacatatctgaaaactcaactcatgaacttggcaagcaaacttgggaaaattaaataaatacatggaaaagatcaaatatataaacatgattatatggaagatcacagatagggaatattgacaaaagaaattcaacatatccatagagaaaaacatacaaagatataatcgacaaaaacatccctgaaatagtgaaagttgaatttcaagatcaaaagagcacatgaggtctccaaaaattttatatatagcaatcaccttaaagatgtattctggtgaagatactacatttcaagggaaaagaatgaatcatatggacatctaggcagaaacaccaagctaaacaagagagaaataagtctggttggcctccaatcaagccattcgagctccgaggagaactgcagcttaagaggtgtatactcattgaagttgtcatttacatatttagacaacaggtggacattcacgagcatgaattcagggaatacaacacccatgaacctttcttgtaagaagtatctgacagtggactctggcaaatgaagaaatcaatcaaaatacaacacttggaatgtaaaatgtatggcaagaaaattggtggtgagtgttaaatcctattaaatatggaactaagattacacaaccctgaggattgtacagaatggaatataaatgttatagatcttgccaaattaaaaagaatttaaaccaggaaagggagtttatggaaataagaacaaatatacatgcgctaacctcctcctcttcaatgcaggggtggttaataaatgctgcaaaaataataataataaaaaggataataatgactgcaacttcttaacatgctgtttgaacttggtcttagcttcagaggtatatttgaggagctaatgtctaatgatctgaagtttaatgattccttcaacctttgtttttttttccatctgtcgaatttaagtaaaattttgaaaagtaaaaataaaatggtgggtatgtagcaagctcactttgttttcttgaaaaatctgtctttccagcattagcattagtttgttatccctctagatagctagatgtcaagggtgatgccctgaaaaccttaacaatgctctacttctggaatgttgaattgtgagtagtgattataaaatatctcatatttatattcttactgtattgcttgaatgcttaaaatagacatgggtcattttaaaaaattaaatcataattcctgtttacaagctgactaggtggcttctaccaggaggccttgtcttgtgacaatggcagggcctagttctgaagttctgggttcaacactcccccagactattactctcctggtgcctcagtttctcacctgtaaaatgggcacataatagttaataacagctacctctgaggatagttgtggggtatatgcaaaaaaattattatgaggggttggggcgacttaagtgcttaatcaatgttaatattcagggtggccacaaagtctcgttgcatgctaattagaagtgatttgtatgctgcctcctattaaccacataaattttaaattttcccatgttctttggggagccattgctgattgttttcaggcagagttgttgtgaaacaaataattaacaaaaggcctaagcccacacatggggatttagtggccactctgaattgttgtataagcattgccacataaatatactcttgctacatctgttaatggaaaagataaattaaaaaaaaaatttaaagtggtttgcaaacagtatttgtaattaaatggcaatgggtaatgggcccaagttttgtaaaatgagccctggatctgcagtgggccaggagaggaagccgaaagcaggtgcagctgcagggagtggtcaaagtgggtcaggctccctcattggatagcaacctatttgcataaacagtacctctggggctttgccctgaaccagtagagaaggccaggcaaggtctaagcgagctccaagggtactctcctgcctcttcacaccaactccctccttccttctccaactcccattcccctccctccctcccatccatgcccaagtcccaggtacttaggagctggaggagtattatcccaaaagcagtgctgaaatctgtttgaattacatctcctccttccccttgaggtctttacagtggaattggattaatctctgagaacaagtgctcttgtttcttagtggaaaaacagagaagcttttgatttccatgagataagatccctctgtggtaacatagttttgcgcctttctgtcattgctttttacaaggtgactaataaataatccccattacacaagcacagcctgcatccatcatgcccagactgcaggcgctgagggatgatccctaatgggtaataataatagctaccatttattgattggacgctgggtgccaggcaatgggctaagcattcccatgcattatcttcacaggaggatgcagtctctctctggcttcttccttctttgctggcatggattaggttgctctaagcctctctggctgttttgcttcttctcatatccccttggtggggacatgtccagaggccaacaccctggagggactctactgcaccatccaggcaccacaccctgcctcttcctctccttgtcctctgtcattccaatggtctagtctagactggcctttcctcaaacagaagtggtaaaagtcaagtctcagattgagctttagatggaagaagtcttggtccgaggcctttcaggctgatccaagagtggacagctgttgcttttatttgtccagcatttctcttcccattggagaactgccctgcccccatcccatgtggctctgtgcagactctcaatcaaatcacaatgcctacctgccctctagccccaggagaccagccaatatgacaccccatcccttagtccgctgggatttctcttgaggtgtggcacacaacctgagtacagccaaaaacacttcttccatgactttagatctgcagatgtctggggaaatataatctctctctttctctaggatcatgtgaatccaaagctcccagaagccatcttgttgccacataaaagagaaaaaacaggactgagagatgaatgaggtcccagtgacactggatccagctgttcctgaggccacacccgccaccctttggatttccctggaacttaagccaatagattccctttcgtgttaaaatttatttgagtaggccttctctcatacagaaaaatcatggaagtaggctaaagacattctcattggcatctagccagcttgctagagcatttggagccacagctttacctagtaatcaaggtttttttttgtttgtttgtttttgttttttgccagcgccattctttgtacatatactatattttcttgattcaagcacgccatcaataataacatgtgtcgtcaatttaattagggctttttgggaaaaagagagaaagaaaaacacagcataaactgcatttgttgatagtaagatttgttttgatttccaaaaggttaaactattggttagggtgtaggaggggagggagtacatcttgcaattgagaatatatgaaatctccctagggggctttttagaacgagatggcctgaggtagggtccaagtattcctatggcctggtcaaatagcatcttaattccacctaatctattatttccaactctctcctacatgtaggagcttgatgttgttctgagagtgttccccatctggctctggacttgccaatcctcactcgctctccttcttcctcagcaattacctcttctcaatcctttctgggctgggctgagccctgacctgggggtcattcgacaattacccctgaagacaatgggcatggatggctcagcagctgtagaatcccccaccactttccatcagtggctcttcatgctgacatgggaaacccatgaacagagttcccatttaaagaaagtgacctctcaataagaaagctaattagatacgagagagagaaatcttcccagagtaataggaagagctcccaaacccaagcacattcagctagggagaccctctctgccttggccaagaggcagagggagagtgaaagacctacttcctgggcaatgacgggtcatgtgctcatttctggcttaggcattttatgggtgcatctgtgatagtgaaaatacagacagtgcttaggctatgggagaggattaggtggggagagaaaagagaacttttaaatgctcctaatatctcacttgccaggaatcctccacttcccctttgtagaaccaatctgtgatttatttatgattaggtgtaacccatatggctactgcaggctctaccacgcccaggccttgaatgtggtcctgactagggcaaggacatcattagaaggtggagtccaaattagccatgtggccacaggcccaatattatgagtcaagaggagcccatcaagcttgaaccttccttgcactcaccggtttggtatagtgtctatgactgagtttctgcctcagtttccttgactcatgctataggtctcctagcactggaaccttgtcagattctggtcaccaaggtttgggacactgctgagctcaagagtctttcttccatggatggctcctactcctctgatacctcagatttgtattctagcagagcctatgcagcctgcttcccaggtataagcatcaatcatgcacactgttatgatgctatcctctctgccatccagcaatatgctctgtgatgcctgaggtcagaaatgacacaaatagcacatgtgccactattttgctcatccacccccatgcagacatcactaattgatctctgccctcttctcagtgaatctagatgtggtctgaacacatggtttttgtcaaccacaaccaattgactgatattggcaatacaagacaaagtccatttgccctcactaccatatccttctatcagtatatacttggccctcttagaactccagcccatcttggttcatcactcactccatcctgaatcccagccaaatacaaagccaaggtgcctcagtctagagaacctttgagacagtcctcccagacctcatcagggtcccttagtccttaactcagagattaatatcttgcctagaggatggggatgctgtacgttgcacctggagaattctgtgtccccaagaccccacctacacctgcttctattattccaggagcttcaacctagagccgccaatagatcaactgctcctattccaccccatcccaccccagatctcattacctgaccctctcaccaccgttcacctccacactgtttccagaggaacttctctagagtataaataacagataaagataggtgagtagcctgggtttccagagcctcagaaagaaattattctagggcttatcaaacacttcattgttttgcaattgctggttgacaggtttgtctgtcttacttgtgagctcctacaagtcaccaaaagacttggtcctgtttatcttcattttttttccatctaataactagcacaatgcaaggtgggatgaataagcaaatgagccacagttcattcttgggtactaggctcaggaagttcatgctctctgccttctcatcccctataagccaccagccatgtccagtgtggagtcgtaactaccccaaggttccccaggtccaagacagtaaaggcccccaaggagtatgcaagtgctggtgaggaaggtgagtgtcccccagggattccactgccagactctctcaggcatggaaactgtgacacgctcccatctagccataaaaaatgttctctcccggggcagaatgctagctcactgcctctggagattctgcatctagtctggaaagaggcatgccctgtgaatgaccagagcatcctggtgcccacttctggtggaacctaaaaaaggacctttatttaagtcgaagtccagaattgcatccaagatgataagcagaggactggcccgcctcgacctgaagctccctctctgtctccaggactcagacacccctgagcatcacgcctgacctcagcctcatggaagtgacctcagcctcatggaagtgcccactctggggaaagcatacaaggagcacttactcggtcctctgtggatgggaagcaggccagaccctggccatggaacaacaagcttctgagaaacaggagttctgctaagagtcctacagctgttgggatatgggcaatccctcaagattggcctcctctgacccctgttgttgaaccaccttttacccatccaattttaaactaattggtttaaaattgttaatattcagtgttggggagggagtgaagaaatgggtatgcattactgataagaacataaatctccctggaaagcaatttgaagccacataccaaaactctttgaaatggccatgcccttatagatttattctaaggaaataatcagatgcatcccaatgatttatgtataggaatgtttcacgacagcattatctgtcaaaggggaagagtagaaacaatctaaatttaaacacaggggattggctgaataattatagcaatataaatagcataaatatatatatttcgaattttatgcactaatatgcacatatatgcctggaagaataaattacatattaattgtggttatatctagggggtgtgataatagttgattttaattttcttctttgtgctcttgtgaatgtctcccattttcttccatgaacatgtaacacaatctgtaaaagcaagacatgtggtcttgaaaaaagatgagcatatccaaggctggctgtcaaaatgcagtttgagtataaattgtttgactatttgaaaaagcctggagatctcacttaaaccaacaaataattatgctttatggagtgcgcaaaaccaaatcagaattctgaaatttgctgtcaattctctgcactcatctgtcactggctccaactccaagtgggcacaggtgaaaaataaaaccacagacgtgctccatactttacgtttaccacccatctccccacaggttccttcatttcaccttccaaagtaccctgtgaagaaggcagagcaggtgtcaggattcagcctattttaatgcaggaagaaatgaaggtcctgaaaggttaaatgtctcattcatcttgtccccctagtgagcagcatggctgggactttaacatcgggttttccaaccccaaatcccaactcttttagttgtaccatgttgtttcttctcatacaaagtactgtggatgggcagaagcttctgtgagtcaatacaaagaactgctaggtctgagtactaataaaaagatgtaggttaagtcagtagacttgcgcccatctgaaggtggtctctagttttctgcctcagggctctatcatgatgctgttctgttcaacagaactaaggagaacaataggttcacgttcaaaaactctttctcacctaaacacacagatgggcagcttctaataaagttggagctttgtaggaatataagtgaagtcttacgatattcatttattcattaatagctttgtatttatctgtgtggttgcttgtttaacatctcttcccctactaggctgtaagttccatgaggacagggtgtgtgttgttcatgactatattcccagtgcctctcaagtgctttgcatacagtgggtgcaccataactatttgctgaatgaatgaatgaatgttgatttgacatcttcacaacccttctcacctcagcctgttatggaagaaattgaggatattttggtgtgagctccccagctttctttgcctaccccatccactttgcctaccccatccaccctctgacacacacacaacacaacacacaacataccacacaaactcacccatccttaaccacttggagccagctgcagagaataaggggctcttcctccttctcaggaccctttctctctcaggacttagtgatccttttctcttttttccagcaagctccattggtttttaaactcacccttgtctctcctatgagaaaaacaaagccaaacaaacccagaaccccagctggccccacgtctccccttatcattttaatgtcctataagaggtgaccagacacccttctctacttgctcacctccaattcttgcctcagccccctgaattgagggtcgggggtgggggaaggtggaagggccttccacagtgaactctgcatactccagggtagcatctgagagctgaagccaggagacactgtgccgccctgatctttctgggcctttaccctgctgacaccactcctggagcctctgaccccaatatctgctcaatctactcccagctctcctgggacctcagtgatggtccctccatgtaagcctcttcctctgcctgccctgggtctctcccaagactccctcgctaaccactgccctccccactgaaactgcctctccctgagtgatctcacaccctcctggagggttaactagcatatagtagcgcttaactcctaaatccatcaggagtttctttccaaaaactgctgacttcttggacattctgcacattcctttgccttattgcttcctcctacccccactcccccacatttaataaaatattaactcctgctgatttcactcctatgtgactcaaccctagtctctcccctacatcccattcccatggccattatcctagctcacgtctcatcatctcttatctggaccaaggcaatgttttcctaagtgggctcccagcctccagtcttgcatccttgcaatccattctcccttcagcagccagagtgatcttttgaaatgtctaattgtgtcacctccttgcttctaagagcccttcagtggctctccattgtctacaggacaatgttcagatccttaatattcatacaggtctgtctgctgtagagccttccttgccttctgatactattcccagagactgaatcacatgcagctttccaccactctatgtgggccttggcctccagtctttgctcagtctttcctctttctgtctggaatcccttcctctccacttcttcatccttcccttagttcactgaccctcttcctgtaagactcagccacagtggtgccacctccaggaagcagggcctgtaagggagttatcatccacaaccctctaccatactggattataaggataatccatcatctacgagcatttaaaatgtgccacatagtttacctgcattctcctgttatgtccttttaacagtaactctgtaaggtaagttctattgttagtctcattttataaacatggaagctgaggcttagagaggttcagtgactggcccgaggtcacaaagggtgtaaccaatggagctggacccgaatccaggttgatcgtcagcagggcctgccacactgactctcttgattttttttttcttttttttctttttttttgtgacggagtctcgctctgtaacccaggttggagtgcagtggcacgatctcggctcactgcaagctccgcctcccaggttcacgccattctcctgcctcagcctcctgagtagctgggactacaggcgcctgccaccacgctaggctaattttttgtatttttagtagagacgaggtttcaccgtgttagcctcggtgaaggatggtctcgatctcctgacctcgtgatctgcccgcctcggcctcccagagtgctgggattagaggcatgagccaccgcgcctggccagtgatttgtttttgagcttccttctgccttgggaaggcctagccaccttcttttcatcctttaggtctttacttcctctaggaggccttccctaacccattcaccttaagtctggcttggatgcccttccatttcactcccatggtcccgtgtcaaccccttcacagccttggtcactgtgttttgactactggtctagccccaagctgggctgggggctccaggaggtctcagggagaggctgcctgtgctcatgagtgaatccccactgcctggcactgtgctagtaattcctgatcagattactacatgcttcccttctttttcccaccagaggctgagccccagtctaataactctttctaataacttctacatataaaggtgggttggggtggactgctatcaaaactgacaaaagtccggaaatcagtttggtaaactggcaaaggagtcccatttccatttgctctgaggtgaggtaaacgttgcagtgtttccatcaagatgggaaacagaaacgaagagaggctatgagcacgtgcctaagagagtccattctttccccaccctagttcccggggcctctccaccagttttgtttatagctcatgtccaatagtgagtgaaaagcctataagtgtattcttttttttaatttttaatttttgttgagtacataggtgtatatattcatggggtacatgagatgttttgatacaggcatgcaatgggtgataatcacatcatgaagaatggggtatccatcccctcaggcatgtatcctttgtgttacaaacaatccaattatactgtttcagttattttaaagcataaattaaatgattattgactatagttaccctgttggggtatcaaatagtaggtcttattcatgataatgattttttcaacccattaatcatcctcccctcctccctccccactcacaacccttcccagcctctggtaacccataagcacgttctgagtgacgagatgagttaaatgaaaaggagtaatttggacatcaaggcacctgagtgatagaaccaggtctgctactgacagtgagactataaacatcgctttgagtggctagaagccgtttcctcatctgaaaaactgggaatttgggctgaatggttcacagttttcttccagttttaagtctatcaggaactgtcttgtggccccacagcctctccgattccaccatctatgcctctctccccacccatccccacgagccacccaggactccttgctcctccagcagatcaggcccacctcagagccttgcccttgctcttcccgctgccgggacactcttctcccaggcttcagtccttcacctctttcacctcttcacacaaataccaccttctcaaggtcttcccaaactgcccatctaaaatggtcatccctccaccccagatccgtcttatcctcctctgtttcttaatttgctttgcacatcaacatgtacatactacacaattttctcttttaacttgtctattttttttttcttttttgagagtcttgctttgtcacccaggctggagtacaatggcgtgatcttggctcgctgcgacctctgcctcccaggttcaagtgattctcctgcctcaacctcctgagtagctgtgactacaggcatgcaccaccacgcccggctaatgtttgtaattttattaaagacaggatttcatcatgtagcttgtctattatctgctccatatactagaatgtaagctccataaggacagagaatttttatctgttttattcactgctctgagcctagaatttcaaattatgcctggcacacagtagtaagtacacaataaatatatgttgaatgaataaaagattatccttcaaacacacacagtcacataaacaaagccagtgaaatataaccaagtcccatacagcttccttcaacatagctgccagggcctgggcacaaaggggatacatttgcctctccaggcttgtctgcattttgttttcctggggttcccatctgcaatgggccagcaaagcttcctttttgtgaaccaacgattagcctttaggaagaagcccaacactaagcccaagccacagattgattaattgttctctaggtgtgaacgctagcaagctggctgagcgttatggccatcgacaaaggcactgagatgggagctgagggcagttcagccttccggggagggctgctttgaaagcagacgttgcagtttcctttcaagtattatcagtcatcatcgtgccattatggagttttcaatccatcgttccctgggcaataggtgcctgccaggcagagatgagcttctgtgctctgtgccatgggcgagcctttgtctgcgctgccatctgctccctggcacccatgcacacacacgacctgcctctctccctcagaggggcatcctcttgacaacacagtccttcttgcttctctcaggaccgcggggtagaacccaccagctctcctgagaccccaaatccctccactcagccaacatgtgctgagctcctgctgggagctgggcacctgcttcagggagataagtagggagctgggaagcccttcggggcaggggctaggtctcctttgccaggggcggtactgttcttggttcccagctctctacagcctgatctgccccttcttagacctctggaaggagctgacactacaactgctgcaagaaccagaaacagacataactgttttccaggtccacacctggggaaaaaaaggggcaaagggcactctctgaataccacaggcaaaggcagccttggggagtaaagagaatccctcttttctgtctctgctcccttgcgaggtcatctcatctgacctcatggctttcaatacaatctacacgctaaggatgctccaacttacatgggcagataggttctctccatccagctgcctacccaccagttcctcccatattcctggcaggcttctcacacctaacagtctgaactgagctcctgatctccgcaccccaaacctgctcttcctatgggctttgccacctcagttaagggcagctccatactgcccgttgatccccccaaaccctgggagctaaccttggctcctctccagcacccacttctaatctgccagccagttctattagctccaccttcaaactgtctggaagatgcccacttctctccgccttcaccgttgcggctctcacccagagcgccccctggcttctcacctgcattgctgcattagactccgggccagtctccctgttcccactctgcactccttcagcatattctcagcacagcagctggttaaagctaggtcagaccaggtcagcttctgctcagaacctgcccatgggtcctgataaactcagtagaagccaagttcttcccataatgtaaaggctgtgtgtgacctggtcccttgtctccaactttatctcttcctaccactcgtctccctcactctgctccaggagcactggttgcatctctgttctccagatatgccaggggaactctcaccttgagaggtcagaagtgctgctggctcagagcctgggaattccccagtaggccatggtgtggaatccacagtcgctctagtgtgatcttttcctggagcctaggcaagcgaccactgtgccctaagcgctcagctctccagcagttgtcacagttgtctgattttttatctgtctcctccactagaccatgattgcccaagggcaagggctggtgctacccatgtgggtttttccaggccttgttcagaagaggtattcaaggcatatgaatggatggatgggtagatgaacaacagcaacaacaaaacacctaggtttgcataacctttatagtgtttgaggacatttcctcctgtttgttcttggttggacaatgagaaacaaagatactctctgtaccaagaagcctcagccagaagccaaccagtccatgtgtgcctctaagcagggtctgtgcttttccccaagacagctgggtgtgcagcacaggaaagaaaatatgtattctccctggcttatgaagggtggagctgctaaaactacagtcttccaggcatatttctcaagaaaagaaggaagtcctcctgtatcttacccctcatttgagacggacacagaagctttaggagaagtgtcccatgaccatactagctggagcccccagaacccaggtgcatgtacccacattcttttcctgctgaaaattcttttccttcccagggcaaaatgggatcttggaggggaagcacactcgacctcactgggcatggctgtatgtgagctctgctgttatctcattatgctcatacccctattttacagttgagaaaactgagcctcagagatattacagagcattccacagtgagtggtagattaacccaagaactctatgattccaaagtgtaggcttatcctattgtcccagcagtgtcctttctcttccctgcctccagaagtgggtgggagactagctaggtgagaggcatgaggagccaccatggcactgggtctaggcttacttgggcctggggaaagctaatgcctgggtaaagcacccatcccttcccaggcactctgcagattcctggatcacaaagggctgtaggggttccagagatgctggagctctggtacaacaggagggccacaggcctggatccctgcagtcttattgttcatggcatctgagaggcagggcctagaccaatactagggattagaaagcactttggaatcaaagtcaatggaatgagtggataaggagttgctgatttaaagtattatagatccattggattagcgactcctagatttgtcatggattttagaaagcatctagagcaagcccctatgcagttcagccaagcttctcacacgaataaatcttcagcaggaaaagaatgtgggtgcatgcacctgggacatggggctcaagaaagtatggccagccaccagaaggatatctctgaaatctcctcctctatcttttgaaagatgcccatttacactggactccttgctctgtgtgtgtgtgtgtgtgtgtgtgtgtgtgtatgtgtgtatttagtttatgtgcatgaatattttatttatatacatatatttagttaagatttatagtttatcattttatttatagagaaacatatacgtttttaaattttactttaagttctgggatacatgttctgaatgtgcaggtttgttacacaggtatacatgtgccatggtggtttgctgcacctatcaacccgtcatctaggttttaagcccctcatgcattaggtatttgtcctaatgctctcccttccctttccccccacccccaataggccctagagtgtgatgtttgcctccctgtgtccatgtattgtcactgttcaactcccacttatgagtgagaacatgcggtgttggttttctgttcctctgttagtttgctgaggatgatggattccagcttcatccatgtccctgctaaggacatgaactcattctttttcacggctgcatagtattccatggtgtatatgtggaagacagtgtggcgattcctcaaggatctagaaccagaaacaccatttgacccagcaatcccattactgagtatatacccaaaggattataaatcattctgctataaagatacatggacatgtatgtttattgcagcactatttacaatagcaaagacttggaaccaacccaaatgcccatcagtgatagactgcataaagaaacatatttttaaaatatatatttggttgaaatatatgtatttagtttactatttgatatagatagatagatagacagatagaatgattgtatgtatatttgctttacgataagattagaaaacgtgccacatttagcttgtaggctttggtgctcccatcatgcaaccctcagggctatattgtatttcacagttttttttcacatataaacaattcagaaattagaatgagtattacaaccaagggtacgtgatcgtttaactggcactgttttctttcttagtggtgcataaaataatggtacatcttacagtcaatagaatgtcaactttgataaaatccagtatatatgccagtttggaaagtatgttaacagaatccttggcagagcttgatcaatcaaagccttgcttgatcacctccagaaatgaggaactcattacatcacaaggcagcctactccaatttagggtaattaaagctatataaaacaacttcttgattcttggctgaaattcacctacttttaacatctttccattggacattgttctactccctgcagcaatgcagaacgaatccttatttgtcttctgtgagagaaactctcttgtcacttccagatcttctccttaactattctttgtttcatagttacttgtctcattaatttctcccaaatacctacttagttttgggtcttgtgctagagatacaatccatgaccctcaaaaacatcttgtggccaggcacagtggctcatgcctgtaatcccagcattttgggaggctgagatggaaggatcatttgagcccaggtgtttgagaccagcctgagcaacatagcaagataccatctctacagaaatttagccgagtatagtggtgcacacctgtagttccagctactcagtagtctgaggcaggaggattacttaaacccaggaggtcaaggctacagtgagccatgatcacactatagcactccagcctgggtgacagagtaaggccttatctccgtaaaacaaaacaaaacaccttgctactgatcaatgctttattacatgaatttccttcttctgaatgcatccaccctccaagatccagagtctatatttccattaatagagccatgtgacatttgattcatgttatgttcatagccaactgacacctccacatagctttcacacaagccaggacttcactgatgttggtttgagtgttagtttactctgattttggtttttctcccatttgctatttatcacacaaacaacacttgagtagccataaagaggaacttaaaaaaaaattcacccacatctcactgcctgcccacgtcaactgtttctttttttatttccatccagtccctgttcatataagacctactttacatgtttgtaataaatatgaagaatccattttgcattctggttttttcacagaaaataatatcataaacatctttctgtattgccaaataatgctattatacttttaaatgactgcataaatctattaggtagatctaccataatttgcctggccatgcccctactgttggacatttttacagtttccaatttttcatcattataaataatgctgaaatcaacactttcatgcatataactttcttcttctgttgaattatttccttaggatatattcccaggaggggaattactgggtcaaatgacatgagcattttatgactcttgatacatactgtcaagctggatttccaaaggactaatttacatcagcaccagccatgtgcgagtgtgtctgtgtctttgccaccactccagcactgcatcatacccaccgaagttcttcagcctaatttaatagggataaagtgccatttcattgtcttaattgacattacactgataactatcaggaccaggtagtgctgctatgtatttatttgctgactctatttcctctggtgtgaactccttgatacctttcttaccactttgtatgggttcattatacaatgcagaggttaaccctttgttgccacatttggtagaatattattcaagtcagttgtttctcttcccattttacatgatttttattgtgcagaacttttacatttgaatatagtctgatcactaatcttttccttttgttagattttttaaagtacaaagcttgacactgctccctattatagtggaatatttaatttggatccaatagtcgcaactatgtgaaattattttattcctttttgtagactgaagtcaaactgtctggattcaaacccacactttacctcttactagctgtgtgacctcaagcaagttacttaactttcagtgcctcatctgtaaaatggagataataatagggcctacctcaaaggactgcttgagaattaaatgttaaaatgtaaggcacttagaagagtgcctggcacctggtaagagccccagcaatgctagctttcattatcatcctgacgatcatcatcacccaatgcatttgctatgtctccctgccctgactcctctgcataatttcccagtatgatctctagggctccacccacatcactcacaactggagaccccagcacttgaacattcatctattcagcaagactcttcaggtgagcttgttcaatcagttacagtcacatctgaatgtcagcagaacagacagaaatatcacaaacaactgtgtaagcaattgtgaaggctaagctgctccacgtagagggcattccttctattccagcagtgtaaatgtccatccataaaggcaatgtagggagtgagccctgggcttggtctccccttgtcctggcaccatcctcagtgctggtgaaggttcagaaacattctatgctcgacagtggtccctgctttgcctcctgtgactggtttccttccccgcagtctgcccctgctctccccaatgtctctaaagcataaatctcacggagccacttccctgcctaagacccttcagcgatggtccccttcttgtgagtaaggcccgaactccttcctgtggcctcctaggtcctacatgagctattccctgtccctcaagccagttcagctccggccacacccctgccctcatactccacaactgcccttcttgcagttgctcaaatgcctttgctctttcttctggtctttgattccattcattcaccaaatatttactgagtacctaacatgtgacaggacctgtcctaggagctgaggaatcagcacagaacaatagtaatgcaaaacaacacaaagctcctgaccccaggaagctcacattcttgcagagaaggacaataagcaaataaataaacagtcatagcatatgtcaggaggtgctagggagtgatgggtaacaggtgctgtgttatatacagtgtggtcagaaaaggcttctcaataagaagacacatgagcacagagctgaatggaaccagggagagggctttggggccactgggtacaggcaaggggaacagaatgtatggaggccctgaggctcaaatgtgtttcacctgccctgtcccctccacttcccaagattagctcctggtcaagtaattcattaccaagcccagtctgtttactctgcaaatatagctggataaaggtcttgagggataacaggaagcggagagctggaaggaaggatgacagagctgggaagcaaagccactgtccatgagacgggtctcaggcagcaacaacgccctgagcaaggccagggctggggaccacaggctcaaggagatgccccagcgtcatgctgctggcccacccgactctcccaggcctctcctgctgtggggtaggggtaggcgagtggggcaggcctggagaactgtgcagggcttattttcagcaggaacacggtggagagtgtgggctttggaaccagactgatttttaaattgtgcatgacctttaggtcctggttcacctcaggcaaggtaactcacctctctaggcctcaacttccttatctgtaaaatggggatcctaaggccttgctcacgaggtggttatgtgtcggttgttgtctataaagcccccacccctgcattgctgagcatgtcgaaggtgctcgacaagtgccagttcctttgttgtcttcatctcagaggccctgggctatggaccctgcagcttgtatgaggataaaggactgtgaaacaactcctatcatgtaacggcatccacaggggaaggacagggatgccatctgtccaccgccaaatctccaaatcagaatctcctacctaatgcggtaagtgcttttctctcctgctgttaaaatgaaatatcagtgggttcaactctcagttattcacattaatgaaggaaaaggtagaaagaataatccaaaacagtggttaatcactcctgagttattcattaatggcaagaggtgggactgaaatattcaatttgacacttctgtttggaagtgttctctccccactgatgctgggctcatgggttgggaaataagtcaccccaaggaagaggtggcagaaaggcatgcatcccctaaacctctagggctggggtcagtggaggaagctccaacagggtcacctgacccaagggcacaggaaggagacagatatgcatgtccagctacggtccctaccagagcagcagttgaaggacaaccctctccccttctatccacacgggagaaatcacatccaggtccccacccagtggttcttcggtaccaagggatccatcctgggaggggctgggagtgggctggcagtggtcctgagctagccatgtttgggggtctctgggcccccctgccttgagcacggttatgggaggcagggtcaagcctggggcaccctgctgcttcccgtgaaaagggtgtttatcagctaaagacctgtgctaataagtgttaaatagagttcaatgcagaaaattgagaagtaatgagacttggagccaagagaataaattaacaggtgatcacatggtaaagagtccccacctgaatgctgaaaaggaggaatcctgaccatcagagagctctgggtcagagaacaggttggaatgataagtacacctcaactgaggctaaggggtggttaggagcaattaagcagttaccatatttcatcggttctagggtgcaagcttttccatattttaatatctctgaaattaggatgtgtcttatagtcaatggcatgtcacactttaattggcagcatttttttctttcttaatggtacatcaactaaagctggatcttacgactgggggcatcttagagtcaaagaaatatggtatcaggtaccttgagcctaaatctcttttcttgcctgggcctttcacatggggcaagacgatcatttatccattcacttgtttaatcggtatttattgagcacctactatgtgtctgaccctgggctaggcacaactgtgaagagtgatcctaatagcttacacatccacttagtgagtgtttattctatgccaggcattattaggagcacttgatgtgttaccccatttcttccctacaacaatcccatggagtagggtttattattcttattgtcctcctatgataaggggtcagaggaggttaagtgacttgctcaaagtcacatgctggctactatctggacgagttgggagtcaagtcttcctttagaccctgagctctgacttcagtgctctattgagcgttcttcctgtccagaagcacacacaagagtagagaaggtaaacaaggaacagaaaatacacgagtgatgcacatgatagaaggagaagtgcagggagccaagaggtaatagaatagggctgttgtacacaggggcagcctcttggatttagtttaggcagagaacagaagagaagagttgggtggtagtggtgaggtggttcaggagaggggactcagtgtgtttgaaagacaagtgggaagacagagtatggtgcatctgagaactggaaggggatggaggtagggctcatgccggaggttttgatggccaggtaaggagtctggactccatcctggaagcaattaaatggttggggatttccattgttgttgttggtttggtttgtttgtttgagacagaatcttgttctgttgcccaggctggagtgcagtggcgcaatcacagctcactccagcctcaaccccctgggctctagtgatcctcctgcctgagcctcctgaacaggtagggctacgggtacataccaccatgcctagctaattttctttttaatattttgtagagatggagttttgctatgttacccaggctggtctcaaactcctgtcctcaaatgatcctctggccttggcctcccaaagtactaggattacaggtgtaagccaccacactcgaaggatttaaagggctaaaccctttaacccaattaaagggtttcaagtgaaagctctctgagatctttgctcccaagcatccaatgaatctctgaatcttttgttggatagtgaatgaccacagactcccaagaggacggttctgaagtaaagctccaaaaccttcaagttgttcaagttgagtactgcgaaagtatgcccaggcagaggggtgataaggattagaacccagcctatacgctatccactgagccatatgctcacaggacagggtcttctcagagtagccacttttgtgttgtacaaaagccttatatagactagtagggatccaggtcaggagatgcaagcaatagctaccattgcaggactcctactgtgtggcaggccctagactaaggtatcatggtggcagagaaaacaaaaaagtaagtgatagttcttgccctcggagagccacaagatttgaccaaaggttttgtcaggggaaagaattgggtttttttcactcccataaaacccaccatgccttgttatattagcttccttttactgagtgcctactatgtgccaaatgtcaccctagattctttctagaccttgtcattcatgctcacagtcctcttgaaatggagagaaaattaccccatttttcataggaggagtctgagaggtgtagttccttatctaagggcatacactggggatatggcagagctcaaacttgatctccagaaacctaaccgggcatgagagcaattttctccacgtggtagacgaattggttgtttttgaatagcatctctgtgccaggcacttgtcacgcactgactctttaatcctcattacaacctattaaagtgggcattatagtttctgttttgcaaaaaaatcatttcagggaggttgggagacttgcccaaggtctcacagccagcctgagggaaagctagggtttggatccacatctcctgtctcctgggcttatgcccttacttctctcccaacatttttaggtttcagagctccttgaatgtaggggccacttcttattctttcttgtatcctcaaagcctactttgggactgatatatagcaggtgttcagtaaatatttgttgaatgaatgaagaatgaatgaatggggacagagaagtgaagcagaggtacactgtatctgcaagcaggcagctgcgtgagaatgctccttcctcctcatcactgtttctcctgacaccctgacaggaagacggtcatggcactagagtttggcataatatcatcttaaagctatgttaatactcttccccaaaggggtaaaatattactatgcatgatgaactatttgtgggattattgaggacgtgatatgaaaatcatcctgattctccacttattgagaagtgctgcccaatttgtctcaaatgtcacgtctctatgtattaatttgctactccacagtactgattaaaatgaatgttctccaactcccaaggcagagccatcggaaatggaacaggttcactcaggaagcacacaccatccctcctgagcggaggaaatggacatctatcacctccctccctggaggagggcattggcctgctgttctgctgttctggcctggagtggcttaaatgctgcaaattgcatattcagtgtatgtctatctatatatatgtgatcaaatggcttccattagcccaattttgagatgtctgcatcatgtcccagaattggggaactcttttggaatgaggaaattgtctgagaggctgaggccgagagagagaatcagcaggtctaattacaggaaaaaacaaaaccaggaaaggcccatttctcccatgtacttgcttccaattccatctctggaccccaatttatctgcgtgcacagtggcatgatcacctccaaccctactcccacctccaaacatcacagaagcacactgtgttctgaggcttgctcctaacctgcgtctcctggaacagcaaaacgggcagctctggctccatctgtccatccctcacagatgagtctgtctaccctgttgcaacacgctgtggtccttatacagagatgatattaccgatcttccattggtagcaaaagcataccagggttttgtctttttttttccagaagtgacactaagtggagcatgtcttctttctccctgctcccctttgggaggggagatagactagggagagagcacaaatcgtgacaatgaaaatgaagcttggatgaaagtcaaggactgcacacaatatgtgcccagtaaatattagctcaatgaacgaagaaatctctaccatcaacttaatgtgtgaggtcaacctctctgggctgtttttttaggtgaactaggggatcggggtggccacagggcatctgtaaactccctgtgaatcttatggaagagttgtatttgtgtgagtacgtgtacatgcatgtatgtgtgtgtgtcacagttttcaaatccatgacctcaaaagcctagggcctatttgacttcttactaggacccttagctctaaagccaacatctctgatacaaagagaagaggccatgaacagactaagttcctggtttggcctcattagctcccatccaccaagtgacaaaacctgagacttcatccctatccaatggacacaggctcaagcagtgccagaggctcatgaatatgaagaacactctgcttcttccctccaaaagccaccgtctggctgtaaagctagacacaccacgaacagctggattaaggattttatgcaaactctggagccagggtactggggtggggctgggattgtgaactatgaagttgacatattccttccatcccctgaaataatcccagtcaagtaaggttaggatgagagtgacttaattaattagctgacatttatcaagcgctgacaatttgccaggtcccatactgagcacatcttgtgacttgtgcattctcttccttaatcctcacaacagctctaagaagtattattcttatcctgattttataggcacagaggctggagctcaatgaaatgacataacttgtccaaggtcaaccagcaagtgagtggcaagataggatttgattccaggtgtctgaattcagaacctgagatcttaattcttgtactatgccacctttccccttatggttaccaaggagtccacaaaaaataagggaaaataagggtacctcatccttctaagattcttcatagagatcattagtggaatagaacaggtctgatttttaaggaagcctatagtttgatagtgagatgtccagatcacagttagacttagctaaacaaagaaatacctgttttgagagctagagtattaagtagatctaacagactgagacccgacactcagagatgggctctccttcacaaaagtgtcagagtgcacgagatccatgctgctaaaatgcagaggtgcaaccaggattaagcactaaaaacctgcagagactcttccctcattggcatttctgatctgcccatcacgctcgcttacctggcgatcagtctggaataatcggaaacaatctcatgcaacagttgggagttgtgtgtggggaaggtgggaagtctggggctagggtgagaaaaaaatgaccaaatggcaggaagactggaaacatcagatagagacacactgggggtagagtggggaagatgcaggcttccatgaactcggagtgacacatggcaagcatcagagagccaaagacagaaagggagacacagaaaccaagatcaacacatctgggttccaggaggatttaaaaataaacagtaaaataaaactaaaagaataaggtgagcctttaaatgaacatttatctaatcttcacacagaagaagcctctccaagcatggcaccaaaaatagatagcataaaggaaaaattaaaaaattaaaatgtaaaatgagtggcataaaaatgaaaactgctgtacctctaaaggaaacccattacattaatatccttaatatgcaaaaagcacttacaaagaagataagaaaaattctaacacccccatggaagagtaggcagagaccaagagagaggatttatacaattatcagtacatggccagtaagtgatgacaggtgcttcaccttacctacaatcaaagagatgccaattatcgcaacaaatgggatgtcattttccacccattttaatccatgaaactgacttgtaacactggcaaggtgggaggaatgggctcaggcctgcttgtgtactgttggtagaagtgtgcgttcgtataacctttctgaagacacgatggaattatgtataaaatggaaaatctacatactctttgacccagcaattgcacttccaagaatttattctaagaagataattagatgagggcttaaattgtatgtacaaggatgttcttcacctaaatgtccacagaagatgactggttagataactatggtatatgcaaaccacaatggcttcctcagtgatgttcattagaaagacaaatcagggctacttttattaacacagaaaaacgttggcttcattaaccagattacagaattgcacagatagcataatcccaagtgcacacggatccacacctgtgtgcatatgtgtgtgagcagatagatgtctaaatgtatattcattggaatggcagaactgaggctagacctgggcagacagccctacatgggcagacagccctacatgggcagagcaggacatgggcagacatgggagtcaggaggaggaggaggaggtaagtggggcgagggctcctggggcctattttcagactctttgctgaaaatgggattgtcagttctagcaactgaaaatgcaggatgctcagttatatttaaatttcaggcccagtgtggtggctcatgcttgtaatcctagcactttgggaggtcgaggcaggcagatcgctccagctctggaattcgagaccagcctgggaaacatggtgaaaccctatctttaccaaaaatacaaagaaattagccggctgtggtggcgcgtgtctgcggtcccagctacttcaggggctgaggcaggaggctgaacccaggaggtcgaggctgcagtgagctgagatcgtgccactggactgaagcctggaggaaaaagtgaggccctatctcaaaaaactaaataaataaaataaaataagtatatttggggtatacttacactaaacattattcccacttcaaaaatttgaataatttaaaattcagattaactgagtgccctgtattttatctggtgaccctagctgagaagctcaggaacacatctcttgttgcctccatggatgacccacaccagcctggaagttcccacatcctcccctgcctctggcttatctccagtttacctgcctgtgaaatggagtcactagcctctgccttactcaaagagttttgcagaaaagccacgttaaaattcctggccatcaggccctaagctgcacacaaaacttccctgaggctcagcatgtacttctgtaagatggatagcaatgtctgtccacagggttgtggtgggggattaaatgagataatgtatgtaaagtgcctggcatacagtcggtgcttaatacaggttgatccccttccctcccgtccagctgctgcggcccacgctcttgcccccggggattacaaaccaagcaccttctgtcatctcagggtttgactaccggcctttttgatcttttccttgcggcggcagcagccgtgggctgacactcatcacctgacttcacctttctccaaaatccctagcagcagttcagttccttatctatacttttcacattctggatgagggtggaggaggatcaaactcgctttgatagcagacatttggggatgtcagccaagaggagctaccaagagcagggccctgatgccattttgaaacggacacaacaacatcatgaatagcgaatataaggaaaccatcctgactgggggcagcctaggctggaagtgggggcctcttctttgaagcctgtctgtcattctccctgcttgccacccagcacaaatgtccaaggggactctgcaatggaggaagggggctgagctccttccctgagagccaaatcttcataaattccttttgactagtgaatctcccctcctccaccccacaatgaggctcagagagcttaaaaatctgcccaaggtcacccagtgagtcaggtacaggttcaacccgattcagttgcctgttgaataagctcaacgatagacatcccagggcatatatcaggtaggtatgctcacagctgtggctgaccctactcatgcctcccaccttccatccttgtccatccactgtgggtgttccaaaagtaagtgcaactcacatttgtccagatgcatgaattgccacatagcccagtcccaaatcaaattaatgagcttcagtgatagccacagccttggcttatgggtgtctgactcctttgttagcacagacacctgtgacccactttaccatgcagtacaaaacagccagccacacatcctgcgtagtttgcagaaaccctgcaacaggtgactgcatagagactcgctcggctacagcaatctgttagcattggtctagcctttgcaggggccttgcctacaaggctttatttccttagtgccaatgacttagacacctgacatcattatgtggctgaggtgaaataggctgttccttctgccctgtgagtcttgctgtggaatgttgagcattctcatgcctggactgcctcacctgtgccaggcaggtgggaggagggatccactggcctctaatttatccctaatgttttgcaatctcttttgaatcaccggcctctttgtgaatccgatgaaagctccagctcagctctgtccagtaaaattttctgcaatgatggaaatattctgtatctgggctgttctacatggcagacaagccacatgtggttgctgaacatttgacacaaggctagtgtgactaagaaactgaattttaaattctattcaattttagttaatttaaatgtaaatagccatatgtggctgatggctactgtattggacaatacagctgcagaccaggggtaagtaaattttttctgtaaagggtcaaaaagtaagtatctcattggctttgcatagggtctctgtcacaatagctcaactctgcagttgtagtgcatgaagacagccaccaaacacatgtcaacgaatgggcatggctgtgttccaataaaactttatttacaaaaacaaccttctggctagatttggccagggggatctgagttctctaatgcctgctgtatattctccctagaaaaagatatacccaccctcagaatttttgtctctaatgtcatggagtttacagacctcctgttgcccaactacagaccctgctcatgatttccaggtgacagtgtctgttttcacgggactctgaatgtgccctcagatctgctctgcttaatgagaagtgcttgtgcccctaacagggcagtgtgggcagggacacctttttcctcaagcctcagggaagccagggcctcaaagatcgaccaggactgagaaatgagggcaccatgagagcctagggcccggccagttcccccatgtgtcagtcactcccagcatctttgctggcacctcttctagtgtccctgacccagtctcccttttcctggccccgggtcccaagtgcagtcaatgtccccaaggccaacctattgtggaaggagctaatggccagacagactttaggaagcttctgaagaggcttctcctagtgaggagcttgttgctcaaacttggagagaattactttggattcagggccaggttgaaggaataaataggatgacaaaaatcacaggcttgatattggtaggaacttttttttttttttttgagacagagtctcattctgtcacccaggctggagtgcagtgccatctcccaggttcaagcagtttttgtgcctcagcctcccaagtagctgggattacaggtgtgtaacaccatgcccggctaatttttgtattttcagtagagacgggattttgtcctgttgcccaggatggtctcaaactcctggcctcaagtgattcactcgcctcgtcctcccaaagtgctgggattacaagtgttagccaccacacccggctgagatctgatcattttttaaaaagaaattaggctatttcaggaatcctcactttaaggacaggtcagtctttgtcaggagccctcagttaaggtaaaatagagttatgtcagaagccctcagcaaaagacaggtggaactttctcaggagccttctcagcaacctttagttaaaaataactgaagccttcccaggagcccccagttgctcaggttaaagcatcaaaccatctcccctataccccctgccaccaggggtggttttttgctaaggaggcagaacttgtcctctttatgcattacacccctggccaagacagggagtgtctgtttctgtattgctatagcttcttcattgaagaaagcatcgcttactctttaagttcttaaacaaaggcaaaggcaaaaaaaaaaaaaaaaaaaaaaagcttttggatatctggcgtgctttactagggtattatgtcattactgttattaattatcattaacagtcttaaaatatgcctattaatgatcttaacacaaaataacagtgcaggtcttagccaagagtggcataattacctattaatgagatgtaaatttcccagggaaatgacagagatctagaagtaccaccttctgaacataataaagttaataataataatagtgtataatctgaagatattagtgttaatttgaattctaacaccatatttaaacagactgagagaagtacaaattatttgcatagcacaaaccaaaagcccctaatccatgctattaaggaaaaatcgattgttcttctctgaatgatataaaactgactcttggcagtcattgtatggtgttttcagttgcttattttatttcttttacttagggtttatatgtcttttattttcaaaaacaacctgaggtaccttatacaatgaagcccaatataaaacagaattaaaaaaataaaaacacaacaaaacccagttaaaggggacagagaagtagatgttaccaggccctcaggataaactactgcacatgagctttgatttcaattctcagtttcctgggaaccaagagggacaatttaagtaactgagttactggttagtaaccagccttgtcaggacaggcgcaagctctgggtctgaagaacacttccctgcatctgtgagcaatgcagtcctgcttgtggctattaggacatcacatctccggctcctgtggccgatgagggaggcacttaccttcataggtggcgtggaagccttgggcactgactgcatagtcgctgatgaggcgcagagagagggtggtggctgcactaacaatggtggctggcagctgaaagcctgtgagcctgaaagacaaagaattggattagggagaatgacccccttgggaaactacacatccacgaagcatttattgagtgcctgctggatacacagtgctgatctaggcacacagagggtgttcaaagacaaagtgattctcagcagaggtgatgaaaaccagcaggcttctgccccagaaacatgaggaagtgactccgccaaagccatggtctaatccccaacctggaggcttgcctgcttcctttgtgtttcctcttttctccttttctgatttcttttcctgtctcctctctttctggctgaggtcctgtgaggctctgggtataattccccatgagtttacaactaacaattgccagtagacaatatttattcacatagtaagggaaatagagccaactctaagtagaagaatgagcatgcttcttatcatagactttattctttcaaaggaatgtctactgcttttatagaaataagtgcctattagtttttaaagaaagcaaaaaataaaaaaccaacacaatctagaaataattattcctgacagttgacatacaaagagatggtgggatcaatagatggaatcatattcaatgaaataatttcatacaaatgggatcaaactgtgcgtgctattaaaattaaaatgtttaaattttctttctggaatttaactgaataaaaggaaacaggtgtgaagctaaaggaattgttgaacctgaaataatatgcttttagcacaagataatcatttttaaagattcctctaagggaaaaagataccactgaacacttgggaatacatttaggaaagaccttgtccactgctgggcatccatgcctggtgaccctcacagggacctgattgtgcacacaggtcatagtgaggtggccagtctcctacacacctttgtccttaaccccctctaagcctcagcctgccttaccacacccaggtaggaatctaggaggaatttcaaggtttaactttgtccccatttttaggtaatttgaaatatccgtggttctcctgggtgccgctgtatacctcccactgctatacaatatcttgatgcccaggatatccactgaagggcatgagtatcgggctcagatgagttaaaccagatatttgttaacagacactgtgaaaacccttatgctagatgaagcccttgcccttcccaccatcctaaccttgtgggattcatgttaactcagaatagactcaagaaaaagcaaagaaaaaattatcaaattatgcagcaggcaaccaaataagtttcaagggcatcttctcttcaaatataaacacatccagcaaaagatccctacctcaccccatattcatatactctctctcatcaaaaatgtatacataaaataatgaaatcatacatattataaggaaacaaactttgtttaatcatcttatgctggggaaaggcctcctaagcaagacacgcagaggactctctttgcacctatttgccctgtcagtcttccatgggagctgtccatggcatggagttctgatggtactccacctacccactagccacagagctaggtaaatgatcaatcgcgacatactagccctcatttttatggacggattcagggtatggggaagagggaagagaccataccacccaagcagagtcattccgagtccttctatgggatataatatacagactctgaaagccttttatttttggaccttaaactactacaatataagcttgagactcccagcagcctttttatcatcacacagagactatctgctttagagaaaatgatatcgccagatagatataaataaaagctgagcagtggcaagagaagagaaacagaaccctgatgatgtatttttcagatccttaatccatgcagcgagatttatctcttcaatgcccagttacataagctaacattctttctttactttctttttttcttaaactagcttgacttggttttctatctcttgaaattgagtgctaatggatacaacataaaaccccagaggccttaaaggaaaatattgattaataactacatgaaaattaaaagcatgtatgtgtgacaaaaaactgtaaaagataatgagaaaagtgcaacctgaaaggttacgaatatgtgacaggaggaggattcgtatttataacctagaaaaagttcttacaaatcagtaagaaaacggtaaacaggaggaaaagagcaaaagatacaatacaaattaatgatccacctaattaatataaaaatgtgaaaactgaaaccccaagactcatttttcacctatctagagttggcaagggctaaggaaaacagatcctgcacttaacaacatgataataaggaaatactacaaattacacacatgcatttcacacattaaatgaaatgggcacaaacttgaaaagcacaaactaccgtaagtttcccaatatgaaacagatcacttgaatagccctataactattaaggagattgaattagtaattttaaaactcccaaaaaagaaatatctaggcctagatgatttcactagagaattctaccaaacatataaagaagaattaacaccaattctactctaatctcttccagaaaagaagaacaaacatttccaaactcatattatgaggccagtattactctggtaccaagccaaagacaatacaaataaagaaaaatgaagatcaatatttcacatgcatacaaacacaaaaaccttaacaaaatattggcaaggagaattcagcaatatataaaaatatttttacaccataaccaagtggggttgtgtctaaagatgcaaggctggttcaacatttgaaaaatcaatcagtgtaatctaccatattaacaggttaaaggtagaaaaatcacatgaccacatcaactaatgcagaaaaagtatttgacacatttcaacacccgtttgtagttaaacgaaaaaaaaaaattcagaaacctacaaatagagggtaagtttctgaagttgataaagaacatctacaaaaaaaaaaaaacagtagctgacatcacacttcatggtgaaagactgaatgcttttcccttaagattgagaaaaaggcaaggattcaacaactcagttagaaaatccgcaaaagacatgcaagagacatttcaccaaataagacatatgcatggcaaataagcacatgaaaagatgtttaacatcactagcctttaaggaaatacaaattaagaacatgaagaaatattactacatacccattggaacagctaaaataaaacactatagtcacgatacccaatgctggtgatgatacaggaaaactggattcctcatacaatgctggtagaaatgcaaaaacatgcagccactctggtaaatagtttggcagtttctttaagaaaaaaaaaaccacataactatacaactcagcaatttactccagagaagtggaaacttatatccattaggcccaaaaacctatgcataattgttcatagcagctttattcctaatagcccaaactggaaacaaccaaaatgtcctacaataataggtgaatgactaaacaaactggagtacatccataccacagaatactactcagcaataaaaaggaatggactatgaatacatgtagcaatttgggtggacctcaaggtcattaagccaagtagggaaaaaaagctaatctcaaaagatcacatgccatgtgattcaatttatataacattctagagatgataaaattaaagagatggaaaacagattagtgcttgctagagattaggaatcgtaagaggaagggaaatggatatgaccacaaagaggtagtatgaggagatctttgggtgatggaatcattctgtgtcttgattgcagtgatggttatgggaatctgcatgtgataaaatgacacagaagtatacacacacattgcaccagtggcagtgtgctggttttgagagtgtgctatagttacataagatgtaactattggaggaaactgggagaagggtacatggaacctctcctgtgaatctattattatttcaaaataaaaagtttcatgaatacaaatctaccatattgacttctgattagctccagtcttgagaatgcctcctgattcctattttatttactgttcctagcataagaatatgtcaatcttgatgtttatcatacaagttacaggctatgacacatacagtacccttgcctgttctagaggctgcttttcattgtctggctggacacatacaccctttccctatggtacatatgccctgggtctggggagtaacattgcagagatctacctgccttgtggctacccaagaccatgcttctgtctgtgaatttccccagtaaaacaccctctaccaataaaaaattaaatttaataagttttaaaaaattatatctatggctcatattatattgctattggacagtacgccagtcctccattagatcagacttacactcagtctccctggattgggctttgagctttgtcttttccaggcccctcactccagccgcctcctatccactccagcctgtattgcaccctccccgcccccaccggcggcactgactgcagccttgctgactaccagtaccagaactcaggccacagggcccccgttagcctattccttggcttcctgttgacttgcccatgcaccagttgccctttccctcccccgaaatattcgtatcttcagtgacagactgacatcatcccattgtaccctatggattaaaatagtaaattgtccccagcaaggccagacctatatctggttccccagaccccatcctagcaagcgctggttgtctccatctccaggtgggcccaattcacagcagctgcaacttgtctctcacccatgtctaccagaattatgcccttgggtgcccttcccagacactcagcctagggaccatcctttccttcaactacatagagcctcatggaggaagctcaaacctcaccaggccttctcctatgaagtcctctctgagaatggcattcctctcactaagcagaaattgttgattttattccccaacttagttccagtatatttttgcactgccattaaagattcctagaccctagtttctcggtactatattgatgcgagctgtgaatagctaatgtacactgtcaacaaacaattacagttttatcacttacaatatatggaattgcagcttgctaggcattttctctaatcagatatttaccactgctctgctctttcccagggttggtagataaattccagcagggaggattcctcaaaggcgctagctaaggctgggggaggggatgggaaattgaatctccccagctggatacctgaatcatcgctcccccacccacttatctttgagatcgattttagacacgctgaagaccccgcagttaggaggagctatggtgttgcatgacagaatgagcaaataaaactttcagactttcccatcttttatctgacaagattaaataccatattgaaaggagtgaggtatccttcaatagtgaaatccagacttagcagagaaatgcagtaaaatgatggcaaggcaggtgagagtcccctgttgctatgagttatcctccttgcagactctaaaatgcacagagaacagcattttgcaaacaggtggcatagccaaacgtgtaaaacaatactcatcttctgctttacatcagccttattgtcttctcattttctccactgtcttttctttgtttttgccttcctgccaaaagtaacccagagtcttgaaaatgggacggccaggacaccatatactcctcatttctcagctcagaatctacccacagcctcccactgttcttaggattaaagccagaatccctaacgaggttcacaaatcctgcatggcttggccctgacagattctctgctctgtctcctgcctggctccagccccccagtcttctttggtcaaggccatcccaagggcaaaggaagtggtcagcccaaagtgcaggcaataagggcattaatttcctgtagggaatttgaaatcaataataaaatggactttaaaagttcacttcttatcaccatgcatccatgttctaaataatgtcagtgattaaatactcttcccccgcttttctcccactcccttccttcgtacacctgtggtttcagttccttcaatttgccatgccccatcttcagggtctttgcacgcactgtctcccatttagaacactttctaacccttgggatttgtctaattaactctttctcatcattcaaatcttatcacgagtgtctcaacgttacttctagaaaggtgcattcctgacatcccagaccagcctattctgcatgctcagaggtcccagtgaagtcactggtatggttcaccttgcatttccagctttccttctagacacagagtggaacagcacctcccacccctgtggaggtcaggcctggccatgacaccagcttggccagggagatttgggtagcagtgaaggtcactgttgccaggagggaggcttgaacagcctgtgtaccttttgctgaattcccttccccttatccaaggtcagtgatccttggcctccgcagccacggtctctgagcaactcccctaagcaaagagcccctgcaaacctcttttgaatctgcagcatgagcaagaaataaacttttggtgagttaagccatttcaatttgagggttgtttgctaccaccatgttttcacttgtaggttttgttactaccattcaggtatggtgaggccaacagatcagaagacactgccgctgaaaagataacacagtttcctagaggaaggggcatactatgccatgcagggccacaagcatgtcagaagctccagcgtcagtgacaaggcagaaggagcctgggtaaatgtgggcaagagcctttattgtggttttcccaagaaggaatgggcaagatcaggtaagcagctgagcaggtttaggattgcctagtttgaataatttcagagggcaccagggtatgtggaccacccttagctgtctgatgtatggccctgggtaattagggcagggggatagtagataaacaatgagatctcaataaaagaggtagaggccaggcatagtggctcacacctgtaatcccagcactttgggaggccaaggtgggaggatcacttgagctcaggagttcaagaccagcctgagcaacatggtgaaatcccatctctataaaaatgttttcaaaaatttgtctgagtgtggtggttactcagctaaacttgtggtcccagctactcagggggcttaagtggtcccagctattcaggaggctgaagtgggaggatcacttgagcctaggagttcgaagctgcagtgacccacgatcgtaccactgtgctccagcctgggcaaaaaagtgagatcctgactcaaaaaaaaaattaaattaaaaaaaaaataataaaagacttagttgtgctctacccaattgggatcatcagtttgcatatgaaaggcatacttccgggagagctctttgctattttaggtcaacaaagtcccaagatgtcaaagtatcagaaaatacagacaattaaaaaaccatgattagtacacagagtataacctgacctatcctgactgacatcccttttcttttcttttctttactagcactaaccataattcctaattagatgtttattggggtgagtagttttcattaaggtctccctgactagatgaaagcaccccaagagccatggctgagtttgtgttgctcaccttgcatgtgtatttctaaatgaatggataaatgaatgaatggccaactatttggtgtttcgaggagcagccacacagagtcttaggtgactctgatgctggcagtatagacaacaggagggagagacatccagacttgggctaagtaacacttagtgacatggcaaatccccttcacacccatgaaatgaggcgagatataaggaaaaagcagactgcttcgaacacctccacttcttcctaatcattccaggaaaaataaaagggtgggagcttttattttaaagagggtattattaggctgtgtgcagtagcttgtgcctgtaatcccaacattttgagaggccgaggcaggagtatcgcttgaggccaggagttcgagatcaccctggtcaatatagtgagatcctgtttttccaaaaactttcaagaatagttgtgcatggtggtgcatgcctgtagtcccagctactcaggagtctgaggcagaaggattgcttgagcccaggagtttgaggctgcagtgagctatgatcatgtcactgcattccagcctgggtgacagaatgagaccctgtctcaaaaataaataaatgggccatttatttatttatttaaataaggaagaggggacagaagtgctggactgtacacaaaaggactcccattctaagcagaaggacttgaactcccccaccagaatttggctcggatacaactgagcttcctgccttcaggtgtcactgaggccttgagcacatcaacaatgcccagtgtggactgagacctgagggtcttcctggaatgccaggtctatgtaagaccttgcttgggagaatcccaacagtggctgaagtgaaattcttcccctttatgcatgggactcaaagtcaaattgtttttaatgcaggaatatgacatttcttccacccaagtgaagtgtctgcaaattcctacccatggaaatgaaagctcattttcttactccaggagtttgtgcccatgtttgagaacttcaaggctctcaagctgaccaactactcacttcctcaggctggggtctcttggctttgacgtgccaggcttgcagcaaggagaccctaaaagacccctcaccctgtggggtgaggaacagttgaagacagtaggcacgtatagtctggggtccaacagagttggcaaggcaaaggataagaactgtctccacatccctagggccatgcttgacacaccaatgtcctcatgaaatgcttggcaaagaaaaaggaccacaggacagaggctccagagagacacacttgggctccacgcagagaagaacactggcattcacatctgccaaaggtatgagcgtgccacctctcaagttcaatccaattttaatccctcaaatatttactgagtggcaacaggtctcagatgctgatcctcagagaggaggaggaacatacctggttgaatcttgggccaagctcagagacatggctttgcttttgccagtcagagaaccagtgagaaaggccataatgaaactctgatctcaacaaactccaacctggaattatggagtctattagtacattgggttgaccccattactggagtaaatgtaagtcttgattcctgcttgatagaaaaacatagaagacagggaaagacggaagaattaggctttgtccaaatgtcttccaggcacatggaactttctgaaactgtctggagtagggcggctggcaaatcaaaacactatctgccaagactgtcagtgtgacaagtgttgcttacacttactcttttattcccaaggtcaaattggcatgtcatttttcatatcactgtttgatgtgctaacagccttaaatgagaaccattcaataaaagcccaatttgctatattaccatttattcctggataattctatattagttgggctctttaagattgtctctgtgctgccccaaaatctggagaaccatgtgataaacccccacttttcataactttctgaggatggaggcagagccctgagtcgtccctgagtgagtgttgctgggactggttccctaggcctcaagtgaaataagagatctggatcagctagaaggacataatgatcaggaatgacagagatggatggctctctgggtgacgtggcccgaggctttgccttgcaagacctggcctgcctttctttctacctcagctcatggctctctcccctttggtctttccccctctacccacactggcttctattttttgagaaggagtctcgctctgtggcccaggctggagtgcagtggcgtgatctcggctctctccaagctctgcctccggggtttcacaccattctccttcctcagcctcccgagtagctaggattacaggccaccaccatgcctggctaattttttttttgtattttcagtagagatggagtttgaccatgttagtcaggatggtctcgatcttctgaactcgtgatctgcccgccttggcctcccaaagtgctgggattacaggtgcccgccaccacgcccagctaatttttttgtatttttagtagagacagggtttcacagtattagccaggatggtctcaatctcctgacctcgtgatccacctgccccagcctccctaagtgctgggattacaggcataagctggcttcttatactgtccttgaaggtgccacatctcttcccatctcagggcctttgcagatgctgtccctaggactctgtgcccagatgtatccctttgccacccaggcggcctccaccttaccttccccccaaccctgcattagcttttcagggctcactttcagcatcagttcctctgggaaagagtttagggatccttgataaatgtcctcagagaatagagtacttctactttgtaacattcatcccaatgatcatgaatcgattttcttactgaattgttatatatctgtctttccttcttgatggtaagtctcttggaggcaaagactatctataaccttttcactatatcactagtgcacagtacatattagatgcaatatagagtcaataaatgacggtttcactatgagaaagcagacagaaaaggcctgactgctatcctttgaaaggccagcttacaagtataatccctgtctggcatctgggaaccgggatttcaggagggttccctccatttccagtactttcaagagaggtctaaacaatttgtacaaacattatggtttatgctgaacacctgctttccacctgggagcctagaattttggtatgtgacaggaagaggggtctaggtaatcatctctgtgggaaaaccctgggcaatgagtctctgctgagctttcctggttggcaatatttcatatgtgttgtcacaattagttgccaggggtttgaagcacgacctgtgtgactttgccagaagaaaactcttggaagcttgtgcctggcttctcccagccatcgccccaggatgcaccttttccccttgctgactttgctctgtatcctttcactataataaatcatagccatgggtacaaatttatactgaatcctatgagtcctaataaatcatgcgggtggtgatgcagaccccccaacacagagactgacaaattaatacaaccagatttttctggaaagtaccaaaactaggttatttttcaaagcatgtttctagaatgttcaccggttaaacagaattgggaaatgctgggttaaataaagcagggatttttcagaaaacaattaaaaaataaaatgcgtaggaggacttttaacaagctaagtcaatgtaaaccttcaaggctggaatagattatgtaacagatcccaaacccattatattatagccccttttattcctaaagcatcctgtgggctggggttctgtggaaccctctctgggaaacaataggcccagagaatgcaggttattatgaagctgaggctgttgctacaacaatcatgaggctgttgctatgtcagccatgaggctgctgacactccctatcttgaaagttctgaaacccagagtgaccaaaggtctgagatgtggttctgtgctgccccgagatctggagaaccatgtgataagcctccacttccgagggtgatctatgcatgtctcttctttgcaatcttaaagagccaaactaatatagaattacctaggaataaatagtaatatagcaaattgggcctttattgaatggttctcatttaaggctgttagcacatcaaacagtgatatgaaaaaagacataccaattgaccttgggaataaaagagtaaatgtaagcaacgtttgtcacactgacaggcttggcaaatagtgttttgatttgccagcagccctactccagacagcagccactagttagatacataaaccattaagctaaaaacagaactatcattacaggcatcatctagtaatttgcaggtaattgatggacattagtcataatcacacaccatacacacacacacacacacacacacacacacacacacacacccctacaaacacaggttttcactggtaattcccctttgcatttcatcaagagcttctaaaactgggaaatgtggaaaatctaggctttttgtgcctttctatatatacatcatagactcctttattcttaaagcatcttgtgggctggggttctgtggaaatctctctgggaaaggatatgcccagagaaggtagatcatggagctgaggctgtagctacattagctatgagaccactgacactctcagtcttcaacaccctgaaacccagaatgagaggaagtctaaagagattattcttgtgctgtctcaagatctggagatccttgtaataaactcccatttaagagggcaatcttgcattagctagatatctgctgaaaaaacccaacttatgtccaaaggatcttgtctagaatgtccctgcctctccagaaaacatctactggctctgcaaacctctgctttcagctgcacatgtgcatttatttttggaggctgggatacctgtcttaagtatgactggatgggagcaaagctagacctccaaatccccatatacagtacactttctaggatgtggactctctttagaagcaagatctggagtcacagcagacccacctgctgaggtctaaaaataggggagaagcactacgttcagaatgcaaatcctctaagcacactcgctccatcaaaactcaggggtgtttcccattggactgcagcgtctccttctgcagcagggagccctcttgatgtgctctaccccaacggttcccaaatcatgttgcacagaatactatccaatatgatgttagtaggtttgcctgaaaaaaataagtaattttgggaaatgcaccatggttcccaaacggtgcaccaaggtgccccagggcattgcagtgagtttacaagggtaaccaaggactatttttaactttcaaaggaaatagtggcacttaatatctgctggacacacaaactattagctcaaggtggttcacaatttcagtgtaaagctaccttccgttagatgacatcatatctttgcaaagctttggtagttggtgtgatgggaattagggaccatgtgtgaatcagtgtggaacaggatatgcaggtggtagtgtccaatctgagtccaaggtttgagaatctttgcaatgaccaacaaggaaacacataccattagcaatcaattgttatttaacaattatttaaggatgaaacaaaaatgtttttctttcaatttatattatcttcaaacagatacagagttgttggggtataaatacttattcagttatttggacctaactacttaataagtggagctaataggtatttcttttacccatggagcaccgtggaaacattactgagacactaatggcacctaagaaactttgggaacctttgcattactgtatgaaaagctttggaaagtcctgaataatagacaaatacagttggatccagcgtaccccacacttcttggttcagtacatgcatgaatagctttatttacgacatcagttgagaaactaaatagatgttacccatgatttgtctctatgatctgataggttcacaaaagagattaaggctggcttattcccaccggtaacaattacaaatttttctcatcaatcattcattcaacaaatattaattgtatgccctattaaacgctatgtactatgcttggttctcaggataaaaatgcctaagacgtggactcactctcgagggatttaccctcaaacggaggcatttacattaatttatctagaaatccagccagttctcatcaccttcattactaccatcctggaacaggacacctccatctcttgcctcaattactgcagtaacctcctaaccagtcttcctactttcctcctagtccacctacagatcctctttaacacagcagcttctgtgatcatcttaagtcagatcatgtcacttctctgcttgaaacccttccaaaagcatcccactcgatttgggataaaagccaaagtcttcataatggtctaaaggccctagggaatcctctgctgccactacccgctcccactccatcaccaccctccttatcaccaactacctccccctgctcactcactctaaccataacggccgcttgctgttcctaaaacacacctggcaagttctgcctcagggcctttgcacctgctcttctctcagtttcctccagctacctcatctcttcccccagatgtgtatggcttgttccttcatcttctgcaggtctttgttcacataccctttacaccgaggctttgataactattctacttaaaattgcaaccctcctcccctcctgtcccatttcctgattccccttgtcctgcattttctcctaacacttatcataatctgacttcctatatatttgatcactccttatttattacgtctaccttttcccaccagtgtgtgaattccacgagggcagggatttctatccacttagttcacttatctaaccccagtattgagaacagcaccagatacaccataggaggtaattactgaagacacaattataatgcaatatagtaagtgcagtgataaggatgcatccagggaacttgatgcaccagcctgagctgatctaaaaagataaattgttagccaatcatccaaagggcatggcgggctgtggtaggatacggaggtcatctcaaagaggatggcacaagcagaggaaagacaaaacccactttacgtgtaatttataaaattgttccccaactaatgacaggagaacaaatggatacaaccagatgttcctcctccacttgtttgccatgactgcttaattaccagtctccccaagagaggggatttttctggaggctgctcagccttctagcagatgcagacttcatttacttccacagaagcctgaaaacccctgagccaacttggtcttccatgacagagactgaagtatccagcaccacgtgtcaggaggttggcaaggatggaaatggggaaggaagctttgaggaagagaggtcgtcatgttccagaagcctgcctcccacttcgtggccaatgccttctggcagtggctatgcagcagctgataataatgatgatgtttgttattaacccgtgcacaggtgctgccttccatatctacctcccctaaatcaggcttagtgacatcacccatttaggaatggaaactgctctctgtcaaggcagcccttaaagtttggaccaccccaggaggtttgatggaacagctgagatttacccaggccctcagatggtgccaggctaggatttgttccttgtgtgccagagagacacaaacaacaattataaaaatatcagtgaatggtcagcagattctgcatcctgagggctttgtgcccacctaccccctcggacagctgctcaggccaacctggggaaggagcaggtggagcctctgagaattctaagaaggcaaaagatgctgaacatgcctgcaagaggatggagaagatggacagaaagaatgggggtcttctccttacctgctctgtaccacaatgcccttcctgttggccgccagagctggttttgagcaccgcacctggtttgaaagattaggtctccatttaaagacagcgctttgcagtgtgctacaggcagcacctgtgcacaggttaatactaaacatattattatcagctgctgcatagccaccaccagaaggtgttggccatgaagtgggagaatatcaggccctgtctttgtgaactggacagaaatgcttgttggcccacttggaagggagggtcaggcaccaggacactatgcccactgtttcccatactccagggaactaggagaaacaggagcttccagaaccatggtctccagaaccatggttccttctccagaaggaaatgtggagagacccttctcagtaagaggggctccagggtttttgctcaggctgggactgcagggtaggctgagcccacagctgtgaagtgtgaaacgtgattacccaagcccaagtcacacgttgtgaacagtggagggtcaacctgaattacatccaaaccatcgatatttgcagttaatagcaaagaggctttacctgtgggcctcatctgtagacaagagagggaggagccacagaggcagtaagagagtttggtcactggagagtttttgcaggtggttcagggactttctcaggccttacttcccagtgtctgttgtgaacctctaactctgctgcagcttctaggatttttcagggccactatgttgcacatctttcaggagcaccattcatattacggtagatgaccctggattctgaactgctgccttatccctgaattctgcttttctgcctggacccttaggataactgtcagctggaatttggaactgggttttgccccccaaccccagatgccatcttttgaatcacttttagtgacatactgtaaaacagggacttgctcacccctaagatccaatccaagtgtatagagtgaggtgccacagaagaaaacatgaaaccctgaagacagtggcaagctttaagggactgacatgtgaaaacaagtgaggtatcacttcccaaaaaggttccattgattgcgccttgtcatactctgccagttgctctgctttatttttctcataacaattaccactacctggatggcttaggtaatggactgagtgtgaactcccaaagtttatatgttgaattggtatttggaggtgggatcttcgggaggtagttaggattagatgaggtcataaggatgggacttccaacatgagattagtgcccttataagaaaagacccctttctctgcctctcttgccgaccctgtctgcaatgtgaagatgcagtgagaatgcagctatctgcaagccaggatgaaacctctcaccagaatcaggccattctggcaccctgatcttgcattttagccttcaggacagttagaaaataaatttctactgtttaagccacccagtctacgagtattttctgatggcagcccaaagagaccaaaacagattttggtaccagaagtggggttcccaaaatggtacccttccctggcatgataagccaactaccctggtggcagttagataacactggactgcttccattgtagaaggagaagtgttttgttcttactgaaacagacacttattttggatatggatttgctttccctgtatgcagtgcttctgccaaaactaccatccttggacttacatagtgcctaatccactgtcatggtattccacaatgtgctgcttctgaccaataaactcactttatagccaaagaagtgtggcagtgggctcatgctcatgggattcactggtcctaccatgtgaaccctccaatctgaagcagctggctaggtagaacaatgaaatggccttttcaagactcaattacaatgccagctaggtggcaataccttgcagcgctgggacaaggttctccagaaggctgtatatgctctgaatcagcatgcatatatagtgttctttctcccatagccaggattcacaagtctagaaatcaagggatggaaataggagtagctccacttactattacctctagtgaccaactgacaaagtgtttccttcctgttctatgaccttatgctatgctagcccagaggtcttagttccaaagggaggaatgctcccaccaggtgtcacaacaatgatcctactgagctgaaaattaatgctatgctagcccagaggctagcatatgctatgcaagtccagaggctagcatatgctatgctagcccagaggtcttagttccaggtgtcacaacaatgatcctactgtgctgaaagttaagactgctacccgggcactttgcactcctcatacctctgaatcaacaggcaaagaaaagagtaactatgctagccagggtgattgattctcactaccaaacagaaatgggactgctactacacaatggaggtaaggaagattatgtctggaataaagaagatcccttaggttatctcttagtattatcatggcctatgattaagatcaatgaaaaaccagaacaactcaatccaggcaggactattaatggctcaggcactttaagtttaggtcaccccacgtggtaaagaaccatgatcagctgtgatgcttgctgaagacaaagggaatacagaatgggtagtgaaagagttagttataaataccagctgtgaccacatagccagttacagaaataaagactgtcattgttatgagtatccctctttattttgttatgagtgtttgcatgtgtatataaggatatatctattcatgtgtgtatataaatatacgtaaatataaatatataaatatacacacatacatatatattaagtaatatgtatttgttttctttttcctttttcatatagcataagatataataactttatgttatggtatttaagtattgttacttttacaccatagtatttaagttgcaggatatcaggaagagtaaacaccattccaagattttgtctcctcctctggtgaggggttaatgcaggatagtcatgtcatattaggcaaaattgtaagtttgttattgtctttatttggcagttaagtgtgttttaagatgtatatagtgcagagttgacaaggggtggatttgtgatggttaatatcaggtgccaactttacagggcacaggatgcccagatatttggttaaacattattctgggtgtgtctgtgagggaggttctgggtgagattaacatttgaatcagtagactgccctcactaatgggggtgggggttatccaatccattaagggcctaaatagaacaaaaatctgagtaagggagaaggtactctctctgactgtcttcaaccgggggtattggtcttctctcgtcttctgatgggaactcagactgaaacttacattatcagctttcctgggtctccagcttgccaactgcagatctcagtcttcacaaccatgtgagccaattccttataataaagcatatgtatacacacacacacacacacacacacacatcacacatacacacagtagcgttccccatctgcagagtcaaccaaccatgcattgaaaatattaaataataaataatattaataaaaataataaaaattttaaaacaacgcagtacaattactacatagtgtttgcactgtgttaggtattgtcagtaatctagagatgatttaagggatatgggaggatatgggaggttatatgcaattactacaccattttaaataagggacttaagcatctgcagatttttatatccatggggggggggtcgagaaatcaatcccctatgggacaactgtgtgtgtgtgtgtgtgtgtgtgtgtgtgtgtgtaagaaagagaaagaggagagagagtatcctataggatctattgagtatcctataggttctatttctctggagaacccagactaacacagctcatttatatgtgtgtacttgttaattgcctatcttcctctatctgaatgcaaactccatttagaacaagaaggactgtgtccatcatgcttactctagtatgctcagtccctggctcagtgcctggtacacagtggatgctcagtaaatatacacgagattgaatgaatgaatgaggaattggtggtataagtgtttcgagaagaattaggtcattggcagcaagcgcttttgaggggcttggtaagagacgactaagagggtccgtggatttggcaatgaggacagtggtggtgacctgctcgagagcagtgtcagtggcaaggctgaaactgggggacaaagagcaagctggtgatgggaaggaagcatgtgagacaaggagtttggacagctctctcaataagtggctttggaaggaagagggtcaatggcgaactacttttaaacaaaagcctcttttaacccctaatcagaacatgctcatttctacctctctctactgtccatcccttcccacgccttctcttggggcacacaccatcaatcatctctcattactttattttttaatagaataagcaagttcatgggcatttgtttcagtctcatattcattctcttgataggataataattgataccgtaagtgacctcattaatcagcagggacaattagaatgatgtaagtggaggacagtttgccgtgtagcctgtctgggaaagactgaaaggtcaccagatctcgaagtcagaatgggatgcttccatgggtgactggctcttctttagtccaccttcttgggtccctcctagcaaagtggacacaagaaagctccaaggaaggttaatatgtaatggtgtgtgtagtttcaatacaggtccattatgattgcggtgctctactaccctagaatccctctttctccctttgtttcctcaggaaaacaagtccgcattgcttcagagtctgaaaaggcatatgaacatgcaactttagtagatgaatttcttaaaatgtagtaagaaacatgctatttccaggcatcctccggcaaatcttttgatcaagttgagtttctctgcaaagtgcactattatcatctttatttccttttgaaaagagttactgggtgggaaagcaggaaaatacaacagatatggaatgcactagcttcaacaaggcacttataaatgcacaagaaagggaaagatgagctagactttatcacaataagacccattgattactggctcaacaactgtacacagttgtcaactgggaatagggctctagcagcctgcggcagagctaaatccttagccctgcccagcccacctgaatttgtaaatagactcccaattttgaaataatttcagatttatataaaagctgcaaaaatggcacagaaagttcctatatactctttatccaactattcctaaatgtcaacagcttacataaccatggcgcatttgtcaagactaagagataacataggtattttactattaactaagctgtagactttatctggattttgcctgtttttccacaaatgtccttcttctcttccgagatccaatccaggatactacattgcatttgccctgtaatttttaatatcttctctgggaacagagatggcatactgatcaatttatgactagtacgaagccagcaggaatgtcctagataataattaagaccagaatccaaaaagtttcttcaggcttaatctagagaacttgcactaaagacaggcatgagtgaacttttgtccttgggtctgagatccaaactataaaagtggtttctggccaggtgcggtggctcatgcctgtaatccctgaactttgggaggccgaggtgggcagatcacgaggtcaggagatcgagaccatcctggctaacacggtgaaatcctgtctctactaaaataccaaaaaataaaaaataataataataattagccgggcgtggtggcaggtgcctatagtcccagctactcgggaggctgaggaaggagaatggcgtgaacccgggaggcggagcttgcagtgagccgagatcgcgccactgcactctaggctgggcgacagagcgagactctgtctctttaaaaaaaagtggtttccaaccaggccactgtcaaacattattggagctggtgattgtctcttatcgtgtgagctggtgtgaaaaaagcttgagactttagggcaccttcccagaactacgtctctgtaaggagaggtgatgattccagtctattctttgggtttgtttacctcctaaatgcttttattttttctaagtcattttcaaaaataagaatcttttagagacacaaggatgaagaataatataataagcacctgtatatacaacacccacacaggaaataaaacactgtaaacatagttggagcccctgggtagctctgcctccccctggcatggtgacaagaccctttgtaatctggcctctgctgcttctcccagcagtcatccactctctccccaaacaacaataacaataaacaagcaaatagccagtctactcccaacttttcagctgtagaaaaacaaactgtttttcctctgctctcactctacgacaatcaacacagaatacttctgtaaccaaatggaggtgggatggggttccccacaaaccaaacaagcaatcatttctgcagtggatgcaggctggatgtcctccagtgcaattcaactctgattatctacctgaagttagcatcaggtcccgtaggttgagggctcagtctcacaagactgcctcccaccgcagatgccaatcacaagaccctggttgttttacctttacttctgaccaactggctgtaaagcaagattcccaggaccccctcccccagatttgattaatttgctaatgtggctcataggactcagggaaatacttacatttactggtttattataaagaatattacaaaggataccaatgaacaccagatgaagagatggagaggccaaggtatggaggaagaggcatggagtttccacatcctctttgagcatatcagtctccaggaacctccatgtgttctgctatctggaagctccttgagcccagtctttctgagtttttatagaatcttcattacataggcatgattaattaaatcataggccagtggtgatcaactcaaccttcagcccctctctcctccagagtttgcgggttgacactgaaaatcccaactctttaatcatggcttggtcttcccagtaaccaaccccggtcttgaagatatttagggatggcaagccaacagtcaacccattagcattcataagatgtgtatcactttggagattccaaggatttcagcagccgtatgtcaggacaagagacaaagaccaaatgtatatttcacaataccacaccagccatatagaatggcatgcaattccctgaatatcaccgtggtacactcgcttcagctcctttacaccactgttcccctgcctggactattcttcctactccatttatcccctgctatctcccaactcccatttcttctttaagacttgtgttcaagtgatatctcctcaggaacaccttccctgattcctggtgctctgcctctaatctctcccagctctggacacatccctctatgctgcactggcttgtctatttccttcatgtttctgcctcaagactgagttctccaaggtcagggcctatgtctgcttcatctctggatcccaatgctaagcataaggcctggaatgaagaggtctttggggaatatctgaaaggcctgcaatttagtataataattaggaaaatagtctctaaagctagtagtgctttgttttgcatcctggctcagctgtgtgaccttgggtaagttctttaacatgtctgtgctccattttccccttcatcaaatgtacggttaacaatggtatctaccttacagagtgttgagaggtttcaataacttaatacaggcaaaatgttttgaatggtacttagcacagaataagtgctcatagctattacaattatttctatcaaaatgttcagcacctgtttagctatatcacctgggttggatttccactaaaacaagacctgtgttaaggatttggctacaagtgagcttatttgggagttgaccctaagagcacagtgaggggaggggatatgaaacagaaaagagaaggcagctgagaaaggggacctggtcatataaggtgccactgggagtcaattgagctaaatcccattggggaacactgggagtgagcatagaatacgcaactcagagtcatcctattacaggaagaagaggctggggtatcaatacactaactccctccttttgggttgctggttgctcctggggtcattagctccaaccaatgaactatggatgtggcatctactggatctgctgcgtctcccctccactcccagtgacacctgagcagagagtgggagcgaaagcctagcagcactgctgactgtgccctgtggctgcttggagtcttgatctcctcaagtcccttgagcaccacagcctctgccctggtctctctgcttgattccatcctgaccacaaccttccaagggctggaatcacagatatgcaacagcgctgaaaactaattcaggtgcccacccaggatgccacgccaacctcagcataggctgatggctggcaggaagcttcccttttcccttctcctagacccctaagccctgagcctctcgctgtttctatgctgtttcctgcagctttagagtgggaggctcctggtggaggcgatgccctggcaaactgtcaggacccctcccctcctagcaacactacagcaccttacactgattggtgtctcagtccccgccccctcccggcaggcagctcaaaggctgagccagagagaggtgggcagagagggtccagctgccagactcagtcctccagccccttgcctccgcctcttggccaccgcttcccgttactcccttccacaagccccctcgcttgtttgtccccagtgcctgataattaggctgtgtttgttaaaccatgggctccagctctgcccacccagactctgcctactgtagattttcctgcaaggactgcagagatcataaaaacaactacccaccttgtctctctggcttatttactaacttggccataaataatcagggcaatttgcatattactacttggctttttatagcaccacacatctgagcactggcaggcaagctgggggttggggtgaggaggtgaggcacgctctgggctggcagtgacactggccagagctgtttctggcaggcttggcttctcctggcctgaaagcagagagaactagcctgggagtaggggcgtgggacgagggaaagccagtcatagtcacctagttgggacaggatgagcacagctgtagtgggagtgacaactccatttgccaaggatggcttgtgagctgggagaaacagggtcccaggctcctgcatcacataggagctgggtagagcacgggtgcacttcagactccagctctgccatttacttgctgtgtcaccccgggcaggtcacttcccctctctcatccttgtttccacacctgcaaaatggagatgacagtacctaccccagatgatctttgtgatgattcaatggggtgctatagggaaggcacttagcatgatgcctgacctagagcaagggcttgaaatgatgatgatgatgatgatgatataaaaacaaatcctctacattcctatagctatcaaacaaaatttatgaagataaataaaccaagacctaccccaaggagagggaagttgttgagctacagcgtgcaaggctgtggcatcagaatggaatatgtgaagggcccacagtagcagaggaagtctatatctaccaaggcagacgagacagggagaaggcagggtttagagctggaatcaccacctatgcctgttgtctggggatctgggtttggagtgagtgtcagctctgagggtctgagtgcccactgggctgcccaccctggttgaaaccgcacacctggccttcagcactgttcgccctactttattagggctggtcagccctggtccccagaagcctggaccctgctccccacaccccagccctgaattacatgattgctctaccacctgccagacatgaagccgttttacaagctggaagccatggatgctatatttttagatctcaactagccttgaaccttgggtggggcccttgtctaaaccaaactttaggacctgctgcttcttaggtggcggtcagtgaatgtcctaggcaaagaaacccagccctggtccccatttgcaaatctagagactgggccacttgctatgtctcataggacagaagcatgaggggtcatggcaggacacaagtaagtgagcaatgacaataatatccccaaggtcctgctaggctcaagggttccccaagtcacagctcaagtatttggtgacattatgaccctaaggtcactgctacacatgcaaaaggatggagctatcagtatcatcagaagtcaaggtgcttccagtgaccagcaaaagctacaccccaagggctgagaggggtggagcgagacccatgggcccttcttctgtgcctcaaaaggccaccaccttcctggctcacagctttttgctagatgtgcctccatctgacaccctcttccctcagccccctcattctaactgggtccttcctgaatactcaagccacccaagtaggttccccaggccatgtcaattctagcaccctatttctttccttcagaagcttatcaaatctgtaatcattctgtctgtttcctagtttatttactaatctcccttactagaggctaagtttgggagagatgggaatctgtgtattttgttcccccactgtttttgcgatgcctgttcaaccctgcagagtgaccacatggcccagtataattaacatattatatggtctccctcagtggctggcccctaacaggtgctcagtaactatgtggggaatgaatacgtgaatgaatgaatgaatgaatgaacgaatgaacacaagcagtaaaagtcgacattgtcagtactgtagcacaccctggatcctggtgggtaactcttgctttcctaattcccctgcccagatccctctgggctgaatccctgtcaaccaccactcccttggactcttgcctggctggtcccatctcatctgtgttcattcaaatgtccctttcacccccaccctgctggaccatcaggtcatcatagggtcacctctggcctgacagaagccacagccatggctgcgattggctccttggatttcatcacatttgtgacctctagaagagagggaaagaagaatgccaggaaggcacagggtgccaggagctgaggatgagggccaggaatgggaaaggtcaacaggagtggatgccacagaggaaaaggaggaccagccaagaacagtcccctgggtcaggggaatgaacatcctaagaagaggatctgcaggcaaaggaggctctgaaacatgactgcaggcagctaaggaacagacagtaggattcagtttgggtaaaatcaatgcataagtgtgtgagggtgtgttatcagtggttctttctgggtgccaacatgacagctgacttttaaaaattcttctttatgacagtcttcattttccaagttttctataattagaatgtatttatatactgaaaacatatatatcaaaggatgggaaggagaaagaccgggaggcggaggatgcagggcccctgggggaggacaggcaactgcggcagcctggggggagctctgaggctgccttgccctccccagcgtacctcgcccccaggcatcctggaattccttctcatctagagccaggattgctcagctcccaggcaacaaatgcaggatttgtgcaagtcatggggttccctgtttccttttttttttttttcttctctcttctactttgtattttgtaagaatctaattttaaattctccagatgccatatttttgatcttttcaattgattctttgcagaaatggagtaaccaaaatgtcatgaatccctttaatggaaaaggataaaaaggctgtgaaggcttggaaagcagtcactgtccagtcccctctcagccaggcctcatcttcgtggtccctgttcctcccctagccatgcttctgcctggtggttgagatgcacaaaggccccacccacctgtatcccctgggtcagaaaagttggctttctgtcacgactggagacagctattgcataagagaccataatccgtagccgtggaagagtctttggcacaaagggaagctcgcacttcccaacccctgcagcaagcttgctccaccccaaccctgcctgggacattggccaatgtctgagaacatttttcttctctgcaatggggagaggggggctactggcaggccacggttgctgctaaatatcctacaaggtggaggacctctccttacaacaaagaaactccatagtcctgaatatcgagggtgccatggtgagaagcaggctggacagtgtgccaggctctgtgccaggcccttgtgtgccacatctcactctgaccacaaggcagactgtgctctgatggctgtccatccttggctgatccagactttggattggccccgtttcgcaacggctggagcggctgggacacagggcaccaaggctgcctcaccatggaagaccatgcccctggctcctctctagcacccagggccaccactcactgcttctctgctatctgtgttctgagtggggctcaggggctcaactacctgactcatgggctcaaatcccagcaccaccacttatgagttactcaatctccctgagcctcagctcctcatctgcagaatggcaacacctatttcacagagttcttgtaagacttaaaagggttaatatatgcaaagtgcttagagcagtgcctggtacatagtaagtgctcaataatagtagccattaatattatcaatattattactcagatgagtgaaagagattgctgggcaccatagctcatcgtgactgcaatgcatccccatcatcacacacaaaggcacaggcttccgtgctggatcctacaaaacctcctggaggccttataacctgacaccattattgccgtctatgcacatggccctagaggttgaaagcattatcttccttttccaaatgaggcaatggttgggtcagctcagctagggtaattgcttcaagcctctccatatctgtgtatgggatctgtgtatgggatccccagatcaggtcatcaggatgggctaagaccccaatgtcatgagtgtgctggcttcccctctgatggggagtccagcaggatacatgtggctctttggactcttaagttctttatgaacttggtgaatataaaatcagcaagagcacattttaccacagcccttgaccttgctgggacccaggtgctggcaatagctcaaagcaaaaccagacaagcacccaccaggccctctgagactctgcagaggcattctgaggtagcatttggacccagcctaaaaataaacccttaagccttcaactatttttattaccaagtaacacatgtcattgacatccatcaggggtgtccatggtacacacgactggtagcaaaagagtagcttataccttctgacagtcactttaatgtggatgccttaaaacagacaagccaggaagtcccgctgtggccatgtttcaggacatgcattcgagctggcagtgaagacagggggtacaggaaggacatggaggacagggaaggtggtgaagagggcagagggaggggctccgggggcaagaccatgagcaagagatcccaaggtgagggtccatcccgagggtgggacagccaggcaagggaggacaggatggccagggggagcctccaacatctgtggctgaacctggctcttctttggcctgttctgctgaaaggcctccagccacacccttgcttctgctggtgtttgagactctgctctctgatgccacaactgacagtccctggagaagcaaagcaacagaactggctatagaaacctatggccaaacccttatgggcaagaggagtgtattagtccgttttcacactgctgataaagacatacccgagactgggaagaaaaagaggtttaattggacttacagttccacatgtctagggaggcctcagaatcatggtgggaggtgaaaggcacttcttacatggcggcaacaagataaaagtgaggaagatgcaaaagcggaaaccccgataaaaccatcagatctcatgagacttattcactaccacaagaacagtatgggggaaaccgcccccgtgattcaaattacctcccacctgatccttcccacagcatgtaggaattatgggagtacaattcaagttgagattggggtggggacacagccaaaccatatcattccaaccctggcccctccaaatctcatgtcctcgtatttcaaaaccaatcatgccttcccaacagtcccccaaagtcttaactcagttcagcattaacacgaaagtccacagtccaaagtctcatctgagacaaggcaagtcctttctgcctatgagcctgtaaaatcaaaaagcaagctagttatttcctagctacatggcggtacaggtattgggtaaatacagccattccaaatgggagaaattggccaaaacaaaagggttacagggcccatgcaagtccgaaatccagatggggcagtcaaattttaaagctccaaaatcatctcctttgactccatgtctcacatccaggtcatgctgatgcaagaggtagattcccatagtcttgggcagctccggcctgtggctttgcagggtatagccccactctgggctgctttcatgggctggcattgagtgctgcttttccaggcacacactgcaagctgttggtggatctaccattctggggtctggaagatggtggccctcttctcacagctccactagatggagctccgatgggtgctccgatcccacatttcccttctgcactgccctagcagaggttctccatgagggccccgcccgtacagcaaacttttgcctgggcatccaggcatttggatacatctgaaatgaggttaccaaacctcaattcttgacttctgcacaccagcagactcaacaccacatggaagctgccaaggcttggggcttccaccctctgaagccacagcatgagccctatgttggcccctttcagccatggctggagtggctgggacacagggcaccaagtccctaggctgcacacagcatggggatcctgggcccagcccacaaaaccacgtattcctcccgggcctctggggctgtaatgggaggtgccgctgtgaaggtctctgacatggcctagagacatttttccattgtctttgggattaacatttggttccttgttacttatgcaaatttttgcagccagtttgaatttctcctcaaaaaatgggtttttcttttctactgcatcatcaggctgcaaattttctgaacttttatactctgtttcccttttgaaatggaatgtttttaacagcactcaagtcacctcttgaatgctttgctgcttggaaatttcttctgccagataccctaaatcatctctctcaagttcaaagttccacaagtctctagggcgggggcaaaatgtcaccagtctctttactaaaacataacaagagtcacctctgctccagtttccaacaagttcctcctctccatccgagaccatctcagtctggaccctactgttcatatcactgtcagcatttcaaagccgttcaacaaacctctaggaggttccaaagtttcaaactttcacagattttcttgtcttcttctgagccctccaaattatttcaacctcttactgttccaaagttgcttccacattttcgggtatcttttcagcaacacttcactctactggtaccagtttactgtattagtccattttcatgctgctgataaagacatacccgagactgggaagaaaaagaggtttaattggacttacagttccacatggcgggggaggcctcagagtcatggcaggaggcgaaaggcacttcttacatggtggcaacaagagaaaaatgaggaagatgcaaaagcggaaaactcggataaaaccatcagatctcgtgagacttattcactacaacaagaatgatataagggaaaccacccctatgattcaaattacctcccaccaggtttctcccacaatatgtgggaattatgggagtataattcaagatgaaatttgggtggagacacagagccaaaccatatcaaggaggcttcctgaaagctcttctttcccctaggccttcctttgctcccctcccccaaccccacctcatgatggtctcttaactctgagagtgtcttacagacagcttgaaacagacttcttcttctctcccatgtccagctctgcctttgggtgcaccaacactttccttcttcgccccactctgcctttttgctctcaaagatagggccgaattgttgggtatgcacagaattcattatgccaaactgcagactccatcaggcatgggctggggtccaaatctccaaaggttcaggcagtaaaacagtccagaagcacacattctaaaccatccccaaaactgccccttctctccctcaggcctatgtctacaagggtaccaccagccctaagcagggccggctgcacagtgcacagagcactgactttggaaccagcagagctgggttttagttcatctctggtgcttactagctgcttgagcttgagacaatgacttgacctctataaacctcaattttcttatctgtgcaatgcgggtgaatggaaatgttatggaaatgttgtaagcaaggtaattcatggaaagcctttagcactgtacccaggacacagtaaatgctcaaaaatagtttaaattcctattatcattattgccatctatatgcacaacctctaaatcatgagttgttaccctggggctcaaagatgagtttcaagtagtttgtgagtccacccatagaaattaaatgcaaaattttagttcaatgtgtgtatattatgggagagagtccctggctgtcatcagaagttcagagggatccatatctccaccctgcccaattaggaacttgagacagtattacagaatggtcaagacataatggtcaactctgaagtctgaccacctggatcagccagctgtgtgaccgtaggaagacacttcctccctcccttccttcagttcagttgctatttgtaatatggggctaatgataatacattccccatagggctgctgagaacactcagtgagatgtagcatttcaagctgagaagagtgctgggtgcaaggatgtgttatatgtacgagtgttttttatgcagacacatacacacagcacacatactaatatatacactgcatatacaaatactgtataagtgctaatttttatgatcaggaagcgctgttccaaagcctgcagttgattcatcccaccctactcgttgctcattccctcctgcatccccctctctgccttggaatttcctttccctcggaatttcctctccctcagcgttccctgatcctttgcatcttgaaacaccaacaaagtcagcagaaataatgggcagagaaaggaagaggggaaataatcaaagtttggggctcagaaaccagcctagtagaggggggatgccatgaagctcgagctgcaagtcttgggagctgctaaggccctgggggctggctctgacgtggagttagaagtcagggtctgagtccagctgcagagacaagtgggctcaagagaggcaggtggagtcttgccctagcctagggaggcaggggtctggcgggcttggacgcagcaggatgtggaccagccagggggttgggtacactgcagcacagtaggcatctgagtgtcctggtcctagaatgctcagtcctgtgccgctctctgggaaagatggggcttctccacagtcaggatgggcttggggtctgcaggacagacagcactatctgcagctgagcaggaatggtggagagcgacactcaatcatcaaattagaaacatcacaaattcctggaaatgatagtgaagcaattctgcttggaaggggacaggatcgatggtattggcaagcctgtcatgccctcgcagattcatggagaaagttgtggtgcctccctcagcctgcagggaaggcacaggcgaggatgaatgcccgcaccagggctgtaacaggcagccagagaaggctcgcattgagggatggactccagatacaagctccctcatacatgagttatcccaatgactcacagctctgggtagtgattagagggaaaactattgagaaatatatatttactccagttctacacttgagaatgaaacacacatcattagccataaaagtaggattaagacaacagagcattatttgcaaatgataaacagacatgggcacagatttaaacatgtacaaaagatgtaaatctgagcaaggaatgcttagttctattgctactgaaggcagttcttatgtgctgcctggattaggtggggggtgcattcttacatggttactctccattcaacaaactctacaaaggatgggccaacggcttgtacataagaaaccaatattctgccattctagggagccaggagccccaggggctgccaggaagagcctcagggattatcctgactagtccatgagccagtagcaccagcatcacctgtgagctccttggaaatgcatctcagactgaatctgattgtgcacattcacaaattcccagctgatttgcatgtgtgtgaaagtttgagaagcccctttccagagcagtttgtcaaccttttaaaatcagggaccccctatgaagattcacataaaatgactgcctccttcttcaatgtggtttaaaattcaaaataaaatgaataaaaacaagtcaaagtaaaggtcactctgaagatgctttttcaaactgcacacgtacctcccttctggctcccacttacaatatgtgatgcaagaaccactctccatgactccaggaagtcaggattggggaggcacatccccaggtaaagaatgactgacagagagctacagccccactgtgcagatggcatgtctgtagcccagagaggtgcttccctagaagccccaacttctgcactggtgcttcctgagacagggaccctcagttctagacagacacaagtgttagaaatgacttgaagtttgtttccctggaatgtacatttcacagcctgagtgccaccatcttatgtcagcttttgacaacagtcgtcatttcccctaagagtctccttccttcaagtgaacagcctgaagtcctcaagatccatcttgcaacataaagtccttcctcatcctggtcattctcccgtggtcccacttgagtttgtcaatgtccctctttgggtatgggtagcaagggatatacttaaacttttctcttttcttttacatttaatcttacattaatcaaaacatgcattcttattataaaaacaatgtaactatgttgcaaaaaacttttcaatacaaaagattaaaaaattattcataatcaagccatcctcatacccatgttattattagcatgttgctatatttccttctagtcttattcacctgtgtatacatgcttacatggtaatgtacataataaacagataattctgtagcctgttttgttattttttaacttaaacattttttatgctgcagcagtcttgacaatcattagcttcccattccagtgtgtaactgagaactgaactcagttccccaagatgttggtaatggtttggctgtgtccccaccaaaatctcatcttgaattcccacgtgttggggtaggaacccagtgggaggtaattgaatcatgggggcaggtctttcccctgctgttctcataatagtgaatgagtcttgtgagatctgatagttaaaaggggagttcccttgcacaagcttgctctttgcctgctgccatccatgtaagatgtgacttgctcctccttgccgtctgccattattgtgaggcctcctcagccatgtggaactgtaagtccattaaacctctttcttttgtaaattgcccagtcttaggtatgtctttatcagcagcatgaaaaatggactaataaagatggtttgaccagttcagaggaaaaagagaacagtttctccaccaatgctttcacatggcagcctgcatgacattgttcatcttgcaccccccagggcctcataaatgtggcaactctttggaaccccttcttttactctgtactggtgtcatctacttttagggaggcctaaatatacagggtattcaactatttattcattcattgggcaagaatttgctgagaccccccatgtacaaagcagtgtgctgaggtctctgtctgcagtggtgaacaagacagctctggtcccgtgagttcatggaacttttatggtggtgacctcagcaaagcaacagagcacaggaagggaaagagacagaaatccagtaagaacccatcacaggctaaccgtgggtgcttggcttgcatacatcagctcaaagaatcttcacaactcttttgcattgctgatgaggaaaaagcagttcaagggtacttgtccaaagtcaaagaggtagtaaatggtaaaggcaggattcaaccccaggagtgcctgactttaaagctctttctgaattccctaaattcacatggagactataagatgctctttctctcctgaccctccagtaagctctagaaattttagaaggccattatgagacactcccaacaatgtgcttcaattatttcataaaagaaagacaaaaataacagaatactgcctggtctcagaggtgtgattagatttggagaaaggaggggaaaggggaccttttctgcagaagcacatccaccaggagcatgatttagacaaaagtgtgatttagataccttatttttcatttgaccagccaacaaacatttgtgcaatttaaatcttttcagaatgactctgacaaccaagtatccacgggttgactcagtctgcttcttatcaccatcagactttgaaaactccacctcccccttcataattactccaggcaatcagcaccaactgatcaatcaaacaaagaaaattgcaggtttgaagctttaattaaatctatccggcactatctaattaaagaaaatctttactcttctacatactccaaaatagaagaagcccactcctttggggttctacaaataatttgccactttgaggccttcacctaacttacactggaggaagagtgcagtggagaaaagacagccattccctcttcctttacttcttgcctaagtgcaggcaaattccaaacatggaaggagacaggactgtagaatcccgtctctggtaggtttcctctcatctatctctgtcctttagggtagatgggtcctttttctggctgactgttgcccaaggcctttctcccgccctccacaggctcctgtggctggagggcactggctcagagcagggagaaaatgctaagaactcagccacaccttcttagcatagggcttatgagccattctgaagctcagctttctcctctgcaaaatgggatgaatatgacacttcaattggattgttgggagaagtcaataacataatgcgcctgagaagccacaacaatcaaacggaattgagaggagtaacactgggcacttacatgggtggagctttgcggtagtggatacaaatctgcctctgtctgcaagaactctttgtgtctgcattcccccacccccacccttgcagaccaaggcaggtttgaaaatatccactactgcaaggcttcttgcagaactagaaagcttctttattgtccagatttctttatctctggatggtgaggaattcctcttataactgaaatccagctaaactatcagagccaagatgcgtccccgttcctctttactttgtagggtttacgtaagtttaagatttgccttgtctttgatatgtagctgtggaactttggaggagggagaagttgtatgcagctctaccagcttgccagggcatcacaaaagcccctagatccctagttaagagccctttgggttaaaataatcaaattggaaggtggagtcaattgttcacgcttccttccttatgagacttaataaggcagccattgcttatggaaggacaaaggtggcagtgatgatgcgagagactgaactggcacagtgaaagactgccaggtgcagaggagctagccactataaacttcgtgaaaacatctgctcctccaggcaggattgaagatgctgcattgccagtctgcaagatgctaggggcatcacgtggtcagaaactgcttccatgaattcaacagccaggctagtagtctatactgtctacagtgtctttaccatgtcatctaggcaaacccagtcagctgcagctcctggggcaactggtgcagtaatacgtgaggtctaagtttacataaaagtttatttctcacttatgtaaaattcaatcaatcagcagcagataggggaggaggtgggttctgctccatgcagtcatccaggcatctaggcttctctcatctcctgtcccagggaaagatagaaagagaggattgcagaggaggctttctgcccagacctggaagaggcacacatcatttccatctaccttccactaagtcatatggctccatctagatgcaagggggcctaggaaaatattgtccctagctaggcagctgcttcccactaacacctacactgtggaaaaggagcaagattgatggtgggcaattagccttctctgccacactgcttaacgtgccattggaaaataaactgttcgccaaagacaactgctggaattgctgaaacagccaagagcagtacctacgtagagtagaaagaatcccagaagctcagggatattttatagtccttctatatgcatctccagcatcattcaatcacacaatttcagagctggaagaagctttggagttcctctagatttaaatcctcatattgtaagtcaggaaaacgcagatggccctgagaaggaataggacttagtgaagatcacaagcaaaccagtggccaagctgggacagaacccagctctccatgcccctggtctggctcttggcaccacatcttgtgacagagtagaaattgatgcagtagcaaaaggctggcctcactgtttatgggtagttgtggcagtagacccacttaagggtacaataatttggctcttttgtcacttaaaagtcgagaattgatttagttttagatttactttaattccaagagaatgagggactcaatacttgggaagtgtttatttgggtaccgtgtctgctgaaaaagaaacagagggaagactagaatgacaagtccaaacctgcctccaccctgcagacaccagggtcccttgaagagcaaattctgtggccccagaagttcagggagtaagagctgaggatatagaagggggaaacttcctatctcagcaacagtgctgtcagcagccacttggaagagaggggccgatgaggatctagaggtggccaagtctgctctaggggaatgttgcgtctttgaccaatatctcatgatactgcaggcaggaccaattgtgagaagtgatgcaggcagcacagccttttggactgagactctggctccagggggtgttaaattttggctgctattaaacagcagacttggtgaatgagcaaggtgaggctttgccacaaatattgattttgaccttgaaccacagggtcctactgtgagtggagagattgctcaggaccccgacactgctgcccacctggctttgtgtatcacctgctgccaacccctcccccaccacgtctgcccagaccctccctttggcattagggatggagcacatggctgccccatggggtcactgcagttggtttccagagcctcatccctggcagaccccactcctccccttccataacccccttcggtgctggtcaggtggtgctgacctgtgtgaacttggatatcaagcagataccagggtcccaggtatccagcctcccactccaaagcctgctttggattgtgaaggaagcagactgcagtaaccccacaaaacaggccacttccctgtcccaagaagccctgcccagcaatgatcagcgggttttgtcttctgcacccctcttcctctgcctccttattaaccacagctaactttcctgattaactacacagctcctaccaacaggtttgcctccggatggcaaatttgccagcatttagggtgaatcaaacatatttacttttctgatgttaggggtttgataaaatccataatgcctttggcctcaaacccacttcctattaattattaaacccttgtgtgtttcaagggtaattgaatccatgtttctaattagtttacacttaattcatcagaacaatttttaaaggtctgatggatgtcccaataagcctcatgggcagtttaatgaatccttatttaaaaagaaattggacacacaccaaactgttaacagcggttacctctagggagtgaggctgggacaagggcctgggaaaggaggcagctgcatttttctcactctatacactgctgaccttcttaaagcagaaaatacctattacatttactattttagagaaactgcttaaaaaggaaaaaggaatggatttttaaaaggaaattgaatgaatgaatgcaaataaatccaaagcaatgaaaaggcattttggtatagtgggggaaagccttgtttctggctctaggagacccctggcccacccctctttagccactatgttagtccattcttgcattgctgtaaagaaatacctgagatgggacaatttataaaggaaagaggtttaattggctcacagtcccactggctgcacaggaagcatgatgctggcatttgcctggctcctggggaggcctcaggaaacttacaatcacggcataaggcaaagggggaataagcacatcacatggcaaaagcaggagcaacagagatggggcaggtgccccacacttaaataaccagatctcatgagaactcactcactaacgtcaggacagcaccaagaggatggtgataaccattcatgagaaatccgccctatgatccaattactacccaccaggccccacctcccacattggagattacaatccaacacgagatttgggcagggatacagagccaaactatatcagctatttggcagcttaggggccttacatgcttgcttaacttctgcaaagagaattaatactacccacctcctaaaggtgttgttgaattattagataatgtgaacaatgtctatttaaaacctttcattgtgaaccatctttcttagaaatgtatcgagctcctcagcagggcatacagggtccctggtggagctggcccgggccactgctccaccttcccactatacaccagccaaaatgaacctacccattgtcattctgcacctcacctttctctcacttttgcctagacctatgcacatactatttcttggctcgaaacactctcatccctccttccacactctattagggatctcttcctccagagagcattgattcattcactccataagtatttgtttagcatctgctataagccagactctctgttaggccctggagagctacaatgaaaagtaaaagagaaagagttcttgtcatcaaggagtttacagccttgtggggtagatgggcataaatgaagaagacacacacacacacacacacgcgtgtgtaaaaccacaaagggtgaatgcatggtaatctgagcaggtatcacaggagggtttgaccaggttgtgaggaaagggtgtcctgggcaaggaagggacaactgagttacttgaggaatgagtaagggacaactaagcaaggggcagatggagggggttcatcccaagcctccagatgagcatccacaaagatctcccccaaggcgaggtcaggttccccagtcatagcacttataccctgattatttaactgtctccctaaagatatcgttaagttccttgaaggcagaagctgtcttgttaactgttgtgtctctgatacctggcattcctgttaggcattcaataaatgtagaataaattaccatgagagcatgaacacaagtgtccagcatggtggctggaacataatagccgttcagtgtcctcattcctttgttctcctttccagtgtcccctctctgtttcaatcctgaacaaagacttttccctcatccccatgggtcctcccagcctccttctgcccacaagagcacattcccagaggcattctggagagcagacccttcaaggacgtccctattgatgtgcaaggcacaccttttaaggaatccaaaaaacaggtcctttgggggcctctgctgtgatacatattcataagaagacagtaaatctggcaaatttgtggatttttacaacttccaaaacaggtgtctgacgccagttgagtgaaatctgcaactagctccaaatgactaaaactacattgcaccttaggctgatgacagaatgtgtatttccaataattgagggaacgagttgtagtgtttcccataacttgagcccaaatgtctaaattaagagatgcttagctgtgcttaactggtgcagtcatcaccagcaccctataaaccctccaatatacgggatgcagtttattagcagcgtcttcatagattatgtttgctcgtgtcccattagaaaacttcattccacattaaactgcaatgcaataggatgtctgccagcacggagaggccatctaattgtgcaaaagcagagacgtggggattgtttcagtaattcatccaggcagggctgacactgcattatctggaaggctctttgttcttttcttgctaatttccaaactcctacaggctcccggccttcaggaccagctcctactcccgttccccaccctgatccattatgagaagaatctgatcagcttctattgtaaatttaatttgaagcagccagacgctgccttctggcaccctgggatgtggttgcttgtgaatagctccagatgaaatgtgagatgctttcaaggagatggctatgaactcctggtagagaaagggagtcattgggagatgaatagcatctgcatatagaacaagctgtgcgcagtgtgtctattggcaccttctcatcaatgatgccaggtgaagctgccagtacatagcatcagtgagaagttcccattttgctgagaaggaaactgaggcttgaatgggttgactcacttgcccaagttcacagacatagaaagaggagtaaaacccaggtatgtcttatgctaaaggtatgaacctctcaaatcaatccacctcacggtttttcaacctcagctttactggcatttggggacagataattatttactgtagacagctgtgctgtgcattgtgggatgatgtttagcagaatccctggcctcaacctagtagatgtcatcagcacctctccacttgcagttgggacaaccacaaatttctccagatgtggccaaatgtcccctgggggacaaaactgccttcagttgagaaccactgctctacctcatgattcacaaattattttgtctttttgctaaatagtgctttctaatttttcctataaatgtaggagtattccttttgtttctatctcatcataattaaagcagtttacatactgttttaatttaatcttgatcaactaacctataaggtagatcttgatacaccccgtttatcaattagcatactgtggatatcagtgaaagtgacttgccaatgctatgcagctagggaggagctggagagcaaactcatgtcatctactggcaagactggtgtatattccactgtatggctctgttacagcaaagcaaaaaaaaaaaaaaaaaaaatatatatatatatatatatatatatatagaaggcttgactcccatgactcccagccttaaggagcttagaatctaataggaggaaagttcatttctcacaacacaatccaggagcaagcagctggagaaaggtgaggttaaagggggctaggattggggtagggaggtaacgtttcagccttttgttggaacgcatccataaagaaagaagaccagagtgttggagagaagagaagagagatgccttaaaaatgcagtgaggtcacgcctgtaatcccagcactttgggaggccgaggagggtggatcacaaggtcaggagatcgagaccatcttggctaacacggtgaatccccgtctctactaaaaatacaaaaaattagccgggcgcggtggcgggcgcctgtagtcccagctactcgggaggctgaggcaggagaatggcgtgaacctgggaggcggagcttgcactgagccaagattgtgccactgcaatccggcctgggctaaagagcggaactccgtctcaaaaaaaaaaaaaaaaaaaaaagcagtgaggacactttgggaggccgaggcgggcgaatcatgaggtcaagagatcgagaccatcctggctaacacagtgaaaccccgtctctattaaaaaatacaaaaaattagttgggcgtggtggcgggcgcctgtagtcccagctactcgggaggctgaggcaagagaatggtgtgaacccgggaggcggagcttgcagtgagctgagattgtgccactgcactccagcctgggccacacagcaagactccatctcaaaaaaaaaaaaaaaaaaaaaaaaaaaatgctgtgaggagactccaaaagggaggagtttgggaggcagtgagggttgaaaaactgcctattgtgtacagtgctcactatttgggtgatggatacaactagaagcccaaacccctccattgtgcaatgtatccatgtaaagaaccagcacatgtaacctccgaatctaaaataaaataattttttaaaatgtagtgaaagcagtaattgcaaaacttgtactcatgaaatttttttttatttttatttttcagagactaggttttactgtgttgcccgtgctagtcttgaattcccaggttcaaacaatcctcttgcctcagcctcccgagtagtagctgggactacaggtggatgccactgtgcccagctcattaagttttagacaataaacatggaaatcccccaggtgatgcaggcagagaaaaatctgctgcaggcctcttggtggtctggccccactgtctgtgtgggaagggagaggagaggaggctatcatgggatcagtaatgccatgatacgtacacattacatacatacacatgatacatacatgcacaattaatgactgttcctgagctcagtgactccttcagtgtctttctaccacacctgaaattcccagtctaaaatgtctgatgagttggccacagatgaagtgtcatcacaggcactagaactctctggaaaggtctgagttactgagtcctaagaacagaagggcaggaaaggacgtaaacaatgtttccggaccacgtaagcatctatagctggtggctcacatacaacaaccctgtaaggcgggtaaatgtcacctccattttatagatgaggctcagagaaaccaaaccttgtatgaggtcatagcattaataaatgtagagcctagctaggtataaatctaggtctgtccccactgcacccttctgtctcacaggaaaacactgagacaggaggtgacctacctgctctatctaccagacaagtgaagaaaaatgtcagtgcagcaaatatcctggtaggccccaagaacacatttcactggagactgaaattcactgcagactgatttggtttgttttctgtttccaaggcagacactgcggagtcatcctccattcctttctttttcttactcccagtccactgtccctatacatccactactaactctggggataactctttcccatagcatcatacacatccatgccatctttacccttcattgctttagtccagactactgctgtctctttccttgccccacggtcgccagtctgccctccaccccagtgcattttccacactgccaccaaatcatgccaaaatcctctgcttaaaaatttttattagaagggtatccacaaaaaacctacagataacatcatacttaatgctaaaagacgaaatgtttttcccctaacatcaggaataagtcaaggctagccactctgaccatttctattcaatattatactggaggttctagacagcacaatcagggaaaaaaagaaataaggggtatcccgattggaaaggaagaattaaaacttttattcacagatataaacgaactgaactaacaaattcagcaaggtcacaagatacaagatcaatttacaaaaatcaattgtatttctatatactaacaatggctagtccaaaaacaaattttttaaaaaacccattcacaatagcatcaaaaagaataaaacttttatttaaaaaatttccatgtcaagatgaagaggaacgataacatgttaaactctgccttgcctgaccccctaaattctcatgaaaatgatctaaagtatataaagagatggaatatctacattaactttggaaaccaaggaatacagatagatacctacatgctacaaacacgaagaaaattctacaagatagagtcagtaagacctacctaagacaaaagctagctaggcaggatgttgacagaaaaatacagcttaaaacatgttctaaagaagcaactttaagcactaatagaataaaaatcacagaaaaaacaaagacaacttgcactagaagacagataaaaggaagtaacagtaaggacgcttaaaagtaatagaaagcattaagtataatagaagagcaaacatatcagttgttaccaaaaaatatgagtgaactaaattttcctgttaaaggatagtgactcttagccaggattttttaaaaatttaactactgtgtatattgtgctaagaactattcctaaaacaataatatagatatattaaaaatagagaaattggcaaaaatggacccaatcaatgcatatctgaaagaaaaaaagagtgtaatattggtacaaagtagaatgtaaagcaaaaaaaaaaaaaaaggagagaatagggaataactacaattttcatattggaaatatatatatacatatacaaaattcactctgaagatctaatgtttgaaaatatgaatgtgctgaagagtataggatcacagtatataaaataaaaacttaggaataaaaggaggaactgatataaactatagtaagaatgtgagagcaatatattgcctatccgcaaatatcagttaggcaatagatatgaaattagaaaaactgaatgatattaataacataattttttcacctttcatacacagaatatctttcttcatagaatactgacaaaaaatgatcttatacagagggaaacaagtcaacaaattctccaaagtagaaatcataatctaatcataatgaaataaagctagataataatttctaaagtataaacaaatattacttcaaaatttaaggggaaaaccctagagtcaaagaaagaacaaaattgcaattagaaactctttctaaaataacaactagccataaaaatttatggaatgtggtcaaagctatacttaggggaaaatgtctcttaatgtttttattatcaaacaagaaataataaaactaatttaatttacaaaattggcaaaagaacaatattagcctaaggaaagtgagagaaaagaatagataaagataaaagcagaaatcaataatttagataaaagagaataaaatggatcaccctagcattggaactttaaaaagaccaataaaataggcaaacttctggcaagactaactgagtggaaagaaagaaagaaagaaagaaagaaagaaagaaagaaagaaagaaagaaagaaatgcacaggagcagatgtgagaaagggatgtgacccagacaccatggagaaagaaaggttgagtgggaaaacagtgtacaaccttaggataatagacttgacactctcaataaaatgggtgattttattggtgattccctggactaacacacacacaaaaatgattcatgaataagaaggaaatctcagtagattaaaaatcatgcaagaacattaaaaaaaaattcacaaagacccaagggtccccaccaagcatgcttgctgctgcctctccacacccccagagtagcaccattccagtatcaaggacagcatcttccaatgttacttggactgtcctctaaggtcatttcccctcctatcatcctccgaggtgtgagctcctctggttccaggtcaataaaaggcagtggtcgtccctctccttccccctccccctccccctcccgctccctcttcttcgtctcccgctttccatggtctctctctgttgccgaggctggattgtactgccgtgatctcggctcactgcaacctccctgcctgattctcctgcctcggcctgccgagtgcctgggatcgcaggcgcgcgccgccacgcctgactggtttttgtattttttggtggagacggggtttcgccgtgttggccgggctggtctccagctcctgacctcgagtgatctgcccgcctcggcctcccgaggtgcctcgctcactcagtgctcaatgttgcccaggctggagtgcagtggcctgatctcagctcgctacaacctccacctcccagccgcctgccttggcctcccaaagtgctgacattgccgcctctgcatggccgccaccccgtctaggaagtgaggagcgtctctaactggctgcccatcgtctgggatgtgaggagcccctctgcccagccgcccagtctgggaagtgaggagcgtctcttcccggccgccaccccgtctaggaagtgaggagcgtctctaactggccgcccatcgtctgggatgtgaggagcccctctgcccagccgcccagtctgggaagtgaggagcgcctcttcccggccgtcatcccgtctaggaagtgaggagcgtttctgcctggccgcccatcatctgggatgtggggagcgcctctgcccggccgccccgtctgggatgtgaggagcacctctgcccggccgccccgtctgggaggtgaggagcgtctctacccggccgccaccccgtctgggaagtgaggagcgcctctgcccggccgcgaccccgtctgggaactgaggagcgcctctgcccggctgccccgtctgagaagtgaggagcccctctgcccggccgccccgtctgggaagtgaggagcccctccgcccagcagccgccccgtctgggaggtggggggcgaccccgcccagcagccgccccgtctgggaggtggggggcgcccccgcctggcagccgccccatctgagaggtgaggggcgcccacgcccggcagccaccctgtctgggaggtggggggcacctctgcctggccgccacgtctggggggtgggggggcccctctgcccgtccaccaccccgtctgggaggtgtacccaacagctcattgagaacgggccatgatgacgatggcggttttgtcaaatagaaaagggggaaatgtggggaaaagagagatcagattgttagtgtgtctgtgtataaagaagtagacataggagactccattttgttctgtactaagaaaaattcttctgccttgggatgctgttaatctataaccttacccccaaccccgtgctctctgaaacatgtgctgtgtccactcagggttaaatggattaagggcggtgcaagatgtgctttgttaaacagatgcttgaaggcagcatgctcgttaagagtcaccaccactccctaatctcaagtacccagggacacaaacactgcggaaggccgcagggtcctctgcctaggaaaaccagagacctttgttcacatgtttatctgctgaccttctctccactattgtcctatgaccctgccaaatccccctctccgagaaacacccaagaatgatcaataaatactaaaaaaattaaaaaaaaaaaaaaagaaatcaaggaagcagagatagaaaacataggcagctctttggagaattgtctggcaaagggagcagagaagtgaggtggtatttgatgaagaatgtgtggttagatcacacacacaaaaaagtgcagcatggaaaatgctgctaggactcatctgatagaaccagagaggctgagatgtaggaaagaggggcccccaaagaatcttctagctctcgctctttgtcactctctgttcaaccctatatatctgtgttttaagtgatgattttttcccttattttgttcattgttgtaaattaattatgagtggaacattcaatagatttctcaaaatcaaaattaggttcatttttcctaattcaacttctcagtccactgaaatattatttatccctgggataaagttctggccctacttaaaaatgatctgagcttgggcaagtgacataactaagtttgctacagtttcattaaaataggcttaatagtaacacttaaccataaactgttttaagacttaaatgacacactagtagaccgggcatggaggctcatatctgtaatcctagcactttgggagatggaggcaaagtggatcacttaagctcaggagtttgagaccggcctgggcaacatggtgaaaccctgtctctacagaaagagtgcaaaaattagccaggcgtgggggctcatgcctgtagtcccagctacttttggggctgaagtgggggaagtgcttgagtccaggagacagagattgcagtgagctgagattgcaccactgctctccagcctcactagtaaagcatgtagaacaatgcctgatacacattaaagactcaataaatattagctgttgctgtggctattgttgtcatcatcaatcaaaaaaaaaaaggcagtggtctccttctagcccttcccctttgctaagcccgtgtgaaatgaattagaataagcagatcataaagatgacagagatcaggagcacaagcagggaaaacccaatgaaggttcaaccccagagcctcatcctcatggctggttggccaggaatgctgtgccgtggctggggacacatctgattcttctgcatcctaaggacaagaggaagccttccctgccagaaccacttctccaggtcatggaaactcccacccttccatgctagaacacaggccagaccagtctctgctgagtcttccatacttcctctcagagtcagaaaacccaagtgtctaacaccaaaagcaatggtaacaaaagccaaaattgacaaatgggatctaattaaactaaagagcttctgcacagcaaaagaaaccaccatcagagtgaacagcaacctacagaatgggagaaaaattttgcaacctactcatctgacaaagggctaatatccagaatctacgatgaactcaaacaaattgacaagaaaaaaacaaacaaccccatcaaaaagtgggcgaaggacatgaacagacacttctcaaaagaagacatttatgcagccaaaagacacatgaaaaaatgctcaccatcactggccatcagagaaatgcaaatcaaaaccacaatgagataccatctcacaccagttagaatggcgatcattaaaaagtcaggaaacaacaggtgctggagaggatgtggagaaataggaacacttttacactgttggtgggactgtaaactagttcaaccattgtggaagtcagtgtggcgattcctcagggatctagaactagaaataccatttgacccagccatcccgttactgggtatatgcccaaaggattataaatcatgctgctgtaaagacacatgtacacatatgtttattgcagcactattcataatagcaaagacttggaaccaacccaaatgtccaacaatgatagactggattaagaaaatgtggcacaaatacaccatggaatactatgtagccataaaaaatgatgagttcatgtcctttgtagggacatggatgaagctggaaaccatcattctcagcaaactatcacaaggacaaaaaaccaaacaccgcatgttctcactcataggtgggaattgaacaatgacaacacttggacacaggaaggggaccatcacacaccagggactgttgtggggtggggttaggggggagggatagcattgggagatatacctaatgctaaatgacgagttaatgggtgcagcacaccaacatggcacatgcatacatatgtaacaaacctgcacgttgtgcacatgtaccctaaaacttaaaagtacaataataataataataataataataaataaataaattgtacccttccacactaacaatgataatcacgtttgcattatacataattattttcttttggtggggggaatatgtggttttctttgacagcacaatcagaattacattatggcagactcatcacaaatgtaggtcaaaaacagttcaatttcctgcaatagttggtagtcaattctaaaacaagatggtgagaggagacagaagattttttgaggtttagggggaaaagagctgaccatttgaaagtgagatatgaacccctttctttgtttaattctggtatacttatttttactgctgcttaactgcctattatttaataaaaattagaacgtcattttatttataaacagacttgtaaacaaagtccatctcttggtcagttagtttataaatttgtctgaggtgaacaaagactctttacttcttccccactaggaccacacaacaaataccacaaacaagactgctctggaaacacttcccacagactgtgtgagaatgtgtgtatggggttgtgtttctgtatgtcaatctccatttcaaaaccaaattgaatttcttaattactgtggcttatgcaaatgaaatcttaagtttcctggaaaaaaaaaaaaaaagaaagaaagaaaaccaagtgtcagaaaacaaagactcgaccacacatgtggggactctgccttaagagcaggacaagcttaaataactccagcaggcagaattggagaatttgcctctagctgtccatacctcaatcagtgccccattggtttgacctgactttctatctttcaaacatgcattcaacattcatcaaaagtctacacaggtgccccatagatggtgtcacatgagctcaaaatctgatggagaagactggctcccttgtgaccacatccagtcttacgttttaggcaccatccagtcctagtctcccaattttgtatctctagccctgacggccttgaactcaaaaaccacatattcaagtgcacgttaagtgccttctccacctggatatctaatagacatctaaaattttatagggccaaactgaatcttaacttccagctcctcctgttgctgtccccatctcaggaaacagctacttctttccataatcattaaggccaaggagactggaatcatcctcatctcctttctcccatagcccacacccaatgcaacaacaaatcctgtccactctgtgtttggaatacagcacagagctggccacttctcatcatgtccccacttccaggagacccaagcctccttcttctctgccctgaacagcagcctccagcctcacccctttcactccattttccccacgatggcaaaggcctgtcacagcaggtcccttttctgctcagaaccctccaagggtttcctgtgcctcaggatcaaggccaaagtccctgcatggcctatgaggccctgcaggatctaccaccttctgccacctcccagcctcactttttcccttccagaactcctacccactggctctgctctagcctctaaccactgacctcctgcataccctcctttgcttgtgagaggaattcaaactagcagagcataaaaacaacacctgggatgatctagaatgaggattccaaaactgcaggtcttcctagtcaacatgactggcttggccaaagtgggctctgccacagcaagaccatcctccaaacggtggccctgtaccctttacatttcctgtgcccttagcctagaagctttccctagatacctacatgggataccacaccatacatgatattccatgattcagctctctgctcatagctctctttcccctgggaaagaccatccctgaccaccctataaaaaccagcaatcacagccataaaaaaggatgagttaatgtcctttgcagggacatggatgaagctggaaaccatcatcctcagcaaactaacacaggaacagaaaaccaaacactgcatgttctcactcataagtgggagttgaacaatgagaacacatggacaaagggaggggaacatcacacaccggggcctgtcagggggttgggggctaggggagggatattaggagaaatacgtaatgtagatgatgggttgatgagtgcagaaaaccaccacggcacatgtatacctatgtaacaaacctgcatgttctgcacaagtatcccagaacttaaagtataataataataataataataataataataataataataataataaagccagcactcctgccatcactttcttaccctgtgtgctttgtcttcataggaccagacatgttagatatttccatgcctgcctccccattagcatgtaacctccatgaaggcggtggctttgtttttctcactgctattccccagcatctaggccagtgtcaagacataataggtacccatgaaatatttgtggaatgaatgattgaagaggactctagccctttaccaatgtttcacagaaccctgctgaacctcaagggaagatgattagcccagtcttttctgggagaagctgcagaaggggtgcagggggccccagatgcccccccgcctctgctgcaggcttcccagactcacttctgcccagaggggaaagagaagagggctgaagactgtgcagtaaatgtgtgtgtgaccctgctgcaggagcttggaggccaagggctgagatgcatcttaaacaaagctttgaggttaagcatttggctgggaaccactcattagtgcatcatgtcattagaagcaattagcacctccggctccccagggcttggcttgtaagccattaaccctttggcttcctgtagagccgggaagccacgctgacctgacctggacaaggcttgtgacagaccctggctggcctccgggtcacctagagagttttgaccctggggtcttcacctttgccccagaaaagtctgccctttctgcagaggttggaagccttcctcccatctccctcctgtaagctcttccccttgggagtcagctcaggggtacaggaagccatcttactctctccatggggatctcttccatcacagggatgggggttaagagggtgagaactcccccaaattccagagtctacatccacaaccaaggccttggaaatgcaaagcaaagtccagaaaagtattgatggtttcaaatactgtgacgcaagacatattcactgcatcactatcagccttcaacacccatatctgttggttccaacttatatttctgtgtgtacaaataatacaccctgtgcatgaaaaatcagtttcaaaagaaagagctgaatttgtctagaaccctcttgtgttttctctctagtcttcccaaatgtcctactcatcaatcctcccaaccggaaacctctaagcaagagacatgaattggaaaaccagaggggttgagggaggacatcatgaaaacagtggtctttgttgatgaccataaacttttcactcgagaaagatcttcctcctagtgagcttggctcatagcccagctgtttgctacagggaaggtgggcagcatggtacctcgtacgcagattctctggctggggtggaccatcaaacaccgacaggacatcaaagtcctcttccagggcaaaggactggaacacaagctggattctgtgctgctcttccgcggtgatggtccacgtgcagttggcgtaattggggtagccatatgggaaccctgggctctcaactgtcccattgggaccgtgcagttggaacgtgcagttctggcctgggaaagagaaatggagcagttcagaatagccagaataactcctagaagcttctagagagtcaggagcaatgtgttagcaaatcatgaacccacttttccaagtgcttcccatgagccagccctgtacttggcaccgagggaggtacaaagggtgactaacgttgattgtcggcttgctgtgcgctgtgtactgaccaggtgatacattgtgtatcatttaatcaaggcttacaacaactctatgcagtagaaaattaaggctttgagaatctgaactacacagccaccaataccaggctgaactcagacttcccctctacaacatggaatgtcagaaccacaatttcaaaccttctccattgtctgcaacctcctggctctcagctaattcctctccctcactctccatagaaaataaaagccattcctaaggattcccttgtcttcccaattccaaacccttctagcctatcccatgctgtcttcattcctgctacagaggagctacctcttcctccatctaaatggactcttgccaagagtctcgactcttccctactcttcaagaacagtatacgttcctgtttctttctaacgtgtgttcagtcatttcctctccactagtatcttctcattttaaatgtgctcaagactctatcgttaagaaaaaaattccctaccccactcctcgtctccctccagccttgtctctctctccttcacagctaaatttatagaaaacacaatctgtctatactttctgtctccatttccttacttcccactcactctccaaccctgtcaattctgccttctggtcccattgatccacccaaacagatctactacccatgggctcagtggctatttttccgttttcttgttaatttactgctcagtgcctctgactgctcttgctcaccctcctttcagaaacactcctccgggccagagcatctcagacctcactgtgcacacgcatcacctggggaatctgtctcaaatggagattcagatcgacaccggggtggagctggagggactgccttcccaccatgctccctggtgatgtgatgatgccctctgtgggaccacactttgagcagcaatgccctgagcttcctcccacaataccatactcctttcctgctcctgctctttctctgcctcctttcagtctccgtgccaaggcctctgctcctctctccgatttgggggacttcccacttgtgcattggttactcacaacgtcatgatccaggccagccatccctctgtgggccaggcccatcacccctttgggatgctctcgatgtccccccacccactctctcctcttctgttgcctaccccccaactcagtgaatggaatcatgcctccatctctttatctaagtaaggctcacctagaagcttcctcttcttcacaaccccatggctaatctaccactctatctctatctccgtctgtccccaccctacaccaagctcattcctaaactgccgtattaactcctaactggtcagccacatttgctctggtccttgccaatctgttcttcacactgcacgcagaaggtggtgaggtcatgccaacctcccaaatgccccaaacattcaatggctcctccttgctcttcaataaggaaaattaaagtatacaaggctttccacatggcctggcccttagtgacctcccagcttcatatccaccagctttccagccaaatcctgcctgtttctgtcctttgtatctgccacactcttgcactgcagagccacaggacctttgcgcggttctctctgcctacaacactcttagcatacccatctttcagatctcagcctagtgtccttccttggtcaggtcaagcccactactacacagtgtcatgacaccgtaacttctccttggtggtacttattataaaagtaaatctccatgcttccaagtgattgtttcacaagtatctgtcttctcaccaggctgaatgcttcatgagagcagacaccacatgtgagtttgcccatctttgaatccatgtcccaagctcagtattaggtacatggtaaattctcaataatttaatattttgtttgtatttacttagtgtttggctagacactctcctaaaaactttacctatattgatttgtctaatcctcacaacagccctatacggtagatactattactatcatctccattttacagacgaagaactaaggcagaaagaaattaagtaatggggcccaagtcactgttacacaaaggtgggattcaaacataagtattccacttcgaatccattttcttcaccatgatgctgataaattgactcgacactaatttttttaaagcccattttagggattaactgacaaaggacagttaatctctaaaggactttaatattaagaaatctcttaacacgaagtatcccattaaatgagaaaaaaaaatgttaaggtcttctgaataaatcctaaacaggcatttcataaaattaggcatgtaaccctgattaaaataagcattcaaaactaggaaaaagaatatttccttactatgataaagcttcaattttagaacaatactctacattgtacttaaggtgaaacacctgattaagattgggaacaagacagaggtgccaccatcacctctgggatttcacggcttattggaagagttaacccatgtgacacaagaaaaagaaatgagaaaagaggaagcaaaattatggtttgtagatgatacattaatatacctagaaaacccaggagaattcattataaagctattatagataatatgaaattttaataaactagccaaatgcaaaataatatacaaaaatcagtaacattcctatatgtcaatgacagataaaaatataaagaaaaaagatcttgtttatggtaactacaaaatgcatatagtacatataaacttaacaagaagtgtgcaggcacgatatgaaaatgacttttacagagggataaaaaatttgaataactggagagacatagcataatcttgagtggatacagaaaggttaatttatgatattaacctcttgacaagttacagaaaagttaatttataagtttaatgcaattcggatgaaaagcccaatgacccgttttaagtttggtaaaatgatacctaagtttaactggaaaaatagattgtcggggggaggagccaagatggccgaataggaacagctcccgtccacagctcccagcgtgagcgaggcagaagaggggtgatttctgcatttccatctgaggtaccaggttcatctcactagggagagccagacagtgggcgcaggtcagtgggtgcgcgcaccgtgcacgagccgaagcagggcgaggcattgcctcactcgggacgtgcaagggggcagggagttccctttcctaatcaaagaaaggggtgacggacggcacctggagaatcgggtcactcccacccgaatactgcgcttttccgacgggcttaaaaaacggcgcaccacgagattatatcccgcacctggctcggagggtcctaccccacggagtctcgctgattgctagcacagcagtctgagatcaaactgcaaggcagcagcgaggctgggggaggggcgcccaccattgcccaggcttgcttaggtaaacaaagcagccggaaagctcgaactgggtggagcccaccacagctcaaggaggcctgcctgcctctgtaggctccacctctgggggcagggcacagacaaacaaaaagacagcagtaacctctgcagacttaaatgtccctgtctgacagctttgaagagagcagtggttctcccagtacgcagctggagatctgagaactggcagactgcctcctcaagtgggtccctgacccctgacccccgagcagcctaactgggaggcaccccccagcaggggcacactgacacctcacactgcagggtactccaacagacctgcagctgaggatcctgtctgttagaaggaaaactaacaaacagaaaggacattcacaacaaaaacccatctgtacatcgccatcatcaaagaccaaaagtagataaaaccacaaagatggggaaaaaacagaacagaaaaactggaaactctaaaaagcagagcgcctctcctcctccaaaggaacgcagctcctcaccagcaacggaacaaagctggacggagaatgactttgacgagctgagagaagaaggcttcagacgatcaaattactctgagctacaggaggacattcaaaccaaaggcaaaggagttgaaaactttgaaaaaaatttagaagaatgtataactagaataaccaatacagagaagtgcttaaaggagctgatggagctgaaaaccaaggctcgagaactacatgaagaatgcagaagcctcaggagccgatgcgatcaactggaagaaagggtatcagcaatggaagatgaaatgaatgaaatgaagtgagaagggaagtttagagaaaaaagaataaaaagaaatgagcaaagccttcaagaaatatgggactatgtgaaaagaccaaatctacgtccgattggtgtatctgaaagtgatggggagaatggaaccaagttggaaaacactctgcaggatattatcccggagaatttccccaatctagcaaggcaggccaacgttcagattcaggaaatacagagaacgccacaaagatactcctcgagaagagcaactccaagacacataattgtcagattcaccaaagttgaaatgaaggaaaaaatgttaagggcagccagagagaaaggtcaggttaccctcaaagggaagtccatcagactaacagcagatctctcggcagaaaccctacaagccagaagagagtgggggccaatattcaacattcttaaaggaaagaattttcaacccagaatttcatatccagccaaactaagcttcataagtgaaggagaaataaaatactttacagacaagcaaatgctgagagattttgtcaccaccaggcctgccctaaaagagctcctgaaggaagtgctaaacatggaaaggaacaaccggtagcagccactgcaaaatcatgccaaaatgtaacgaccatcgagactaggaagaaactgcatcaactaacgagcaaaataaccagctaacatcatcatgacaggatcaaattcacacataacactattaactttaaatgtaaatggactaaatgctccaattaaaagacacagactggcaaattggataaagagtcaagacccatcagtgtgctgtattcaggaaacccatctcatgtgcagagacacacataggctcaaaataaaaggatggaggaagatctaccaagaaaatggaaaacaaaaaaaggcaggggttgcaatcctagtctctgataaaacagactttaaaccaacaaagatcaaaagagacaaagaaggccattacatgatggtaaagggatcaattcaacaagaagagctaactatcctaaacatatatgcacccaatacaggagcacccagattcataaagcaagtcctgagtggcctacaaggagacttagactcccacacattaataatgggagactttaacaccccactgtcaacattagacagatcaacgagacagaaagtcaacaaggatacccaggaattgaactcagctctgcagcaagcggacctaatagacatctacagaactctccaccccaaatcaacagaatatacatttttttcagcaccacaccacacctattccaaaattgaccacatagttggaagtaaagctctcctcagcaaatgtaaaagaacagaaattataacaaactatctctcagaccacagtgcaatcaaactagaactcaggattaagaatctcactcaaaaccgctcaactacatggaaactgaacaacctgctcctgaatgactactgggtacataacgaaatgaaggcagaaataaagatgttctttgaaaccaacgagaacaaagacacaacataccagaatctctgggacgcattcaaagcagtgtgtagagggaaatttatagcactaaatgcccacaagagaaagcaggaaagatccaaaattgacaccctaacatcacaattaaaagaactagaaaagcaagagcaaacacattcaaaagctagcagaaagcaagaaataactgaaatcagagcagaactgaaggaaatagagacacaaaaaacccttcaaaaaattaatgaatccaggagctggttttttgaaaggatcaacaaaatagatagaccgctagcaagactaataaagaaaaaaagagagaagagtcaaatagacgcaataaaaaatgataaaggggatatcaccactgatcccacagaaatgcaaactaccatcagagaatactacaaacacctctacgcaaataaactagaaaatctagaagaaatggataaattcctggacacatacactctcccaagactaaaccaggaagaagttgaatctctgaatagaccaataacaggagctgaaattgtggcaataatcaatagcttaccaaccaaaaagagtccaggaccagatggattcacagccgaattctaccagaggtacaaggaggaactggtaccattccttctgaaactattccaatcaatagaaaaagaaggaatcctccctaactcattttatgaggccagcatcattctgataccaaagctgggcagagacacaaccaaaaaagagacttttagaccaatatccttgatgaacattgatgcaaaaatcctcaataaaatactggcaaaccgaatccagcagcacatcaaaaagattatccaccatgatcaagtgggcttcatccctgggatgcaaggctggttcaatatacgcaaatcaataaatgtaatccagcatataaacagagccaaagacaaaaaccacatgactatctcaatagatgcagaaaaggcctttgacaaaattcaacaacccttcatgctaaaaactttcaataaattaggtattgatgggacatatttcaaaataataagagctatctatgacaaacccacagccaatatcatactgaatgggcaaaaactggaagcattccctttgaaaactggcacaagacagggatgccctctctcaccactcctattcaacatagcgttggaagctctggccagggcaattaggcaggagaaggaaataaagggtattcaattaggaaaagaggaagtcaaattgtccctctttgcagacgacatgattgtatatctagaaaaccccattgtctcagcccaaaatctccttaagctgataagcaacttcagcaaagtctcaggatacaaaatcaatgtgcaaaaatcacaagcattcctatacaccaacaacagacaaacagagagccaaatcatgagtgaactcccattcacaattgcttcaaagagaataaaatacctaggaatccaacttacaagggatgtgaaggacctcttcaaggagaactacaaaccactgctcaaggaaataaaagaggatacaaacaaatggaagaacattccatgctcatgggtaggaagaatcaatatcgtgaaaatggccatactgcccaaggtaatttacagattcaatgccatccccatcaagctaccaatgcctttcttcacagaattggaaaaaactactttaaagttcatatgaaaccaaaaaagagcccgcatcgccaagtcaatcctaagccaaaagaacaaagctggaggcatcacactacctgacttcaaactataccacaaggctacagtaaccaaaacagcatggtactggtaccaaaacagagatatagatcaatggaacagaacagagccctcagaaataacgccgcatatctacaactatctgatctttgacaaacctgagaaaaacaagcaatggggaaaggattccctatttaataaatggtgctgggaaaactggctagccatatgtagaaagctgaaagtggatcccttctttacaccttatacaaaaatcaattcaagatggattaaagacttaaacgttagacctaaaaccataaaaaccctagaagaaaacctaggcattaccattcaggacataggcatgggcaaggacttcatgtctaaaacaccaaaagcaatggcaacaaaagacaaaattgacaaatgggatctaattaaactaaagagcttctgcacagcaaaagaaactaccatcagagtgaacaggcaacctacaaaatgggagaaaattttcgcaacctactcatctgacaaagggctaatatccagaatctacaatgaactcaaacaaattgacaagaaaaaaacaaacaaccccatcaaaaagtgggcgaaggacatgaacagacacttctcaaaagaagacatttatgcagccaaaaaacacatgaaaaaatgctcaccatcactggccatcagagaaatgcaaatcaaaaccacaatgagataccatctcacaccagttagaatggcaatcattaaaaagtcaggaaacaacaggtgctggagaggatgtggagaaataggaacacttttacactgttggtgggactgtaaactagttcaaccattgtggaagtcagtgtggcgattcctcagggatctagaactagaaataccatttgacccagccatcccattactgggtatatacccaaaggactataaatcatgctgctataaagacgcatgcacacgtatgtttattgtggcattattcacaatagcaaagacttggaaccaacccaaatgtccaacaatgatagactggattaagaaaatgtggcacatatacaccatggaatactatgcagccataaaaaatgatgagttcatgtcctttgtagggacatggatgaaattggaaatcatcattctcagtaaactatcacaagaacaaaaaaccaaacaccgcatattctcactcataggtgggaattgaacaatgagatcacatggacacaggaaggggaacatcacattctggggactgttgtggggtggggggaggggggagggatagcattgggagatatacctaatgctagatgacgagttagtgggtgcagcacaccagcatggcacatgtatacgtatgtaactaacctgcacaatgtgcacatgtaccctaaaacttaaagtataataataaaaaaataaataaataaataaataaataaaaagaaaaaaaaagaaaaatagattgtcacaatgcattgtttagagaagatagtaaatttagcagtctcatttcacaagatactaaacagcatcataaatgacacttatgaaaatagtgtgggggtggtccaggagtaaacaggtaggacatgaaatggtattgcatgaatatctttaatgcacataaaaatggaaatatgtatcaggcaatattaaaaaaaattgagaaaagaaaaagacttttgctggatcaactaataaactgtttgggaaaagaattaagttatctcctcgaatcgcaccatatacaaaaataacttccagatggagcaaagagttacatggtaaaaaaataaagtcataaaataatgagaagaaaacctaggtaattatctgaccgtgattttttagcataatagctgtggaggatactacaagattgatattaaaagtatgcatatgtcaacaacagaatatcagaaagcatacaaaaatgttaggagaaaagtaatatggtgaatatagaaagaactattactaatacttagggggaaaagtactattagtaataattggacaggatctgaacaaattagttcacaaaagaagacataaatggcccagaagccagaaaaatagccaaccacagtgataatgaaataaagcctctaactccacaactttcagagaagccctgagtacacttccttgaactttccctcactggtacaggtaccagatttactttgctcctgtccctaaaacctgcctggtaatgtcactgcatcatgccattaattccttccttcattcattcattcctctaggatagaccctgtgataagccatggggacctggatcatagactagaaacaagtaaatcaaaatatgtcattagacaataccatgctagaggggtacacagagtggttctgaagtatagatgccacaggggccacatcttaagggcctccccgattcgtgttgtggacaaccaatgaaatatcaacattcaccaccatctccagcatcccagacctctgccttggctcagacctgccaaggacaggagattctgattaagaatctgggtgtgaatggcatcttctgctatagagaaagaagtgaaggagttcagaacagagcctctgggaacatctcccatgtaaggggacagaaaaggtgacagagcagggaacaggtagaatagtcggagaggatccagagggcagttccatgtgggagaggttgactcaatgtggtgaacagcacagaaagactaagatgagggtcttgaatgaggtcactctgtctggtgtctaaatagtccctctggaagcaatgctgagagctggagccttgacctggtccctgctgcatccctagtgcctagaattcaataagtatttgctgaatggatagatcaatttcagcaaaggcaggtgggaggatggcaaggtggaaagagggcagattgtaataggcaagattggctgatgagaaggtggaaggccattgtattctaaacaataacttctacattgtagaaactgaaaaatacaggcaagatttaaaaagagaaaactgattataatctcttccttccagaggcaactgctgttaatattttcatttttctgagatttttttccatgcatatttcacactggtgagataacaccatatgtataattttgtgtgctactttttctgtaagttattcttcaatcttcaatttaaaaaggcaatgtggacttgtaatatgcatagatatgcacatacgcaatgcaagtataaaaaaatatatatgcagtctccctcctccccacccaatccaaaattaccgaagttaacagccaggtatgtgtccctccctcaccttcttctctctcatgcaaaccacacagacacattctgggagaattttgattatttcatttaaaaaataaaactgtagtttagctcatttttctgcaacttgctttctcacttaacaatacaccggggacacgttccaggtcagtagatacagatctaacttattttttatatgaatgtgtaatattccatgccatggatgtatctcaatttattcaaccactcccctgttgatggccattcaggtcatttctcggttttcttttgtaacaattcagtaaacattataacgtgagcattccctaagatactgaatctgttcataaacagcattttaaatggatgcacaacgtttcagtgtatggttatactagaatttagttagccattctcctattgtcaaacatttaaattgcttctggattttttgttccattgtaaataagacctggacccttagttagatctggtgataggatgctggtcaatgcagtggaaaatgcctttccacggccagagtcccagaataaatgttcccctatacagtaactgcctccagctttggtttcaggtggggtcgggtaaggtactgtccacattaggctggctgacctctctcagggatggctagaaagggttagaagcctgactcatttggaaacctccctgaaaccaatgtatgttagtaagttgaagaagttataacccagagcagccactccagattgaaatgtgaatggaatgggagctcatgccagaatggctttgtcctttcatgcccatgaaacgttgaatttctttcaagaaaaagtctacccgttcttcacttctagtgactgatgttctgccctgtagatgggaatgctgctactgacctccattttgacggcaccttgcatttctctctagccaggatggtctgccttctttcacccatgctttgagtttctggtcaatgcagctacccccatcaggctccagaacaatctcagagaactagactcctcaagtcattgctcattcatttgttttggatgatttggatgatttccccaggacagacttccaaatagcagatgactgggtcaaatggtatgaacatttctgaggctttggctctgggttaacaatatcctttctaggaaatgtgcacccattaaactctcaatagttatgtctaggaatacctatctcacagcacctttgccaaccttgtgtattgtcttatttggaaactttttgcctgcttattaggtgcaaaaaatgtgatctcattttacttagtgatgttttatgactcagattcaacatctttttcactttttctaataattttaatttcttctttttggaactagctgatcaaatcctcagctcatttttcattgtggtatttttttccctcatttcttacctacttatctattttatatatgtgtaatatattaatcctttatgcatcgcatgtgctatatatgtgttttgtagttgtttggccttttaattttatcatgtttgacatactgaagtttctaaatgttatatacttaaatcttctattaggtcttactatttttcttgttaatttgtactaactctttatagagtcagaattttaatcttttgtcatatttgttgcaaatattgttttctacctggttgtgtgctttttgttttgtttagatttcccatgtagattaaaatgttcacttttttttttttgagacagagtcttgctctgtcacccagactggagtgcagtggccccatctcagctcactgcaagctccgcttcccaggttaatgccattctcctgcctcagcctcccgattagctgggactacaggtgcccgccaccacgcccggctaattttttttacttttagtagagacggggtttcactgtgttagccaagatggtctcgatttcctgacctcatgatccacccgcctcggcctcccaaagtgctgggattacaggcgtgagccaccgcacctggccaaaatgttcactttctataggcagtcacatttatctcttttttcttggtaatatttttcccttgttcacactgagaaagacttctctcaactaaagattggttggcttctcatctcactcaacataaaagccaaagtcctcaccatagtcctcaaagctttaaatgaatgggtacccagatgcctgtccacctcttctcctatctcttgtcccctcatccctgtgatccaaccatatccctgtgatccagccatatccctgtaatccggccatatccctgtgatccaaccatatccctgtaatccggccatatccctgtaatccaaccatatccctgtaatccggccatatccctgtaatccggccatgctggacctttgcatttgccaagacttcagcccagaaaatgtttccccagtagccatgggacccttacttatttccggtgtctagtcaaatataacctccttggagactaccctaagtacaattcagacctgcttctcaagccaggtgttcctggtgcctgctttatttgttgatagcacttagcacctctgccatatattttcctcttgttaattttctgatgcaccctccccagtaaaatacaatctccatgagagtggggcaccatttttttctctgctctatctctagctcgcagacctgaacctggtacataatagatgctcacagaatagttgttggttgaatgaatgaataaatgaatattaattgcccacctagcattctgtgcttggattgttccttcactcggctaactccaggcattttcaaactcattaccttctccagaaagccttctgggaaccctcaagacaccatcaagtattcgtccactccttgtttatcattcatgatgaatgtcattgccttcatcaatggtgatataatgatatgtttatgtggctgtctctaccagcaaactccttgagctttttttttttttttttttttctttctgagccagattctcgctctgtcaaccaggctggagtgcagtggtgcgatctcggctcactgctatctccgcctcccgggttcacgccattctcctgcctcagcctcctgagtagctgggactaccggcacccgccaccacgcccagctaatttttcacgtttttagtagagacggggtttcaccgtgttagccaggatggtcttgatctgaccttgcgattcgcccacctcggcctcccaaagtgctgggattacaggtgtgagccactgcgtccgaccctccttgagcttttcttcaattttatttccatcacctagcccagtacttgcccatagtagacactcagtacacatttttaaatgaatgagtgagtgaaatgaattaatcttttgtattaggttggtgcaaaggtaattccggttattgccgttaacaatgatggcaaacacacacacacacaattacttttgcactaatctaatattcagaaaatactcaccaacttcatttatctgtgtatttatggtttattttggaagtggcttagtggaaaggttaaaagcataggttttggaaacaaaagctttgggttcaaatttcagatttgccacttaatattgtgtgtgggcaacttatttaaactctttaagccttagttttgacatctttaaaattaacacccacttctaggatggttgtacagattaatgtgatatctgctgagttgctaaatgttcagtacagaacctggcacagcaaacaccacctaatctttcagtaaagattagatgcttttctttaagtcccagtcacatcttgttaaggttattcacagacattttatgcactttttgccgcactagtgaatgtcatttttctcattatttttttctaactggtttttatgatatacagaaaacctattgatttttatacattcatctcacatccagccaggtttctgaacacttattaattctaaaaatttctcagttggttcccttgggtgttttaggtacacaatcatgttgtctacaaataatgataattttaaggagataactctcttgagaagtttggcaggaaaattcaattcaattctgcaaatatttattgactgataaggtcaattttggacaaatttagttggagatgccagtgggacatccagacggagatggccagaaggcagttagggctgtagactggtgtttgggagtgcaatctggactggggatatggatttgttgaagccacgcaattaatgaaactgccctaagaggaaacacagcggggagctgcagatgctggataaatcatcacgcccgctgaaggtgtctcacctgccacacggagcaccagctggacacctcaagtctacaatcagcctctggcccatcactatgcatgccttctggcaggggcaccttgtccgctgatgagagaggcaggggtcaaacagtatctttggctctctacaatgatcctttaggaaaggaccaagaactaggtcattagggatgctggcactgagcctcattttagcccctctcccctgcacagcatgtgcctcagtcacaccactaatttgtcacctgcagtgcttggccctttgcctcatacgcccttccactgcaaccttctcaacctagcaaatctaactcacggtcccaggctcagttcatctcctctaaggagcctcctctagtctgcaggcagttactcttcgctctccgctacccccatctccctatttcgtgcattaagtgctgggtgacacaattatcacagatgtttttaatgaagatgtgcactatttttttttactacagatcttaacaatcggagagatttctgtgaatgtgcagtagtctaatccagggtttctcaacctcaacactatcaacattttgggtgggataattcttcactgtgggaggctgtcctgtacatataggatgtttagcagcgtccctgacctctacccactgaatgccagtagcacctcccaatgtgacaaccaaaatttctccagatattgccaaatgtcccctagggggaaaatcacctctagttgagaacgactggtctaattcttagccatattggagttcctaatgaaagtcagaaatactttttctagaatcacatacataggaagctaaccttctgccgttttcattcatttcaggggattagcaggccaaaaaagcctatccctggacctccatgacctgaagtcctccatctttgtcgtgccatgccctccttggagcctcgtgacaccacctcaaatggtgtcttaaaatatgtaaaacaaaatacatagaattgcaaaggaaatcagctagattgaaatatagtttttaaaatatactgaaaatcgatcatacactaataagtgctcctttattaatgcattattaataagatctagcagtgggcctgatacatattgtagtttgaagcataaatgctacttcaagataattgtaacaactgtaatgttctatggaaatatctgtgatcttaccagtgacaaattcacaggtactgctaataccacttccgtgtttgttgcctatcttcatgattggtagaaatgctgtttcagtaggagattagtgaaaataatgcaattgtcctcatccaagttagggaccccatggattctatcaagaaccccagaggtccaagacaaattcagtctttcagtcagcaaatctggggaatggatggcttagttccagggtttataggtgggggtgttaatgggcagtagggagttgggggagatgggaggggcagattgcatataatatggtccatgccctcaaggagttcacagtggattgtaggagacagacatggcccatcttactagccatctccacgtgacaagtggttcagggaaaccatgctgttcaatcttaggggaacagaaaggagcacagacaaacctagaaggactggtgctttcatgcaagtctgagaaggggccaacatttctgtggttcactaacattatctctctaacatttgcaatgacccttttgaaatggctgttacagccccaccctcatcatattacaggtaaagaaactaaggctcttcaaggtttaaaacatgttcaaggtcaaacaagtagcaatggaaaagctgagattcaaacccagatctgtacaaaagcaaaacccaggctctcaaccctaccacccttccctctgccaggctgcaaatatttcacacacatcatctcaggacatactctcaaagctatagttctggttccactctgcacccagcaccaggggtcagagcctgggatttattgaaaagagcttagcacagttgctgtgcctcagggacctggatacaaaacgggtctcctttttcctctcaagctggggatgcatgcaacaaaggcacaaaacaatgcatggcaggtggggtgaagcagcaagcctgtccctgtaccatattcaattgcttcgtgggaataatcccatgccactcagcttcctaattctaactccaggctttctgattctcctggacatgtttaacacagaagccaccattgcggaccaaacatgattttccctgcatggtgatacagatgcagttcattttccatcatcctaagccaacactagtcaagggttgtttattattttgacagggaatcctggactagcagaagcatctctgctttactgattcttattatgccacagccctggatcagcagcaagagaaagggccaggtatctctggggccaggggcctctgccaggctgattctactcctgtctgggtctttcagagtgaaaacaaggaactaccattgagttctccccagctgagaagatgcctgagctatggctttggtccacgggacaatggctaagcacaggaacagactcatgaaagttgagggcttagcaaatgcttgattcattcatttacttattttgaaaatagtattaagcacccactgtgtcccagtgagtgcttcctgccctcatggagcttacggtataataataataatatattattaaacattttttctgtgccaagtactgtcctacgcactgtacatataataattcattccatcctcacaaccatatgagataggtactattactctccccatttcataggtaaggaaactgaggtctaggaaggttaagtaatctgcccaaggtcagacagctgataaaaatggaaataggaatcaaccccaggcaatctggtgccacatcctgtcttcttaaccactactctatcatagatgatggatggataggtgggtgggtggatggatgaaggatggccaatgtagtaagctaaactcctttctacagcactctcatacagcaaagaacttcaccttaggtagccctttcctcaagtgtcagtcatgtcagttagaactcctaggcttctgtcccattgcctgacatttggggaatgagtccactatggtgaggttcagcacagtggcagaaaggggaccacatggggacgcctgagcacattgaacttcccagaagaaaaagaatcataataactcgggaaataggagtgaattgtcaaaatatgtgaaaccaagcctatgctgctgtttctctcaccatgagaatctcatgagggcaggaccacgcctgactcactgttaaatcccaacacaaggcttggcatttcatagacactccattaatatttgtcaagtaaatggattaatttgtctgcttgtcaacggtgtctttcttttttcttttcatttgtttctttatccattaaaaacacatggctcctgttttatctggtggaactggcctcatccctaaagaaaataggcaacttcaagccctgtgcccttatgtgagacatatttgaaaattaattttaaaaatgagagagagaaaaagaaaacaaaaccctaatgagagagagagaaaaaaaaacccaaaaccctaacatagtgccatggaatcagaaagcctgggttcttaactctgccttgccacttgctagcaaggggtatggtcaagtcccttagtcacttatggcccctgcccctctatctatggaatgaggttctcaagaccacattcacagagatgctctgatgcagctagcccaagtgagttgttggtgcctgactggagcaagagtagccctgtccatggtccggaaccgtaaatgtcctcaggggaggctgtttcttctgctcctaagccaatggggatgcctgtccaacctctcccataatttctgcaccagaagaaaaaggaactacaatgataagaaagtaacaaagagaattggtgagataaaggaatgaagggatagaaagagggaaagaggctgaagagggaaaggggtgaaggtagaagagagagcactgcagctccattcagaatcctgagtgcccgagactctgtcttcctgccttgggccagacggaaccacagtagaggtgatttgacacaggagtcctgggatagggagggcaatccttgcaaggtgtactcccgagatgttcctggcacttattcttcagtagccaatgacacagaggaggacaggtgggaggctaactctctagagatgaggggtggtaagacttgaaatcagaaagcatgagggccagcatcaaggagggcatgacatgtggtcaccagctgttggatgcatcctcttgtttctccatagcagcccaaccccctcattcctctgacagcttcagactggacatctactgggaatccagaaggttcactcatgaagacagtggcagcagatccagggcaagatcaatccagatcattctttaaattaaggcattcaaaggtcatctgcaatttcactttgctttcccaatcttcagcagacgtgttgctcattttacatataaaggaaagggttttgtgttttgatgcccccaactacacgtttgaattgtatgagcactgatggtgatttgaaagttgttcctatcaaaagggagagctcaaatcagctccctctgctcaagcaaattagtgatggggtcagtatggccctggctcagctcagaccagtctagatgccagcaggggctcatcattcaatggacatttggcatcttcatcatgaaacttttgccaatccagaatggtattgcctacgttgtcccccagagtttttacagtttttggttttacatttaagtcttttagagcttctgcacagcaaaagaaactatcaacagagtaaacagacaacctaaagaaggggagaaaatatctgcaaactatgcatctgacaaaggtctaatattcagcatctgtaaggaacttaaacaaatttacaagaaaaaaataaacaactccattaaaaagtgggcaaaggacatgaacagacactttccaaaagaagacatatatgagccaggcacggtggctcatgcctgtaatctcagcactttgggaggccaaggcgggcggatcacgaggtcaggagttcaagaccagtctggccaacatagtgaaaccccgtctctactaaaaatacacaaaaaattagccgggcgtggtggtgtgcgcctgtaatcccagctactcgggaggctgaggcaggagaatcgggtgaacccaggaggcggaggttgcagtgaaccgagatggcgccactgcactccagcctgggtgacagaacgagactctgtctcaaaaaaaaaaaaaaaaaaaaagacatatatgagactaacaagcatataaaaaaagctcaatatcattgatcattagagaaatgcaaatcaaaatcacaatgagataccatcttacagcacccagaatggctactattaaaaagtaaaaaaataacagatgctggcaaggtggtggagaaaagagaatgcttatacactgttggtgagagtgtaaattagttcaaccattgtagaaagcagtttggtgattcctcaaaaacctagaaacagaactatcattcaacccagcaatcccattactgggtatatacacaaaggaacataaatcattctaccataaagacacacgtttttatgttcattgaagcactattcacaagagcaaaaacatggaatcaacctaaatgtccatcgatagtaggctggataaagaaaatatggtacatatacaccatggaatgctatccagccataaaaaaaaaaccaagatcatgtctcttgcaggaacatgaatgaagcatatatattaagatctccatcttaagctagaagtcattatccttagcaaaccaacacaggaatagaaaaccaaataccacatattcttacttataagtgggagctaagtgataagaacacatggacacaaagaggcaaacacatggacacaaagaggcgagcaacatacacgagggactacctgagggtggagaacgggaggagggagaggatccaaaaaataactattaggtactaggcttaatatctaggtgacaaaataatctgtacaacaaacccccatgacatgggttgactatataacaaacttgcacatgtacccctgaatctaaaataaaagttaaaaaataaaataaaatgaaataaaatattaactaaccccctacttccatcgctggcacctccaatctcccttacctgctctatgttttcttatttcaatagcatgtatcactctgtagcaccctatgtaatttacttatatattgtacttactgtttattgtttatttcctcctgctagaatatttacttcacaagagaaaggcctttgttttactcactgatgcgtcccaagtgcctagaacagtaactggcacatagtcagcactcagttaatattggttgaatgaatgaacaaactacaatccagtgcttttacaaaagtacaattcatatggacccaactccctaaaggcctaggaaaccaaaccagttggtgtggctctgtctggtagcacacagacccagaaacccagcccacaatgaaaatctgggaaggaaggatcctgaatgccacttgcccatgacttccataaccatctccccaccagactgagttccttggggacacagagcatggtctgccttttttaccactatatcattgaggatccagcacagggctgccacaggatgcatgtgtcagtaagcaggaagttgaaggaatttcagccatcatttatcaggcactgactgtgtgtgccccacacaatcatgactttggtccttgcgttatttctgttaaaccttccaatatcccaaagaagcaggtattattcttcatcccatttaacaaatggggatcagggtaagtagcttgcccaagctcacacatacaataacatctggcaaagctggggttcaaacacaggattctctgactcctgagactgagatcttaaaatataggctctaccacctcactggtatgaaacaggaagggagggagagagaaaaagatttgggctggtcatatgccagacacagcatgaaggcctaaaagagctgaccagagctaagaagcttttctcaactagacacgactccattacagccctgtctctgtctccctgcccccagaggaaggacagaggtggcagtcttggctgaaaggaaccttatttcaataaattctttcaaattctctctctctctctctctctctctctctctctctctttctctctctttctctctcgcagtttgaatgaactgagggaaaaatatatctgagtgggtggacagataatctaaaaattgtgtcagggagtagtagagaaatgtacttcctcttacagtctctataaaaggaaaccctaacaagcttattgttgccccttgcccatacacatgcaaaccaaggtgaaaaacatgatcaggctgggcatgtggagacactgggttcagaacccagcccagtgacctcagacttctgtttagaagacattgccatggccatttccccagatgcccagttctgcccttaatggcctttgctcaccctgggcttccccagtcttgtcagctgcagccccagcctatataactacctgctgtccaaccgcctccacactgcagcagacagctctatctataggcactccagccatgaggtaactcaaagggtttcccagtggactgctctgcagagttatgtgaatgaatgtcctggagacccttcaaagcctccagaaatacttccaatactagccttcttctcctgtgggcatactatgctttgtcaccatgccagagactggggcatgaatttctgggtcatatgggcagccttgagaaaaatcaaaagtatatgttgaatgaatgaatgaatgtgccttccaataagataatctataaagagtaaaatctatataggcctctagaatctagttagtccaatgctagagatttctggcaagaaattcacaggcttgggagtagcatggggatatagaaagaaaaggattcaagccaattcaatggatttttactagggcctcctaaaagacagtctgacccttccctgacaatgctcatggctgaggggcagctggtgtgtgggtgtgtaatataggaaagcaaggaatttatagaaaggagaaaaagagatctacggccataccaccctgaacgtgcctgatcttgtctgatctcggaagctaagcaggttcaggccttgttagtacttggacgggagaaaggagaaaaagaaggacatggatgggaaggtaggacccagcttcaaccccaccattgtgagctaagctctactcctggctgagtcactcatggctcagacttcttaacttgggtttggaaatggttgtgtctctgagcttcctcataccctccttgtgacacttcccaactgaattcttaggatcaagaggtatttatctccccatgccctccaagagaaagtgtgggtcttaaaacgcatgagttgagagagccagaggtgtcacacatgggtggcagagcagcgacccaggacctgtgactcctgacagttgtcacagatgcaacatcctctcaaaacatgtctaaccttgaaatggctaggagcacatgttcatccatagcatgaataatatgcaagacgcacatgggtgaacaaagcaagaccatcacatgccccatggtcacttgttagctgggagagactttattatggcccaacaagacctttataattgtaaatccctggcgccccctcatggcccttacagtcctgtggcttctgctgaggggcagtgggggaaaggtgcctggaggaggtgccaggggcttgggagtgacatcagctagatggcagaataggaagccccagacattctgccccacagaaacactgacttaacaacaatacacagtccaaaaaagcctttatgagaactctagaaaccagttaagaagttacagtaccccaggcaagctcaaagtgaaaagccaccatattgaaatgcataagaaaaattgtttcatgtcaaccataaaaacccttctcccaactgtcacagttcagtgagactgaaggaaaaagttcaacttgcagcttcccccttggaaaggaaagagaagagcatagcatacattcagtgttcccacttttcagtgggctgcagagggaccggtttctgtctcacctgacagaaaccagagtgctgatggggaaccagcatactttcaatgcctgggggccatggagaacaaaagacagttcactggctttttgcaacaccagagaacctgagtaccataatcagacaccagagggagcaagaaattacaaacccttgaaggaaaaacaaacaagacccagtaaacctctttaattaagaaagtacacatgcaagctcagagaatatatatcccaaggaaagcccccagaacctctagctgctgaagactttcccttgtgtaaaactactctgtaaagactgggagaactcctttgttgttgttgttgttgttgttgtttttcaaatgcagaaatcactaaaaaaataacaaagcacacttaaaaaaaaaaaacgaaaaacaaggcaacatggctcaactaaaggaagaaaataggctgagcacagtggttcatacctgtcatcccagtgctttgggaggccgaagcagaaggataatttgaggccaggtgttccagaccaacctgggcaagatagcaagacccccatctctaaaaacaattttttttaattagctgggcatagtggtacacctatagtcctagctactcaggaggctgaagcaggaggatcacttaggcccagaagttgaggttacaatgagctattatcacaccactccattccagcctgggaaacaggatgagaccctgtctcaaaaaaaaaggaagggtggtgtacataataaatcttcagaaaccaattctaaagaaatggagatctattaattatttgacaaagaattcaaaatcattgtctttaagaagctcaatgtgctacaagaggacacaaatagacaaactaaataaaatcaggaaaatgatgcatgaacaaaatgacaatatcaacaaaaagttagaaactataatacaagatcaaacagaaattctagagctgaagactataataactgaatttaaaattttactggaggggttcaataacagacttaagcagaaaaaagaatcagtgaactcaaaaacaggtcatttgaaattattaagtcagaggaacaaatagaaaaaagaatgaacaaaagtgaataaagcctaaggaacttagaggaccccataaaatagaccaatatgtgtgttatgaaagtcttagaaggagaaaagagaaaaaaaggaacagaaagcttatttgaaaaaaataacggctgaaaacttcctaaatctaaagaagaaaatcaaaatccaaagtaaagaagcttaaaagactccaactacaatgaccccaaagaagtcaatattgagacaagaaaaagttaaagacaaggaaggaaagaatcttgaaagcagcaaggaaacatgactcatcacctacaaaagagttctcataagattatcagcagatttctcagcataaacattacaagcccagaggccaaagaggtgatatattcaaagtactgaaaggaaaaagaaaccatgccaaccaagaatcctttatctagcaagattgtccttcaaaatgaaggagaaataaagaccttcccaggtaaacaaggtgagggagttcatcgccattagatctgccttatgaaaattataattaaaggacacaccagacagcaacatgaaagcatacaaaaatatataactctctagtaaaaataaatatatagacaaatagaatcttgtaatactataatagtgatgcctaaatcattttaattctagtataaaacttaaaagatgaaagtataaaaatataagtataatgaatacaaaattgtaaaaggtgaaattcgtgatattgctaatacaaagtgtgtagggagaaagaaggtgtaatagcgtgaagtttttatatgcaactgaggcttattatcagtctaagacatattattataattataaaatattttatgtaatccccattgtagccacaaagcaaataactatagaagatgcaccaaagaatataagaaatcaaagaatgtcactacaaaaacaatcaacaaaacacaaaggaatgtagcaagagaggaaaaaaggaacaaagtaactataaggcacacagaaaacaataagaaaatggtaatagtaagtcctctatcagtaattactttcgatgtaaatggattaaactcagcaatcaaaagacataaagtagttaaactgacttataaaaacaagatctaactatatgctgtctacaagagactcgttttagacataaggacatacataaatgaaaagtaaaagaacggacaaagatattccatgcaataggctaaaagtgatagaatagaaaaagatttttcatgcaaatggtaaccaaagacagcaaggtgattatataattatattagaaaaaatatacattaaatcaaaaactgtcacaagagacaaagaagacattgtataatgaaaaaagggtcaattcaacaaggaagatataacaattataaacatatatgtacctaacagaagagcacccagatatatgaagcaaacattgacagaattaaagagaaaaatagacagtaacatgataaggaagagagatttccataccccactttcaataatggataattaatcaaacagaaaatcagtaaggaaacagaaaacctgaacaagactatagaccaattggaccaaatagacatatctagaataccctacccaacaacagaatatacattcttctcaagtgcgtatgaaacattcttcaagacagatcacatgctaggccataaaataagtcttaacaaattcaagaagattaaaatcataccagttacattttccaactataaaggaatagaactaaaaagcagcagcaaaaggaaaactggaaattcataaatatatgaaaattaaacaccatactcttgaagaaccaatgggtcaaagaaaaaatcacaggggaattagaaaatatcttgagacgaatgaaaataaagataaagcatgccaaaaacttacaggatgcagcaagtgttactaagacagaagtttacagcagcacattgcacatgcattaaaaaaaagaatgatctcaaatcaataacctaactttacatgtaaaagaactagagaaagaacaaactaaacctagagttatcaaaaggaacaaaatcataaagattagagcaaaaacaaaggaaataaataatttttaaaatggggaaaaataaacaaaattaagagttgatttttttcttagttagactagcttagaaaaatagagaagctcaaataaaaatcagaaatgaaagacaagacctacaattgatgacacataagtaaaaaggattataaaagactacaatgaacaattgtatgccaacaaattggataacctagaagaaattgatacatttctagaaacatataacctaccaagactgaatcatgaagaaataaaaactctaaacagaattagagctagtgaggagattgaatcagtaataaaaaacctatctacaaagaaaagcccaggaccacatggattcactggataattctactaaacatttaaaggagaactaacatcaatgctttttaaactttcccccaaaattgaagaggacagaacacttccaaaataattttatgagcctagcattaccctaataccaaaatcaaagatactacaaaaaaaaaagaaaacaaacaaacaaaaactacagaccaatatacctgatgaatacaggtgcaaaaatcctcaacaaaatactagcaaatgaaattcaacaatatattaaaaggattgtacagcaagaccaaatggaatttatgtttgaaatgcaaaaattttgttcagcatatgaaaatccatcaatataatatcccatgttaaccacatgatcatctcaatgcagaaaaagcatttgaaaaattcagcaccctttcatgattaaaagaaaaaacactcagccaggcgtggtggtggctcatgcctgaaattccagcactttgggaagctgaggcaggtggatcacctgaggtcaggagttcaagaccagcctaatcaacttggtgaaaccccatctctactaaaaataaaaataaattagctgggcatggtggcaggcacctgtaatcccagctacttgggaggctgaggcaagagaatcacttgaacccaggaggcgaaggttgcagtgagccaagatcatgccattgcactttagcccagtcgacagagtgagactctgtctcaaaataaaaaagaagaaacactcaacaaactaggaatagaaagaaattacctcaatatagtaaagaccatatataaaaggcccatagctaacattatgctgaatggtgaaaaactgaaagctttccctctaagatcaggaacaaggtatgcatgctctctctcaccagtctattcggtataatactggaagtccttgccagaggacaagggaaagaaacaaaagtcatccaaactaacattatttctgtttgcagacaacctgatcttgtatgtggaaaaccctaaggattccacacgtacatacaaaactgttagaactaataaacaatttcagcaaagttgctggatataaaatcaacacacaaaaataagttgcatttctatacatgaacaatgaacaatctaaaaaggagatttgttttgttttttatctttctcctcatcttgtctttcatttacaatggcatcaaaaggaataaaatacttagaaatacgctttactgaggaggcaaaagacttgtgaactgaaaactatagaacattgcttacagatattaaagaaaacacaaataaatggaaagacattccatgtccatgagttggaagacttaatgttgttaaaatgctcatattttcccaaagtgatcttcaggttcgatgcaatccctatcaaaaccccaatggcacattttgcagaaatagaaaaagccattctaatatttatatggaatcttaaaggaccccaaatagccaaaacaaatctgagaaagaaaaacaaagctgaaggccccacacttcctaatttcaaaacacattgcaaagctacagtaatcaaaacagtatagcattggactaaagaaagacaaatagaccagtgaaacagaatagaaacctcagaaataaatatattgtcaaatggtctttgacaagggtgtcaaacctacaaaatggggaaagaatggcctctttaacaaatgttgttgggaaaactggatatctacatgcagaagaataaagttggacccttaccatataccatatataaaaattaactcaaaatggaataagatctaaaagcaagacctgaaactataaaattcctagaagaaaacataaaaggaaagctttatgacattggatttggcaaagatttcttggatatgacaacacaagcacaggcaacaaaagcaaaaatagacaaacgaaactacatcaaacttaagaacttctgtgcagcaaaggaaatagtcaacagaatggaaaggcaacctaagaaatgggagaaaatatttgcaaaccatattatctggtgagtggctatacagaatatacagagaactcctctaactcaacaataactgaatgaataatctgattttaaaatgagcaaaggactttaatagacatttccccaaagaagatagacaaatggctgacaaacatatgaaattatgttcaacattactaaccattagggaaatgaaatttaagccaccatgagatatcacctcacacctgttacaatagccaccatccacaaaacagaaaatggcaagtgttggtgaggatgtgcagaaactggaatccttgtgcattgttggtgggagtgtaaaatggtacagctgctataaaaaacagcatggaagatcctcaaaaatataaaaatagaattaccatctgattcaacaacctatttctgggtctatatccaaaagaaattgaaaacaggatctctaagagatatttgtataccaatgttcattgcagcaattattcacaatggacaagaggtagaaacaacctaaatgtacctacatggatgaatggataaagagtatgtggtacatacatacaattgaatattactccacctttaaaaaaggaaggaaatcttttcatatgctacaacatgaatgaaccttgaagacattatatgaagtgcaataaaccaacaataaataagtcattaaacctataaataagtcacaaaaagatattactgcatgattccatttatatgagatatttaaaatagactctcagaaacagaaattaagatggtgattgtcatgggctgggggaaaggagagttgttgctcaatgggtgtagcgttgttgcagttttgcagaatgaaaaagttctagagttctatgtgcacaataaggcacatatagttaacactactgtgctgtatagttagtggttaagacagtaaattttatattatgtgttccttactacagtgaagaaacgaggggcatgggagtttgtgtaagatttatacagagcaatatgaggtgtatagtaggacaacaattaattggtaactgtaatttctttttttgagattgagttttgctcttgttgcccaggctggagtacaatggcgcaatctcggctcactgcactctccgcctcccaggttcaagcgattctcctgcctcagcctcccaagtagctgggattacaggtgcctgccaccatgcccggctaatttttgtatttttagaagagacggtgtttcaccatgttggccaggctggtttcaaactcctgatctcaggcgatctgcccacctcagcctcccaaagtgctgggattacaggcgtgaggcaccacacctggcctggtaactttagtttcatatctttccattagaagaaaataaaacatggtccccctcctgccatatgcccagcgaggcatttccaaccacccattctctgctttattttttttaggagctcttaccacccaacatattacatatttactaacgtatttgtttattttctttgaataaccagacatgcagactcccagaagacaggaatttctttctttcttgtgtattactgaatcctcagaatcaagaagagtgtgtgcctacatgaggtgcacaatgaatagttgttgaatgaatgagcgaatgtggaggttaggagagccaaagggcagctgaagtctggggttttctcctatgttcttccatctacttggggaagatagaaaagaggagagggaggaagacatgtaacagactaggaaggacagatgtcttttcattgggcttgtgggggcagccagatcagcttgagaagtacgaaggatgaggaagatccatctactatacagtccctgtcccgggtctcttctgcttaagcaaaagatggaggctatgaccactaggtcttgccagtttggtgtagctgttactgaatcaagagactctacctgttagaataaaaagtcttcattgttcccactttttatatcctaggtcagtgggtcagtgcttctcaaactttaatgtgcatacaaatcaccttggcatttagtaggtctgggtggggcttgaaaacctgcatttctaataagcttccaggtgatactgatataaattcttgcttatagtggctggttctcaaccatgtggcacctgggaagctttgtaaaatcacagtgtcccaattaaattaaattaattaaaattagccctctgggagtgggaccctggctatggtatggccgaggttgagaaccagcactccaggggctcttccaaggtcgctaactctaatggaagccattgttttggaccctgtaggccttctttccagctgttgtcccctttctccacaacctcaggactgctgagacttcactattgctgctgagcgtctgctgagagccataggtgaacacaggcacgccttgatcttggatatacaatagggttagttaacactctcaggcagctggaaggaatttttctggtttttttttttttttctacctcctgacttccacttttcatctctctttccagctggtaggaaaatatcctcttccagtctagcagaacaacggttctaaatttgggggcgattttgttcccggggatatctggcaacgtctggagacatttttaattatcacaactcagagtagggggccgctactggcagctggtgggtggattctgaagaggctgctaaacttcccatgatgcacaggacagtgctccagaacagtgtccagcccaaaatgcccaaggctgagaaaccgtgcaggagaagggagacccacagctgagcctttggggcacctttttcatctttaccaagctaccctctcctccaggcaccgaggtccgggatctgcaggggacaaaatgggatgggctgcgtccaagagtagcctcctgctgtatccagaacctctgtcttttcttaccctcaagcagcagggccctccctgtccagcccactccactaatcctcttcctcatgcaaagtgggtgaatttcctctctggtgctaatttatctccctcagtgttttaattttcatagaacctcctcccacccattataaaggtctacctatttcctctctggtgttactttatctcccccagagttttaattttcatagagcctcctcccacctattacacaggtccacctatttccataccccatctgtgctcaggattcaagttctttctcatgaaattcctacacccatgcaaatcagggctggggccagtcatcctgaaagttctttgagaggtgaagggcatcttaccaggggacagagaggcccactagagggaggatagcctgatccccaaatgccttcctaatcccatctcaatggcaactcgggcaagacaccctgtcatatatgtcctgggcacttgctaggtgaaggccctgctttaagtgctttgcctcatgaaattctcccaagagtcctggcaggtaggtgctaaggtcatccccatatgtaatgagcagcctgaggttaagtggtgctatttttgtctgtagttcctgtagttcctaactcctaaaatccttgggatctcccaagtgctgtctttcttttgtgtgataggttcaaagtggggctgatcactggaaagaataaggcaggattagagggttgggacttaacagctccactcctgaacctccgggaaagggacaggggctgaaggttaagttgatcaccaatggccaatggcttaattaatcatgcctacgtaatgaagcttccctaaaaacccaagaggacggggtccagagagcttccagagagcggaacacgtggagattcctggaggtttgtgtgcccagggagggcatggaagctccaagcccctccccctacaccttgccctacacacctcttcatctaacgttcatctgtatcctttgtatatcctttataacaaactggtaaacgtatgtgtttccctgacttctgtgagctactccagccaattaatcaaacttaaagggggggggttgtgggaaccccaacttgaagccaattggtcagaagttctggaggtttggacatgtgactggtgtctgaagcgggggggagtctcgggaactgagcccccaacccatgggatgtgactctatcatcaggtagatagggtaggagttgaattggaggatgcctggctggtgtccactgcttaatgtgtggagaaaaaaaacccacacttttggtcacagaagtcttcctctgtattgatgattgttgttgtgttggtggtggctgtgtgagagcaggaaaaaaaaacaacaacatggcttaagagagcttttccctaaacagtaagagaccaagtaagttgtccaaggtcatacaactaggaagtagtagagtaaggttgtgaacacaggcagcttaggtccagaacccatgggtttaaccactacactgtacagtcccttatgtgcttgacattgacaataacccaggcaggcttggattctgctgttggttttgaagatggaatccagttcctcaaaggcaaaataatcttccaaaatcactcagctagtaagtcatggtcctgggattcaaatccaaaacagaaattccatgcttaggccaaggaaggaaattataagctttagaagatggcaccatttatccattcattcattcattcattcatccatccatcatgcactcagcacacatatattgatgcttcctgccagtgaggcttgttctgtgagctgaggatccagagaaaattcaaccattttgaatttatgtctgcttggaactcacataaaatttgggggacatgccacaggctggtgggtggactaggagaaagggaagggcataggagtgcagaggagtccatttacacttgtcttctgggagactggacagatatggggatagggtctggagaaacccaagggtccactgctcatgccatcggctagtcacctgggtcagatgatccaggtgacaccctgcctcctggtgcacacttgcacactttcatgttgccttgttttctccccatttgtcttctcattggcttgctcagaacttcccattcataagcacagcatggggagaaacaagaaggggtctgtgctcccccagtggatcaatgcgaggttggcatcccaacttatcattccaaggtcccagagagaaaccaaattgtaactgtcaggaacacaacagaactgtcaaaagcagacaaaatcagccacataaattgtgaaacaaaagtcacagttctatttgttctgcaagagtgaacatctcacatttttttgtaaagatggaaaataaaaacaaagaccaactaggggcattgcaagcatttcatctctgtggagaaacccaccaccagaaaatctcagtttccatcaatgccccctccccataaatctatgtctacttccatgacttcgattcagtaaacactcagggagtcttacaatgggaatgagtgtgtcaatcatcagaaatgattatgacccagtccctgcccttgaccatcatatatccagctaacgtaattagaatagagccaggccagaccaaataaagaaggccaactcagggagtgacaaatccctctatagtggaatcagggatggcttcctggcagaggtaacatctgcattgggtcttaaaagatgaataaaatttcacaagtggaaaagggagggaaggaaacttcagagacaggggaagacagatataaatgcacagaagctgaggcaggtagagagggaaggacatggcataagaggtactttggaagtcaaatctccattttgtgcaacaaccaggctgggaaggttagcccttggccagggaaacttgccctgccatcaggcatatggggctccttcatttggacggcaggtatggcgctcacatgtgctccagggcacacacaggtaggccatgcacagatggtgcaagcacacttcccatcaaccttggctgtgtgtgtgtgtgtgtgtgtgtgtgtgtgtgtgtgtgtgtgtgttggcagcaatttggcaggccgttctgcagaagccctgcagcaccgtggttgctcaccaaaatagcatcaagcaatttaggtcaggaagtaaggactgtgttattattactagttactgaagttatttaataagaatgtcacatccaattgagaccatggtgggaactgtcagcaggaagaatgtaattacactaactggaggtgctccacagatccacacagaggtggactctcccccagccccactgtcttctggaaggaatttctttaggtgaggccatcatgccaggccccagaagagccagacatgctgctccagttcaggccccgggagggcttttgagggggagatctccaggacccagtgggggtctgttcagtgacaccatccatgacctgacatcctagtgatattcagaagggagagggttgtgaagccccagcctcacttcttcagctccaaagaaaatccaacagacatcactgcagggcatgggaaggccaagagtccgttccacccatgccctcatccagacccactccagttgcccacagcagtagctgggttggagacaaaccctttactgatgactctcccttaccattcctcaactggtatttcttggaccacctccaatttaaactacttacacttaatccttgtctcaggtctgcctccggggagctcaacctaaggcacttccggcagctcccaatccattccctagaaaataaagccgagctcttccccacagccctggactctggctgagcccacctagcacatacctcctgctgctggttgagacctgaactaaactacctccctgtaatggggctaggcagaacccaaggatccttgcccatgagcacaggctctgtgatcctctaaggccacggttatgggaggtggcacagctgaagcatttcatggggggcccagcctgcagccactgcccatcccccaagtattatgtgtgggacacaaaaggtgctgtgctcccattttgcttcaaaatctacaccctttgggatttctaagagtcctgtgccctcgctcccttgtagcagcagttagacacccagacgagggagatggggagggctgggagacactgcaggagggagtggagtgggaaagaacactgattctcgctgtcaggggcatcacagctagcaaggcaggctgtccttgtggccaggaggaaggaaacggaggcaaggagagactcggggagagagagagacataggggagagagagagacatagatggggagagagacgggcaggggagggaatagggacacagagacaggacccacagagacagccaggtagaaagaaagacagagcagagaaaatcagggactcaaagaaaagaacaggcagtaagagagatgggcagatagaaaaagagacacaacggcagatagagagtgagaccgcaagccagggagatgcaagaggacagaaaaagaaacagagagacggaaaagtgacagagacacaggcaagaggcagacaggaacagagagaccagatagggatagcggaaggcaacgagggcatgacccagagtgagacaccaagaagccacgcacagcttcacaacaaaggctccgtcagcggcatccgaccccccaggtccccatgggagctaagtggaagaaccagagactgagtatggactatttgaggaacttagctttaaatggcaaagaacagggcggcagccagagaggagttcagggcccaaaaagcttctaccttctattttgaacctgttttaaattcaaggagtgaagtcagtggagaagaaaaataaaatgggagggtagaggggagagaaggggcatatcacaaagaagacagatggaagaaaggggtcctgggctctgggaactggggactgtgggagagaccccacctcttcctccaggagtgaggggaggaggagtggctgcagaagcaggtaaccacaggtaggaggaggatgtggaagtccattctgatggtctgcctgttctcagtgaggtaccagggtagtcatcctgtgatggaaccagggatttgtgccttggaatggccactcttaggattaggacaggaagctgaccaggtggccgatagaaagatagttaaggggtgctgggcgtaggttagagatgtgagttcgcagtggcagcaggattcatagtccaggtggcaggcccagagctgagttgcaggactgacccagggctggagcgtgtagagactgagggtcctagtgggacagtggttcaagggatgcacagtggagactggccggccttggtaaccaaggaaaggggctgctctgagaggagttgttgagagtctcggggtctccagcatttgaagggaccttgcatggctgggcaccaccacacccatcgtcccaccctcttctcaggccagcaagacctccatttgccccttggctgcagttcttgatttcttccttgtgggaagtggcctcttcctccaccttctcagcaatcggcctcaccgacgccctgacctcagttctgctccacacccaagaccaggggtgtccttcctcccacattccctctggactctgagctcaatctggacctttttgagggcttctctccaagcaaaacccaggcagctgacccctgcctgctccacttagcccccagcactggaagcttctgaggctcctccccagagcacctgaaggactgagtgcagagactgaggcggaaaacctctccggctcaactcagtggtgactcttggtagaatttgtgggaatcccatgtccttcaaagactgtacccgcaggaagggatgctgcgctcgggtctgagggtgtgtctcctaaccttcctcctccctgagaaagcacagacagacagtgagggctccaagccagcacgttgtcgaagtggtggcagctccaccaaaagagaagacctgggtgttcaaagaagcctgaagttcaggcagaggcatagacctgtcttgctgagcacagagcaccaggcccccgcctccctgaaggacccacacagcctggcaggctctgtgcagctgtcggccttgttgagccctggctgttaccaggcatggttgtcaagtgcagactcatatcctgggtcatcggggagtgagtagaccggcttttgttcccaggaaagccactccacacagagcctgaagtgtagtcaggaggggcgtcgtccctaaactctgccagctcagaaggacagtgactagggatgggggaggttcaaggtcaaagcctgacccacccttggggctggagagctgggagctggaacccaggctaagcaagatgctcacaactgcccaagtcctggcatgcagaattcacacctgtgcacacacacatcaacagctacagaaacagacgtccacgtccactacatacatgtgtacccccccccacacacacacacatatacattttgcacacacggttctcatgcatacagctctttagtacgtggctgcatgcccaccctcccatcctggatggaggctccatgggtcccgctgccaccccctccctccactagggtatcagtgcccttctggaagaatctgtgtaaaggtctgggtgtcccttccacctgatgttgtgtttgtgagtggtaaagcagtgtacctgtcttgtgaaactgtgtatgtgaacacatgttgtgtgtagaagcgtgtgtgtgtgcacatgtgcttacatgtatcagttacaatacatggaaggatatgtgtaaatagggaggaatttaaaagagcccatgataggctgggcgcagtggctcacgcctgtaatcccagcactttgggaggctgaggcaggcagatcacgaggtcaggagatcgtgaccatcctggctaacacggtgaaaccccatctctactaaaaataaaaaaaaattagccgggcatggtggcgggcgcctgtagtcccagctactcaggaggctgaggcaggagaatggcatgaacccgggaggcggagcttgcagtgagccgagattgcgccactgtactccagcctaggcgatagagcaagactctgtctcaaaaaaataaataaataaaataaaataaaatagcccacgatagctgggattgcatcctcaccactgccctctactgcagacatgcacatgtgccagggcctccgccgctctgactggctcagtgctccctgcacacacagagcatccggcagcactgcaggaaggaacaagcctggcctgcagagtcagacaaaactgaattcacagtcccttctgccacttgctggctgtgtgacctggggcgccctgctcaccctctctgagtctcagctccctcatctataaggaaagcataatattaataatacctccctcacaggcatgctgggaaaattaaataagattatgaacatgagactccaggccctggggagctcaagaaacattaattaccactcattctctcccttccactccaccctgtgcctttcattcatgcaactgataaatatttatcaagtgctgtgtgtggcactgggggtacagagtccctgtagtcatcctcatgcagcttgttgtctagtgggggagacagacagtaaacaagtaaacaacagtagatcatataatgagcatgatcagagctatgaagaaggtgatgtagtccttcatctactgtggtcacctctgacagtgccatccctgagcaggtatctgcagggtaagagcgaactgtttgaagatgggagagagagcattccaggcagaaaaaaacagcaggaagaaatgtctggaggcaaaaaaaaaaaaaaaaaaaaagtttgttgttttccagtaagagcaaaaaggcaagtacacctggggtatggagaagcatgcaggagtggtgggaggggaagcgtgggtagactggcagtcaaggccagatcaaatcgggatggtttcaactgtgtgtatgcagtgggaggggtgaccgaatcagatctgcatgttttaggatttctccagctgctgtgtgaagaaggaaccacaggtgagaacaggggaagcaggtggaccagccagggatcgattgtcccagggagagacagagaaggctttaaagactcaccctgctcagccctgcgctcaatgccttccctgccctccacccatccttaggctcctctctcaggatgtctttcttctctgatgactcctgactatagcatccattttccaactcttggagcccgttttcaagggcctccttcccagaaacccgtcccaggtccccatctccgcacatccacagcttgcttcctggtttaaaggacaaaccgagaccatcctatccaggaatcaagaaaaaaatatggcatctgattctcctttatgtatctccccaccagatagagcatatagtaggtgttcaataaatgcttgcattcaatgtggtacctgttcctttctgcctagcattccgtacccttccctgctcttgtttctccacctcccacctcaccaagcaatgcttcatttttgttaaacattattaagtacctgccatgcactaggtccctgcaagtgcatgctctcatttctccttcctgactatcccatgaggcaggggctattataaccccactttacagatgaggacactgaggtgaagagaggttggcagagccagccaatagtgaaagtactagacaagaatgaattatacctgacccaaagtcaaagttctgtctgctctattgggaggtgcaggagaggggggggtcttaatttttcttttcaataagcaaacagggaaatatatcttgcaagttacttacacaggccagcctgcctggggatgtccctgtcttgcactctctaggagagtgtgtagaccagaccctgcctgctgacttggccctggtgtcatatcaatcttggcatcctgcaccttcttccccaactccactccagggacctagcttgaggggggcttactcaccatcaggaactgcaggaagtggagatcaggttgaagccacagactcatgctgacacccatccacagcctccaggcccaggcctctctctgaggcagcacagagtggggatccctgaggccaccatcaccaagttactcattcctgatcaggcataaaatttccttcttgttttcaaatgagcccaggccagagtctccagtcagggggttcttctgcctcccatccagtggcacagctctgtctttgcacaagctcacctctcagcccacacaccctttcccactgcaatgcaagggtcaggatcccctgaaaatacttctgagcgctcactcggggttgcctaaatcatgagctagctggggccaggggcatccaaattcagcttcccaagagacaagagggattccaacctctcatgggccacaaattcccccaagtatgggacagctaaccttatagacaattcctaaaaacagcacacacccaagcagcttgcatgtcccttcactgatgaggtgactcacacacttgacctgtaaggaggaagagcaagagagagggaggactcgcctctggaacagactcgggatggatgtcaggcagaatatcatggccccagcacacccctccatggacataagggagaatgggagacctgtggcacctcgtcctgctgacccttagtcagctttcccttcccctaataaagccccgattcactcttaccatgtgacattgtggaattcatcccaggccctggtgggtaacaggtggcacccaccgagaaccatcttgcttgttacccacttctctatcacccctcttcttctgattaagacccaaatatcccctcctctgggacctcccccaggtgtagttacttgctccctcccctctgttcctgtgatagttaactttatgtgtcaacttgactgggctaaaggatgcccagatagctgggaaaacattatttctggatgtgtttgtgaaggtgttcaggaaaatattagcattggaatcaggagactaaataaaacagatcaaccctcaccaatgtgggtgggcctcatccaattcattgaggtccccgaaagaagaaatagacagagaagaggcaaattctctctccttgagctgggatattcccctgccataagatatcagagctcctaattttaaggctttcacactctgggacttacaccagggttcacccccactatcccacatccctttcctcaggccttcagactcagactgaattacaccatcagttttcctgggtctgcagcttacaggtggcagattgtggggcttttcagccttcataattgcatgagccaattctcataataaattttatacacacacacaaacacacacacacaccttttttttttttttggttctatttctctggtgaaccttgactaatacagctttcaaattaattcattcaatcaccaaacattggttgggcacctcagtgtcaggcctcatgcttcgtcctaggacagaatgacagataaggcatagttcctgtccttgtaaagtctagcaccttctattaccacctctctccctcttttgcaataccacttgtttctgtatctagctgtccactagactgccagttcctcccaagccagtacagtggcttgtgaatgatatcatcccagtatctagcactgaactctgcacttgaagttgtctgaataatagaaaagcaagccttgcaaaataatgatggttccattaattcagtcagcccaggccgggtgtagtagctcacgcctgtaatcccagcactctgggaggctcaggtgggtgggtcacctgaggtcaggagttcgagaccagcctggtcaacatggcaaaaccctgtctctactaaaaatacaaaaattagccaggcgtggtggtgggtgccagtaattcctgctactctggagtctgaggcaggagaatcatttgaactcaggaggtggaggttgcagtgagccaatattgcaccactgcactccagcttgggtgatagagcaagactctgtccaaaagaaaaaaaaaatcagttagcccatagttacaggttgtgcaaaaggctatgtttcacactttcccatcccttgtgttcctttcccatagtacatcttgctacttagtcaaagagagcatgcccaagggtagggagtgtgaatataaaactcgggcaggctgggtatggtgactcacacctgtaatcccagcactttgggaggccgaggtgggcggatcacgaggtcaggagattgagaccatcctggccaacatggtgaaatcccgtctctactaaaaatacaaaaattagccgggtgtggtagtgtgtgccaatagtcccagctactcaggaggctgaggcaggagaatcgcttgaaccggggaggcagagattgcaccactacactccagcctgggtgacagagtgagactctgtctcaaaaaaaaaaaaaaaaaaaaaaaaaatactgagcagctctggcagccaaacaggcagaaataggagggagcatttgtgtgctgtgatgcctcatgcttgtggtctccatggttctcttggtgcctccatcacattagaaacatctgtttgcctgacaacagccaacactctttgccctagatcttcaaactcttctttaaatctcaacccattatagtaatagtctggagaggggaaagccatgaaatgggagtttcttttctctctgacaggcctaggggataaagaggccgcaaatatccctttaggttaattcagaaatgtgaaaacttcatattttcatttccaaataagtagtcactacattaccatagtaacatttgctgccctattttagattagaaattattataaaagaaagcatcaagacacattcattgttaaattgtatataatcttaaagggaaaaaggtctttctctaagtatgacacaaaaccagaagccaaaacactgacaaatttaagtgcataaatatgtagaatctctctatgcaaaaaataaaataaagataccacagagtgtaaacacaggtccaaactgcaaaaaagatttgccatgctactacagattaaagagccagtgtcttttatatgcaaagagttcttataaatcagtaagaaaaatagaaacaatgccatagaaaacaagcaaggtgcataaacagatagttttcaggagaagagatacagacaactgggaaacatgaaaagatgcttagtttcagttataattaaaggaacgcaataatgagctacttttctgatttccatcagattcgcaagtttttaaaaagttgttgggaaaggatggagcagtggttccttgaccagcacatcagcatcaccggagaacttgttagaaattcaaatactcagatctcatcccaaatctactctactgcagacctatttgatcacagattcactgaatcagaaactcctgggccaagcaatctgtattttaacaagatctccaggtgattctgatgtactcgaaaatgtagcgttacaaagaactttcaaatactattggcagtgtttaaattaatgcaaattggcaagtttatcaaatgcatatatcctttgaggcaacaaatccattctatagacatctgccctcatgttgaaatcacacacacacacacacacacacacacacacacacacacacacaattattttgttgtgatattgtttggggtagcccaaaactagaaaaagcctaaataataaagaactgattgactcctgtaatcccagcactttgggaggccgaggcgggtggatcatgaggtcaacagatcgagaccatcttgaccaacatggtgaaaccccatctctactaaaaatacaaaaactagctggtgtggtggcacttgcctgtagtcccagctactcgggaggctaaggcaggagaatcgcttaaacccgggaggcggaggttgccgtgagcagagatcacgccactgcactccagcctggcaacaaagcaagactccatctcaaaaaaaaaaaaaaaaaaaaaaaaaaagaactgattgactaatttacagtaacttatgaaatatcatgtagccactaagaggaatgagataaatctatgtacacctacccagaaagaggtataagagacatttctaagagaaaaaagcatgttacagagtaatgtatatgatatatctacaatgatcccatttttgtgaaatataatttgtgttccatttacattttcttacatgttttgaaaatttctgaagtaattcagaagaaactgttgataagtgggactgggctctgcagtggggagaagggcttttttcaccatatgctcttctatgccattcgaatttttgccctgagcatgtattacttctatagtaattaaaaagtagttataactaattaaacttaaagggaagagaaggagcaagcaggagagagaggcatggctggaaggggagaaaaattaggtcatttgggtaactgcatcctgaagactatccaggccctgcctgagaaactcagagatctggtctatactttatcttcagtcacacaggttgctctagtaaagaaaacttaaaaactatttcactgaactggtgactttcaaaataaattacttatttaactaagaaaaaacctcacatccattaaacaaggcaacccctaagccacttgattttccttcctgtgggttcagcccactcagttgaatgtgctgtggatgttagccattgagtttcttttggttccaaaaaaagtgtgaacaagtgttatctattaaatattacatgtgagtgtgaacgccagtgtggacgtatcccatatttgcagatcagagatcatgaagacagtgtttgtgcatgagaacagacacagtctttcacagagctatgtgaacatggtctgtgctggggttacaggcctgacatatcatgatttttcattaacggcacttgttagagaaacttccttgggataggagcctggactcctctctgcatcattcgcttgtcaattcccatgatgcctttaataaaattatccagttcagcctttattaccattttttgtccagccaatccccaaatgagtttgcttaaacaataaattatgaaaactccgatccatctattattcaatcatccttccatctaccaaccatgggtctttcctcttgtacattcatctgtctatatgtctactcatcccatgaatctacttgctgtccattccatcatttgtttcattcagccatctcatttcatggctataatctctatcaagccaatcctgccatccatgcattcacccttccactcatctttccattcactcatccattccatccattgatcccatctagcccatctattcttccactttacccactcatcaatcaaacacatccttccatcctagtcatccatgcatttatccatccccccatctaataccccatccacttattcattgatcccaaatacccatcaatgctctctagcaatccatcccatccacctatccattcttccatcacccactatctctatccatcccatccatccgtccacccatccattcagcaattgcacctcttcatcccaccccatagcctagacttacttatctctctggaggcaaagagactgcggcaagcaaggcccagtgagtataagaaaaaaaaagtgactgaaaccttattactttttcaacaaggcccactaagctcttttcaccagaacatctttgagcactcttaacagcaagtctttttccacacttatatcccttctcttcctctcatgcccagattcccccgctggtctctgaccagctgggacttctagctaccagtaagagtaaacacatcaggctcaaaactaccctgtaacctccagtgtccattctgggcccagctaactatgctcccttccctccttcacccttctgcctttgaactctagcctggggtgaagccctagccatgacaccagcgctcctggcccagtgtatagcctgttccagcctggcccaacctggcccaacctggctaaagcaactcacaatccagtgcttcgactgaagactgtgctttccaattgggaaggcaaggaacctaacatgtaatagacacctaatacaagacagggacttgtcaagtgctttctatttgacacctaatttcatcttccctgcaattctctgagttaggtaaaggggctcagaggagaaactgcgttcacagaggttaagtaatttgtctaaaatcacacagctgctgagaagcagtatcagaattcaaaccccagtctgactctaaagcttcagccttgccactccaacaagctgctattaagaggacaatttccaagctaaaccaagtaggggaaaccagaatgataagcaagaaaacatcccattttctgaactgattctctaaccaagaaaacacaatcatgtgaatcataagttgtagtatttactaagtggtaagtctatgtcaggtgctggctaaacaagctttctatttatttaaaagaaagtgaagtcccttttatgatccttctggggggtccctccacatactatggttaagcaggtcccagatcaaggttttaagggtttgaggcatgtacattgtactttggaactgtacgatttcctccaggagagggatttgaatgacagatgtttaccttgatcacaagcttgtcactaaggtaaggaatctcatatgtttgcaaatatgtagaagttcaaatcctgctacaccacttgctgtgttactgcagccaacctccttcacctccctgagcctctgttttctccatctgtaaaacggaggtggtaagagtaaccatatctacaggactgtcaagagacttcaattaagattctgatgtaacagcttaacttctctcttacggttggccacttatttcattttcactttttccctcttttgtaagtaatgctatgcatcttctacataaatggttgactacatgtctgattatttctttagggtaaattctttgaaatgaaatatcgagtccaaatatatgaatattttaaaggctgttgataatatagtgccaagttgctttccagcaagtttgtaacaatttacacccctacaggcagtttattgaagtgcccatcacactgcacccttgccagcatatactcctttttttgaaacaatttttatatatttttacatacacattcatatataaccttgcatgaatgcataaatatgatcttcttgtgtatcatattgggatttcagtgaaattttatttttatttttccttttcatattcgacttcctctccatcaccccccatcctcacctaaccccatgacccactaaccaacactcactcctaggcaacccatattgaagtctagtttttattttcccaaatctctatgttttcttataaaaccacatgcatactactaccatttgaatgtttgtcccatccaaaacttgtgctgaaacttaatccccaaagtggcagtattgagaggcagggcctttaaaaggtgagggcctctgctctcaggggtgattaatccattcatagattaacggggtaatgggttaatggattaatgggttatcatgggagtggaagtggtggctttgtaagaagaagaagagagacctcctggactggcacactcagcccccctcaccatgtgatgccctgtgccaccatgggactctgcagagagtccccactagcaagaaggccctcaccagatgcagcccctcgaccttggacttctcagcctccagaattgtaagagataaattccttttctttataaattatccgtcttcaggtaattttgttctttagaattttgtggttattctattataagcaacagaaagtttgtggcaattttgttataggcttcagatttttgtggtaattatgttataagctacagaaagcagacagagtcacaaacataaactgacatacccacatatacacatttacatatacagtaggggtttgccattgtttgtttccttaaaattgtaccacattatacaaacttctcagcatctttcttttctctcagtaataatgatgtttccattaagtgaaggaataatgtctacagagtacttagcacagcggctggagcactgagtacatcttattcattgttgttgttgttataaattaaaaagacaaactggcatccctcctaaagctgtgagattcatgggtaaagtggctcccctgtcctgccagtcttgtgtgggaaggaacaggcaaaggcaatgttttactagagttgtgcatgtcatttccatggtccctaaatcattcttcatattaactaatggcctactatttgccagggaccatccatggtccagaggtaggataataagcaaagccaggcaaagtccctgacctcctgaagcttccagtctagacagcaagcttgataataataaattaatggctttgatcaatgtatcatgatcaactgagataagttatccaagggcaagacacacaattctatgagaatgatttagactgcgggggcagggggccttctctgaggaagtgaaacttgagccatggttaatgcagtgaaaggggaagataatactccagacagaggaatcggcatatgcaaaaaaacaaacaaacaaacaaacaaaaaaaaacccagcggcagaagaaagcatggccctgtgagcttgaaggggacagcaggctgaaattctggctctccgagcaaaggcaccgccacttgcaagcaaggcctggcaaatgtctagagaacacctgcagcctcaccaagagcttcaaggcaagtgttctcccaatgcctcggatcccactgtgtttagcaggtcccatcaccttggcaaccacgagggagtaccaggccaggcctaggtaaatgcatcatgtatatcatctcactgcattgttacaaaggttttgtgaatgaggcactactgttcctgttttagagatggggaactgaggcctaaagagattactatgccccttacacaggctagtaccaagcagggacaggatttaagcctgggtctctcccaatctccaatctatgcctctgagaatatagaacagagaacaacacttttctctgaggtcctaagcaaagatttcataccctcctcccagggtgacttataagtttttcacgtggggctgggatttgaacccagctgggctagctccagagaccaggctcataatcacttcccactgaacagcctttcccctcctctacaacctgtccccctccagcctcacttcctgcagccccagccaccacacacacacaaggaacactcgaacacacagaacttctcatttcctcctgtgaatatagggccttttgaggtttggaggctcttcctgggatacatcccactcctttcctcccctgaaaactacctgctccaccttttaagtcccatctcaaatgtcacatcacccaacagtgaacctacccataccccccacccacccccatacactggagttattaactccatctactgggttttcatgtcttggttctccctctgtattcattcattcaacatcccataaatattcatcaagcccctactatgtggaagacactgttctaggagttgggcataccacagagaacaagatagacaagctccttgatctcatgggatttgcttgagaagtcagtaaatgtttcaaaatgcatacatcctatgttgggtggttctaagaactatgaaggaagccagagcagggtaagcgaaggaagggattactgtggatgagggggttgaggaaacctctccaaggaggtgacgttggaacaagaatttattgaagtgatggctgggccttgtggctacccaggggatggagagccccaaatctatttgcatgcatgccccaacacccagtgtgtctgaggaacagcagagaagccactggccggagcagagtaagcaggagcaagtcttagggggatgaggtcaggaagaaaatgaggggtgagcacatggaaaggaccttgacttatttctgaatgatgccaggggaatgaatgatctgcctaaccatgttcaaagctctccagctgccaggttggaggaaaatggaaataggcgagaatgcaaggagggaaaccagggaagggtccaggcaaaagaagaagatggctcggacccttgggtgtgatgtgggtggcaccaggggctgggatcctggatttattttgaaggtggagccaacaggatttgctcatggcttgatgtggggagagaaggaaagggagaaagaggtatcaagggtgaccaccaggtttctgggcaccacgttgcacggtgactgctctgatgtgcctccctcatagaaatgtgagctccttaaggcagggatgctgtcttccctctttgtgacactgtacagggcccaccccatacatgtttgctgcatgtgtgagtcatgaagtgtccctaagcagcttctctgagccattcttttgctgccacggcctttggggaagagatgggtcatcctgtcctggcggccccctcagtctccaaataggttatctttacacatctaataactacgagcaaatgggggtacactcatccagagatgaacggtctgcaggatcaaatcagacaacttgtccttggagccaaggcccaagatcggctcttctctgccccctcagtctcctttcagaagccacctggtgccccaggagacgcaagtcctgaaattcagctgcaagcaccttacaagcccagcggaattggcctttgcaaaaccctggtgatcccgtcaccatctctgttcaaggcaggcagaaggctgtctcctttatagagatgagaaaacgaaggcctggaaagtggcagggggtgatggaagaagagaatggccccctctctccatcttcttgcatgaaattgtatcaggaatgaaatagtgttccactcagcagcatgggctttggagtcatgcagccctggatgtaactccaacatttaccaaccatgtgtgactttttgtgacattacttaacatgattgaacctcgatctgcccctctgcaagatggggataataatgccatctctcttacggacctgttttaaggtttatattagatggtgtatacaaaatgcttggcacagaggctcatggtagggactccatacatgaagatgatattatcagtgctattattattgaaatggtttgtgatttgtgccactgctggactctatctagggctgcgacattgtgtgctgtgtggaaacagctgtaaaaacatgattaagaaaccgcatgtggatgctgttatgtggtaacaacagtcccagctccatcctttacctgctgtgtgatctttgggcaagtcatcttattccaccaaatctcagactatgtctataaaatgagaatcattatactacctaccttcagtggggtctggagcccactgaatatgataatcatataaaaatctagcacagtgcctgggtacagcaacgtgttcaacataatcagagtcagaatgagactggcacctcacgggtcccagtgcctgtccacccagagcagcagcctcccaggccattaacaataatagctttaccaggtgaaaaacttgcgattgactcttctcagtcttttctacactaactgccccctagacctccaggtctcagtttaacattgcctccttcaggaagtcatccctgataggcgctggctagactcctgaccttcctgtgtgctcccataacccctctccttgccccgtgttaaactttattgtgatgctcaccacattgcttttaaattatctgtgtaattatctgtccactctgcaggtgatatattagaaagactgaaagcttagggggatgtgggccaaaggacagatcccatgcatgtcatcaaactctatatcccagaacccagcatggtatctggcacaaggtggtagctcaacacaacttggttaaacatatacacagatgggagaaaaaaagaaggaaggaaggaggggaaaagtcttggtgttgctactgctttatactagtaactgtctctgtcatctccagcctgctcctcttgccttgggtctattattcaagtcaattttggccccttgtctgcaaagcaaatgtgtgatgcccggccctaatctgacatcagtttctatcaaggagttaaccaaggagaatcaggtctgactccagagctgatgcattttaaaccattgtcccatttcctaacaatccacctagttgaaatatattctccatttactcttccaggggacaatgaagggtagagaaaaattaacaatttattttcttatttaaatatgccacagagataagcgggccagatgatcaatgtcttagtcaacatctcctctcagtctggataacagctttgagaaacctccaaggctgtctggtatctacagctgagtccaaggtgggtggggctcctaccattcctcttgatggggtgggacaggtcctgcctgtcccagttacctccagctgcaggcggtgccaaccagctcaggtccagattcaccatgcagtgttaggagagaacatgttcatcctactcttgtctccacagaggggaatgaattcccagtccatgctccagaggaccaagtaccagtggcacacatttttccagtctctctctgacccttaactctctccctaccttggaggaagagtgacttgtccaaagggcatttgtggggaaataacttggcatacttagctcagccccaacccaccttgcacccccttaacttacccagcaagccttgctcctgtgagggaagcctgaggctgtttcctttgctggtgaatgagtgggtaacttcttcaattcaagagtgatgtattaacaagacaattttgccacatatccaaagccatgtcttccaatcagcgttatcggtaaggtaatgaagctgacattttgatctctccatgtgactcctcttgtgttttttaggcagttcattccaaacttgagaggggaagtaagggagggggtgttgagggtgtagaggagaaattggacaagaacggcattccctgcctggggttcccagacccctgtggctcttcaaaggcagtaatgagagtttgtgagctattttcaatatttcaaagagcctaacagaaactgcatttaaccgcgatcaaaatgcacaggccaaataaatgccaagtgtctgctttgggctggaactattcccaatcagtgaggtcacactgccctttgtccactctgatcggtgagaccgagctgtggcccttgggggacaccagaggcttgccaattaagggatggtggttccccaacccctccgcttgactgcatgagaaactttagccccttggcaaggctgcctgcttctttgaaagaggaaagtgaaatgaggtgcatttgggggatgaatgagggtagcctcaatcttagacaaagtgaataagaatgaggtcctaagaagatgccttttcccagggccaaagaacagaaccacccaagttaggaaagtgtatagctcatggcctcaactcagaccacatatgggggataaaggaaagtcgaggccataagaagttgggaggggctgaggttctgtaccaggacagcagaaaggcaggagggctgcatgcctgcttctttgagtggcacctcctcactcggccatggctttgccctcttgctgcctggaggggtggctctgaatgcagctgagaatgctaatgaacctcctccctgccccttggcagcatctcccagtgtaatttttgtagggtaggtgggatctggggagagctgatctgtaccagcagacctgaaaacacagaaatagaaatggggaaatgaatccatgtccttcttaatgagtgcagcctggtagaaacagtgccttgaaacacaagactcttgggaggaactcagagaacgggagaacatcccgcgccataacaaagttaggttgtgtcgaggaacggggaggcatttaggagtcttttcccctccccatggcagtctcagcacacagaggagagggggacctcctttctgcccaggctagggagggcttccaagggaccagacgcctgttctacctgaaactgatgagtagaacaagccccccatcattctcgtgccaagagctggctgggaaagtggacactgaggcttctcgagaggcacaatcctagccctaactctgcagatgtcctgagtgctccattctcaagatttagattcatggtgaaaggaggtggaaagctccattcagcctcaacaggccaagccatgttcttcaacatgatacaccaaagaccagtaatttgtgtttgtttagagtcagggtctcactctgtcacccaggctggagtgcgatggcatgatcactcctgggctcaagtgaatctcccacctcagcctcccgagtcaccaggattacaggaatgtaccaccagagcccagctcaggacctgtgccctgaggggtatcaggcacacgcctggctattaataaatgaatcagtacttttccctttgaccattattctaggtctttaccctactcatcagagccccagcagggagcaggtgttagtggcatatcagtttaagcaccttccaaagccagtcttaacccaaaagcttcaaactctttgccagttcttcaagaggtaccaacttctcattgacctttgtcttgtccctcctcttccattctaaagagtaaagtcactccctttgtctgactgaagcaggaaccacctattggaagaagctaggacagatgtgggaggccatagccctgccactgcagttgtaagagtgctatgttccaactgttcaggagaaaaggggtgagttccaagccaagcaaagatgcagaaaaatgcttgagaatgatttgagaagtaaaatccataagatgtggttagtgaaagggagcagagaggggtggaattccaggatgagtcccaggtttctggcttaggaagatgcatgactgtgaagatgcatgaagcaattcatagaggtgggccacaaaagtttgggagagtaaagtttctgggggtgggagagagtcatataggtgacagcaggaatgaagacttcagtgtgtggagtggggagttatgcggttctggagttcaggagcaaggtcttcattagagacctaagtatggagagtctcagcatttggacagtggcatgaaagccataggagcgaatgaaataaaggataaggcctggcgcggtggctcatgcctgtaatcccaccactttgggaggccgaggcgggcggatcatgagatcaagagatcaagaccatcctggctaacatggtgaaaccccatctctactaaaaatacaaaaaaattagctgggcatggtggcaggcgcgtgtagtcccagctactcgggaggctgaggcaggagaatggcatgaacccgggaggcagagcttgcagtgagccgagatcgtgccactgcactccagcctgggtgacagagcgacactccatctcaaaaaataaaaaaataaaaaaataaagaaataaagaataaaaagagaaggtcaaggcaaatgctggaagctccaatattaaagcaaatgttaagtgggaaggagtgatgggcagtgtcagacgctgaagagggggaggggagggaggaggatggtcagaaggtcaggaagcttggctgtggccagactgtggaaggtctaggagccggcagagatgcttggatttagtaaacaggaagtcatgtggtgccctaggctggagcacctcccccggagtgaggagggtgtaagccaggtaacaggtgctgagaaatgaattggcagacaccatctcaggaagtatggctggggaggaaaggagagagacggggtgacagccaaaagtgggtgcagtcagggaggggctgttttttagtgtattattaagacacaaagaaagtgtgtgcatgggctaatgggagggaaacagaggggagggaggagttagagaaatggggcacagggatgccaattatggcagtgacgtccctgcgtaacacagggtatggtgtcctcagcgcttccctgcacaaattcagcagcaaggctcacgcagctgtttcctttagtgtcaacttttctatgaagtaggacacaaggttgttcaagagagtgagcgggtgaggctgccacagagatgagaatggccccaggacagagcctgtggtccagagtggtcgaaagccagaggcaggacactctagggactgagttgagagggaggggcccacaagggctggagcaagagtaaagagaggcacagcattgggtaagatgaacttctaggttcaaaatctcgttgaggcccagggacactgggagggtccagatccatagaagtctacccccttgccacctacctgatcctactttctggactaatcggctcattcttactaaggtgttaatggctaacatttcccaaaatatttagttctaacagtggctttcaaaccaaagatttcagtaataacagaattttcctgaaacacaggcagacacagagcaactatctcattgctccgcatcaaaaacctccaccggccccttgcccagtctctcagcaatccttcactctgaaaaatctgccgtaatttggtgcagcaacagaaaacaaaaggaaaattgcatctttgctgctcccgaaagcagtctccagcatgttcagtttgatctgacaaccacttgacgtgtaattcattcattcattcattcattcacaatatttattgagcatccaccatgctgcaggtactgtgctacatctgcggacacagcagtgaacaaaagggccaaaccccctccttcagtggggcacagactcatcaggacaaaggggcaggagagctgcatgctctgagccaggcactctgcaagcatggacctttacaagcatgactttgaagtcaggatttttgccccattttactaatgtgaaaactgaggccaagaatgaactaggacgaaggtttgctggggtcggccttattctaaagtctgtgctcagagaatgcaccgcctagtgcttctcagactctcacaggcacaggaattgacctggggatcttgttaaaatttaggtgcagtaggtggcggatggggtccaagaggctccatttctaacaagcttcctggcaaggccttgaaccacacctcagaagccaagggtctagtgtttcccacactcatctggtcatgaaacctttgccctccccgagcatttatttactagtccctactttacttcctcaaacccaaggaatgaatgaaaccccaggaatggctgaataaatgaatgaatgccatctctgggcctcccagtgttactgtgcttcctaccttcacagccctatttgcataactggccatttgcctcagtttccctgctgagccccttgggtcctcactgggaccacagactctctaaataccccttcactgagctagggtccttctaccctgcctgctccccgccctgggtccgaggtcctgttccagccagggagaaagtgaaggctggaccctggcctcctcagccccaccctctgtagcttcctcatctcccggctggctggcctcacctcagcctgcctgcaatgcctcatcctgaaatgccagctgccccccaccaacaggcccgaagaaaacggcatttcagtgctgtgtgtctgcccttcagagagtattaaatccagaataatgggaattagtacacggaagaagttgaggataagactcccctgagtgtcctgatttctcacctaacaaatccagggctggaggaaagacttagtgattcaggagctccaagctgtcaggccaaccctcaccaacagcccttttgtgaagtgtattaagcagtttaggaatgctaatgcgtgcctttggggctggtgccttcccaggctcttccagggggctgcctaatctcatcaacacaaatctggtcagcctggtgacaacctctgggctgctgcactccctgggaacatgtccttatggcaccagcaccagggctaattgtaaaggagggacagagggaggggaaggcggtgctgcaaaggtagcccaggtgtgggctgacttgtggaggcagagcctttgctcaaagacacccaggacctgagcccttcttctagtcattcctgagtggggttaagaccagggtcatcagaaggtaagcaggaagaactcattaaagacgcagatccctgcaccctgctctcagatcctctgattcagaaaatcagaggaagacctggaaatctacatttttcttctttcttttttttttgtttttttttgagacagggtcttgctctgtgacccaggctagagtgcagtggtgcaatcatggctcactgcagccttgacctcctgggctcaagcaatcctcttgcctcagcctcctgacttgctgggactacaggcgtgtgccgccaccacacccagctaatatttttattttttgtagagacagggtattactatgctgcccaggttggtcttgaactactggcctcaagcaagtctcccaccttagtctctcagagtgctgggattacagacgtgagccactgcacctggccagaatctacatttttaactgggaaacctgtacagtggttaagcctatgggctctagaattagactaggtttaaatccaggctctccccctccctacttgtgtggtcttagcaagtaatttaatttccttaaacctcagtttcctcaactgcaaaatgacagaattcttaggagttttgtaaggggtaagggaggaatgagcagctctcactaagcatagggcctgagtgttcaacaagggacagccaaccagggactgcagctcacgcttgtaatcctggccctttgggaggctgaagggggaagattacttgaggtcaggagtgcaagactagcccgggcaacatagcaagacccccatttctacaaaaaagtttagaaaaaaaaatagccaagggtggtggcatgtgcctatagccccagctactcaggaggctgaagcaggaggatcacttgagcccatgaggtcgaggttacattgagacatgatcataccactgcactccagcctgggtgacagatcaagactctgcctataaaaaagataaaaataaaaactaagggacagcttccacaaggaagactatgatgctgataaagggggggcgggggatgcaaacttgacatctcccaagcacagcctgctgctttaagtctttgtctagctgctccctcgaagatattctacctgcaaattgctctccttcaaccgaatccctgctcacttttgaagagcctgctggcaccttctgaatgaagtcttccttcttcccctctccccctctgctgtgcttggagctcctttggcctttagtagcttataactgtccctgggggaaggaacttggttttaaaaggtatttgtgtccatgacccccaacccagggccactgcactaggtactcagtgagtgttccatgagccagtcccaatgctcctaggcagacgggagcagctaaaggccttaaaaagccaccttgatgacagaggtatggggttgaagcctggttaaagaaaaggccacggaggggagggtcctggctggggtgagggtggaggcagcaaggtgaaaggtcaggaagaggctctcacagatggcaaggctgaggatggggaggaggatgacttacaatgagagggaatcctggtttcttgggaagtagcaggactagggaaggggatggacaggaaaagaaaggaaaagacataagtggaggagattggcagagaagggagaggaaaggagagaggcggaaggaacaaaaggttgacaggcacacatggcctggacaaggtagaagatagcaggtctccccacagacagcacctggaaaggacttgctgactcagcccaagtaggtagactttctatttttcttttatttcttctttcctccctcactcccttgcttccttcctccctccctccctccccccccttctctcttcctttctttcagtcacatttttaagagaaacagggtcttctaattctgtcacccaggctggagtgtagtggcacaatcatagctcactgcagcctccaagtcctgggctcaagccatcccccggcctcagcctctcgagtagctaggactacaggcacatgccactatacccagctaattatttatttatttatttttatacagaagaggcctcactttttgtcacttaggctggtctcaaactcctggcctcaagcaatcctcccacctcggccttccaaactgctgggatgagaggcacaagccaccacacttggcctatttcctttctagatggaagttttgtgatgttctcatggaggcatgatgaacagaaccataacttatgatccatgattcatggaatgggtttcatgtacttttgactgttcactcagctgtttaccctccctgggaggccagggcaccaggtagaggacttgtggaagaaaaaggatcccctcagccccaatttgctgatgtggggctccaggcaccctcaccaaggcctgcctttgccagtagcaccctaccctcattgtgttttttcagagacctgtggctgccggccaagccagccagccatcccccttctccaaatcctccagcctcctcaatgcccttctttggtgagcaaaccttcttccagacctggaacaacccactctcactcaaccaggagcccatgcagatgaacctgcactgtcgcaagccatttcctgctcccctcttcacctgctcactcctgttgatcctgcaggtctcggcttgaacatccttctctgggagctttccttgatcccttgtgtctaaagagttgtccctcttcttttataaaaattgtggtaaaatacatataacataagtgtgcaatctgaaccacttagaagtatataatgtagtggcattaagtccattcacactgttgagctaacatcacccaccatccatccacagatctctctccatcttgcaaaactgaaagtcagtgcccattaaatgattaactccccatctctccctccccagcccctggcaaccaccattctattttctgtctctatgaatttgcctgtgctaaatacctcacacatcagtgaaagcatatggtaggtatttatttgcccttttgtaactggctcctttctttttaatttttttttggagacagactctcgctctgtcaccccaggtggaatgcagtggcgcgatctcggctcactgcagcctccacctcctgggttcaagtgattcttgtgacccagcctcccgagtagctgggactacaggtgcgcaccaacgtgcccggctgatttttgtatttttagtagagacagagttacaccatgttggccaggctggtcttgaactcctggcctgaggcgatccacctgcctaggcctcccaaagtgctgggattataggtgtgagccagcgcacctggcctgtaactggtttctttcacttagcatgatgtcctcaaggttcagccatgctgtagcaggtgtcagaatttccttgctttttaaagctgaaagattatcatatggatataccacattttgtttatccactcatctgcacatggacacatgggttgcttccgccatttggctgttgtgaataatgctgctctgagcctgtgtgtagctgcctctcttatgtacactcagcactgaaacttgcccatgtccccagtgctgctgagagctcaggcgcacagaggcactcaataactgcctgctgaaggagtaatcctgcccattctctaggtatagcatccatccattaaattgtactttaactggggccttcgggaaacacagggccttgagccagaaacctcctgtaggatgtgggggcccaggatggatggacaggaaggttctagaactcctcagagccctctatacagagagccagccctgcaagggagtgggcccatgggaccccaccatgctctctagctcatcagtgccctcctatctcaatttctacctccccaaaaacactgatggatctgactatatcaaaaggaagcatttctgtccaacgaaagctgccatatgccaaatagatggattaaagactagaagaagctatctgcaacttctaaaattaacaaagggcaacacctagactataaacaaaacttctacaaatcaaccggaagatttctaaggcaagagatccaatttttaaatgggcaaagaatataaataggtaattcagaagaaaagaagttcaaacagctaacaagcttactagacttaacagacttgctagtaatcagagaagtgtaaattaatacaacgagatggcactttacactcctaaaaatggcaaaattggacaggtggctaatattaggtactcatgaggacgtgggaagacagaaactcttgggcactcttagtggaaatgtgacctggcacaccatttccatggtgctctgaaaaacatcatggcagaacatgaaaaattaacacactaacccagggaccaaatcttccatcatatagtccagaactattctcacacagggtcccaaatgggaatgtacaaggatgttcttcagaacttttagtggtggagtaagggggagttgctgataagctagatggctatcctcaggggaacagatacgtaaaacgtgatggatgtataactcataatgcaatgaagcagttagaaaccactgactaggtacactcaatgagcatggtgagatatgcaaaatatggagttgagtaaataaagtaagaaaccagatgaaatttagacttcaatatcatttatagaaataaaaaatacatatacatacaaacaaccctacacattttataaggatccaggcttttttttttttttttttgagatggagtcttgttctatcacccaggctggagtgcagtgatgcaatctcggctcactgcaaactccacctcccaggttcaagcgattctcctgcctcagcctcctaagaagctgggattacaggtgcacaccaccacgcctggctaatttttgtatttttagtagagacggggttttgccattttgatcaggctggtctcaaactcctgacctcgtgatctgcctgcctcagcctcccaaagcgctgggattacaggcgtgagccaccgcgccctgcctggatccatgcatatttgaagacatatatcaaacacatcagaatgagtacttattgggattgggatagcttagcttcaggattggggatgaagggaggcaaactttgtaaataagagagaagttttgcacagagaggtgatcataaagtgctaatggactgagggtaggattaattcaaatgttacccacctgagacttggtggggtgcagaaaacagaaaacgtcaactgtgccttccacgtaactcaggaaaactgtccctgtaacactgtcttctttccatgttccttagaacaaaatatcgtaggagatgtgagtcccagaggttctcgaatgcagggaattttcctcttgctatagttaaaggcctcattcagatctggtaccctggacgaatgtgttagtgagagtgaagcccaagcagtcaactctccgagactgaactcacagtgctgctgcccaggggtgggtggtggttggggaaaaggctgtgaccaggatgtctgatgggctctggatggagatggcttgtttcttcccttttgagttttcaggagcagtcccacaggccactggagggtaagaatggatcaaggccaagaagctcagcaagcccaccctccttctcacccctgagacctgaaaaatagcctggcaagctgtctgcagaggtcgtgagctccccatccctggaaagccaagcagcccgagccctgggcaggatctcccactggatgggcttaaactagaaacttttttggtcttattctaatagctctggcttctctttggacgcttcttttttaaagagcttccaagtccatcattgcatagacacactgtgtattattatccccattttataggtgtgaaaatagaggcctaggaagatgaaacgattggcttctgttcacataggtggttaggggcatagccaagcctggaaggctgaattcctgactcctaggccaaacaaggcctttctcctggctgaggatctgctatgagtcagcccttctaggaatgcacatatgataaggccaggaggatagggccacataggtccctggcaggaggggatgccaacattgagatgtctgttttcgtgctaggaacattttagcattaattgaaaataaaccattaaactgtcatctctttcttactgccaagtccacacaccatcaccaagtcccacccaatcactgaactctctccattcctgaaatggcaatggaggaagcaatgaaggttggtaggtagacagattgaggctggggtagggaaagggttggggtcaggcagcaacctgaagacaaacctcccgaggcctgagtcgactctaccacacttgctcatctcagaaagggccatcaatcattctgcacaaaatgtctgcacattctctcataatatacttgtatctcaaatttcaaagtctctgctttttccctttacagttacatccgtcacactcacttactttcaatcaataaatagatgtacctacttaataatagaacttattctgttttctatttgaaaaccttgaagatggacacataattttttgaggtttatggattataattgcacttaattggtataaattagacattagcaggtaggaaggctatttgtgttgcaatataagcccttattttctgttctagatggcacaggagattctcaagtaaatttctcagagtaatttggtgctctcagtaatttaactatacatacattatttttagcatcataaaagttccttataataatgatttttcaagggtgggactgacatcccttgaaagacaaattcagtttaaaattttccaacaatacaaacacaaacaggtggaaagtaagagagtctctaggagagagactcgcccagcagagggggccatggaggtaaacccctactccatcctcggctttcctttctgtgagtggagccactgtgctagctctagggtaggcacaatgtctttctctgatggtggacttgataggagctgccctggggttcctggtttgtgccaggcatatttttcggatggtttcctggtggtggccacatgggactcccagggtctccctgaagaatgatcccttatggcaggaaaagggagcctccagcattttaggattcatgctttatgggaccaaaggctaatggagactttatgtctgctggaaatttcacaattcaggtgagaaagaaactgaccaacgttcacaaagtcctggtcaggaagatgaagatgctacaacaatgtgaggcgggtcaaggtatttccagtgccctccctcacttcccatttcctcatgtccactcagttggtgcctattcaattggttatataataaccccatcttatctcccagtctcttgttccaactcaaccaacccaaaccatcccaataaatctgactcacctctatctcatgccattctaccacaatacatctcacctcccctccatcatatcccaattgttccattctactcgaccccaactccacccaccccatcttatcccatcccaccccagtgtcttctaacacattccctccccacctcaccccccatcccagtcaatcccctgaatactgcacaccccaccctctcgatcccatccccgacatcacatctcactcaatcctatcccattccattccatcacctgtctcactctatctatcctgtgccaacacatcccaacccacctttgatcctacccaacttacaccttcctacttgagctcagtctacctcaaattaggctgtttctccaatcccaccccatcatgttccactccatctccttccctctcatctgctgtttggctaaagttcacatttgtggatgtatagtgggtcatgactatctttcatgtgacattaagctacctgagaaggccaaaggggtctcaccttctcccaaagctctaagaactaagtgtgtgtttgggtgggagagaagaaaagaagataaagaatctcatttttagaagaggagtatgaaaagacagtccaggagattgagctctctagagtccaggggaaaaataaatatgagtttcctttgtttctcttaacttacaagagtaagaaaagagctctgagagccacgccatcattttcaagtagagaaactcccacgttgcatagcccactctttgctttctgtgggtccaagggaaaaccaagcccttctcaaagcgagtgaaccctgagacagagtctttgtaagcataaagactctgaaataatcctctatttgcaggttcaccccgatgttcccctgttgttggggaagctctcacgacactgcagcagatggagaggaggggtgcaaggccatatgccacccaaggagataaatccagggagggcaatgcagtgcattctcgaggtagagggttctccctccctaccctcctggatgaagggcactgagctgggttgatgggttgagtgaggggaccaggttctaaggtgtgtgctttcagccagaggagcaaagagaaaagactccccccactgggtatagtggtgccagagagtggcagagtgtatgaattgtttctcttatatttctaagaggctggtgctgaaagcaagtagaccgtagttgtagtaatagtaatagtatctaacatgtattgaatggtaacaatgggcccagcactgtaacaagggctttccaaaaagatgggccctagggtcaggtagacttgaggtttaatcccgccttctttacctacctgctctacagccttggcccagctgcttactttctgagcctcagtatcttcaaatacaatattacagtgataattaaatggtaatgtctacaaagcatttaaccagcactcggtaaaggagagctattattattgtgcagatgggcctggggctgcctcctacttgaagatgccccttaacccgtttccagtcttcccagcccccagctgcccttgggaatgcccaacagggtggtctaaaggaaagggagccctgggctccaaacaacctgcctctgattgtctcatcagctctgactgtctcatcagcacacttactgagtgtccactatgtgctctacactgccctgcctcagttcacagtcctttagggaaatgagacagataaccacctcactaagcaagaaattccaatatgtcctgatgactctgacaacaaaggaaatgtgaggagttgtaagaacccacagtagagttccatctagatgggtgtttggggctagaaaccaagaatgactttacagcctgccccccccccacccaggagcttgtggtggaaaggaatggacaatagctgcttgaggattagaagtgtgggattcaggcctcaaaagcagcacagtataactgatgaggacagcccagtgggaagagcaaggccaaagaaggcagcctgggcagacgcttccagggacgtggtaccagctgggtccccaagaagttgaatggcaacaaggttatgagtaaaagatatggcgtcagccaggcctgcatccaaactgtggctcggctatttacttagtgcgtggataagttatgtgtcctctctgaacctgtttcttcatctatgaaatgggaataataatactgcaggcttcactgggttgctgagaggattgagttaatacatccaagtgcttaagacagtgccggtgagtactcagtgaatatgagctgttattataactcccctgggtgtccagaacagctctctgagcatggtaggtggggaaggacatggtgagggcacatagacttcctggctgattcctttggccccagcttctatttaataggcacattcgatgaggtatggcactggactcgttgcatctctggtttctaatccttccaaaaactcaggaattacttgtcctttttacagcagggagactgagccctagagaggcctgaagatcagctgggtctccagcaaggctctgcggagcaatcaggttcccttaatcctgctggcgtgatgatgagggtgaaacaggcaggtcaggcacatgaatgagggtgaagggggtgctgctgaagctgcctgctgggctctgccggagaaacccaaaccaggcagtgtccaagaccctgcaatttggtcctccagtccctggtgcatgattctaatctcaccttcaacaaagccacacactcaccagccctagatatggtgggcactctccgctgcagtcagctcattttttaaaaaccataaaccctcagcttgattgcaaatggaaattcaaattcatacacacactggtgactgagtagtgaaacgcctttccttggctcagggttggaggagagtggtatgccaagggcttattgttgcattggttctagaacctagggaactgtaaccaaacggtgatacttagttgtggggaaaggaacaggggaccagatgtctttgtcatcttattacctctgcaaaccagctggcttccttgacccccgatttagtcttatcagtccttggaaaactctccaagaaaaagaaaactgtaaaaatcatctgatcaaacagccatacatcaagcaccaattctatgccagaacctgagctggatatggggataccaagagaaataaagcaccatccctgccttcagtaagctcacattttaatatataaggcagacaaataaatgctttttaatacaattcagtttgtactacagtagaacattgagtacagtcagtgctctagtctacaagaggctgactaaaagcaagcactcagacaacatacaaagcaggggaaatttttttaatttggcatttgatttttttaaagccatgatgtaattggcacgggaaaaatcagaactttgtcagaattccatctacttaaactatctacttatagtttaatattgctttttaaaaattagttagtaagggagtggaaggcatgatagctttttcaatgctcagagctcctcaaggaaagtagctaggttcgagaataattgaggatatgaaactgacagaatttgatgaccatatgataaggaaggagttgaggataatccaaaggtttctgggctccataactgggaggctacaggaaccaccagctcacaaaggaaatacgggaggcttaagaaagaagctaataagattgctctggaagggaaatatctaagtgaagatgtccaaggatcagctggatacatgggttacctagacccagaattcccatggaccaggaagccaatagatgaatttcaggagagatgtcttggcagaagagatctgtctggaagcttcagagtgtggtagtgaaagggttgggcaaggatgagctcacccagagagtggtgaaaaggaatgggaaaaagtacaaagaattaaatgctgcaggacactatacttcagggaggggaataagtgttagtattagagactgagaaggaacacgcaagagataggagaaaaatcagtaaaacatagtgtcccagaagcccaaggaagagaaattcatccaaagtggccacagccacagagagataaaagaaaataaagataaagtacaatgtatttggcaattgaggtggtcattggtgctctcttctagagtgttccagtgtcatcctggagacagaggttgaagtaaggagtgacgggtagtagagaaaactgacatgaagacccctttgaagagaagtgactaaaagacaaaaagagatggggcagtggcttagataggtcaatagggccaagaaggcttcttggcttgttttgtggtaaagatgagcctgttcacaggtcaaagggaaatgtgttttaagaagggagggtggccaggtgcggtggatcacgcctgtaatcccagcactttgggagggcaaggtgggcagatcatgaggtcaggagttcgagaccagcctgaccaacatggagaaaccccccttctctattaaaaatacaaaattagctgggcatggtggcatgcgcctgtaatcacagctactcaggaggctgaggcaggagaatcacttgaacccgggaggcagaggttgcagcaagccgagattgcgccattgcactccagcctggacaacaaaagagtgaaactccctctcaaaaaaaaaaaaaaaaaaaagggaggatgattgatagggacagcaggtaattggtgggaagtctccagggaggctggggtggggagggggagggggagtgcaaggcaggacaaggactaaaggggttgaggggagaaggtatgggtgggtgaggagactcccctttttcaaactattttattcatttatccagtgatcactgagccgaggaagggagacggttcagtcctgagcatcttttaaattcaacagtgtgaactgaacacaaaatgaatgtgtttccccttctaatgtaccaaatcctgccgatcttctgtcaccaagtccatttccaaatctctgctgcctgcaaggccaaacagcccatctaaaggcgggaaaggcttaaaaagaaatgtactgggctgggcgcggtggctcacatctgtaagcccagcactttgggaggcagaggcaggcggatcacctgaagtcaggagctcgagaccagcctggccaacatggtgaaaccccatctctcctaaaaatacaaaaattaaccgggcgtggtgacggtcgcctgtaatcccagctactcggaagactgaggcaggagaatcgcttgaacccaggaggcggaggttgcagtgagctgagaccgcgccattgcactccagcctgggcgagaagagcaaaactccgtcttaaaaaaaatttaaaaagaaagagaagaaaagaaaagaaatgtactggaagcttgcaagccagagcagggcctgccggagaggaactaccccaagccatgaacacaaggccccctccccgcaacttctctactgagcaaggagctgcgagcaaatggatctctatagggcaggattccagcaccgctgagcggtgcaagcgccggtgagtcggcctttttctctcccctaggggcaggatatgcccaaggggcagggacaaatctagccagaaaaacaattcagtccgatgccgagacattctccaatcagctaagccagagaccggcctcgcctcaacgtacgtccgggaggcctggcgggaggtagcagcgattcccccaccgcccatgtggcaagtctgggtgaccagcagcgtcggtatgcacagcctcccagtgggtgtgggtgtgcgagaggccagagctcccaggcgcgcgcaccgcgggcgcccctctctgggtgtcggtggctatgactcttagcagaacctaagaaagtcccgtcagctaggaatgagagagccagagctggctcggggcgccctccctgaccaagaaccccaacatgccgcggttaagcggtgggcgacacggtctgcgaggacagactcacaagacgctgaaggccagagtgggccagagagctcgccactcactgacctgccagaggagaggcgcactttcccaagaaggggaactggggtggtccaggccaagccttcagaggttcaatcggtggtttcaaaacaaaacaaaacaaaacaaaaacaaaaacaaaaaagaaaacacggctccaggtcgaaggtgccctaggtctaggcctggccagcaggtgtttcggtttctcccccagtgggtgtcagcctcgcgggctaaatgaaaatgcggttccaggcatcccggtttggacccgtctccacccgggcacacggaactttctagcttgtagctagaactgagcttcggaggggtgctgtgggtaaagcgggagggcaccagtcgcggccagtagcctccacaggggaccgggttccctcgaaggttcgcgtacctcccccgcgcgctgcaagctgcagccagacacccgcgaagttccgggactctccgcacccgctagatctgccccttcccggactcggtcgtcgggagctggtcccgccgcccgcgccgccgctgccgctgccgcagccgaggcgctcggctgcagcagggcgcgggaaagggcactttggcgcggagtgagcaccgaggggaatgtggcagcgcgaagcctggcggcggcactccctcccccgcctcgggctacaacccccaccccctccttcccatccctcaacaccctccagcccccacctgcaccctcctgcaaggaatgcgcgggacccccaccgtgggcacgcgtccacctgaaccccctcctagctccgagcgccgagggaggggtagcatttgaggagggggatggcggccgcagtctgcagtcggttccagagggggcaccggtttcaattggagaaaatgggcgggggcagggaagggcagaccttgcagacgcagaaatggggagggggcgcacggttcctctccagcccccaggaccagcgtgcctggcagaatcaggagccgggggagtagggctcccggaaagtttatcgggaaaaagcctagcaccgtgggggctgggaggctggagaaactgaagccacagaccaggtgccccgcaaccccgggcggggatgtctgtctcccaggcccccacaccggccgcatccgtccaagttgcggctggggttggggcagcagtgagggtgagggtggaggtgaggacgtggctgagggtggggtgggagacggaggcagggatgagaatgagagtaggcaactgggagggtgggagattcaggcagggatagaggcggggggagggactgggaccgggtcgaggatgggtgggctcggggctcgggtggggcgcgcggcggccgctggctcctcggcgcggctggactcacccgcggcggccgagacgctgagcaacccacagcccagcaacagcagcagaggcggcggcgttggcggcggcgggcggccccagcggctcccggcgcccggcacaagcgccgaaatcccggtttcgccgcgagccctccccgcggggcagccgcagcgccccagctcccgtccccgcgagcgcggcatggcgcggccggcagcgccgagggagaggctccgctcgccgccgaggagaaaggaggtcaggagagctctggagcttttttctgctcggaaaaaatcccggtacgcgggagccctgagcttctgcggctggaatgaaccaagtgtccgcccggccggggagaggcgcgctgcgctctcggaaatgactcgctccaatcccgcttcgcggggttcgcgccggggggcgggagggggtgaattatccccggattaatcactccggagccgcttctccgccgctccaaatgctgggggtggaggcgcagctaaggataaaatattggggggcgggggttcctcttcagcgccacctccacctccagataaaccacaaattacatctaaagggttgtttatccgtgtctgttttgcaattgaccagtttcttttaagttcagtcctcctgttttcatttataacatcacccattaatacacccccctctccacacacacacacacaaacacacacacacacacacagtgacagagacacacgcactcacacacacaggcacatacacgcacacctcttccacgtttggaaattggaatcctgtctgggaaaaggtaaccaaagaaggacgcgttccccaagtcttggctcttaccagctgatcttgggtggtggctttgaacttgccatctagggccgggggcgatgcttatgagcctcattcacaatagcctcctaccccatcccaggagaggggcgtgtgtgcgtagacagaggcagggttaagaattggagggcggtggaggggggttgtgtgtggggtggggaggggggggaaccggttcatttgacccagtgcggtcccactcctaccctaagacaaaaatctcagggtggcagaggcggtccctgtgtgcacgcgagttgggggtggggagtgaggttggtggaaggacggtgcaagagttactagtacaatttatccccaaatttaaataatcggatcctacttcttcttctccccttcctcctcccagccaaggccccaaaccaagagagttcttcccaaggacgtgagctgctccccacctctccccagtagcggctgcctctaggccccaagggcttagtgtcggtccccaccccatcccccacccgactcggtcgccgtctctgtctcgtctactccaggcttctccgccagtcacgatggctccttcgctgtctacgccaaactctcggcgagagggaagagacgcttcatggggggaggctggaggaaactgggaggggcaaggtccagagaggaggcttctgctggcgcgtgcagtggaaaggcacctgcgatgggcacccccgccccctttgccgacacaccccagagaagctgtgctccgggcttagggcagcctgatttggccaaaacggagcgttggcatctgtgtggccaagggggcagtggccggcgggcggtggggcctgagaatttccggggaagggtgtggagagggactgtagggatggcgagccaggctgggggtggctggcgacccaggttggccggctgtcagcgtggccaggaatttccatccaaggaagggtgtgaagaggggctgtggagttgacgatatgaattggggggcgggggcagggctggaggagtggaggcttgtccctactccccatgaaaaacttcctccccagagccacgctttcgcagcctcctagatgccactcttcctccctccccccaccccaagttgttccggtttccctgcatgagctcatcccacagctggggagccagcccggtggccctgggcgggcgaatctcctcagaatcgcgggcctggtccccacccccaacacgcttgtatgcccgcccctcccgacgccgccttgctgggtgccaagaaccaaccgaagcagccagaactcctcagtgaaaggcctgctttatgttcccggggcagtgaggagggggcttctcccttcccattgtccagactcagcccccgaaagagagggctcagccttcccaccagccctggagaggaggaagggactgactacgccagcagtgagtggtggtggtggccttgggggctgttagctgggcttgcctgggggtgggctcctggcttctaagctccgactttacccctctcttggaggcggggttctcctccagagaaaggaactggcagagatgcccaggcctcctgtgcagcccacagctgggcagaagagagtctgggctgctctgtaattctggggctgcaggccaatgggctttctcttaccctcttctcagctccagaactttgctctgtggctgcaacgggcagatgagatttacccccagaactttcccgggcaaaaggagcgtttgtcatccttctccctgggggctgtggagggcagggcacctattttatccctgcaaaaggcccagttactcacatcctccgccattcctgctctctgatctatttgggtccacgtgctttcactgagcgcctcctgtgctcgggggccctgagcgaggctgtgctctgggccctgcagagatgcacagtgtgtggtcctgctttgggaggatgcaggccagaggtggaaacccacacgtaactgataccgtcagacagcgataatcaccatgactgaagaaccggcatgctaccgagaggcatgtcaagacagtgagcttttcctggacttgggggatcagaaggctaatttaagaaggaaagtaggatttggtctggaacctgagacatggataaagaccttgaaaagatgaagattcatttactcaacaaatatttattgagcatcattatgtgcctgggtgctgtgctagacaatgaatatacacctagtgcacagtccctgacttgatgaaggcagaaaatatgtatacaaatacacataaagttactaattaaggatgctacaaaaggaaagtttatggtgctaggagaaacaatatggggatgtgctttaaggagatggtctgagaaggcctctctgagatggcaacggtggaagatgggatctaaaattaagcaagatgctcaggaggctaaagccagaggatcatttgagcccagctgttcaaggctgcagtgagccatgatcacaccactgcactccagcctgggtgacagagccagactatctgtctatgaattaattaattaattaattaatataataatagaattaagcaaggcagccatgcaaagttggggaaagagcttttggtatagtgagcacaggcaaggctgtaaaaaggaaagggggccaggaggaggaggatggggctggatccaggtaagcaatgggagatagggagtggggcagatcacatagggtctattaggggatggcgaggagtttgcattttattcttagccagtgagaaatagaaggtgtattaatttgctaggactgctgccacaacaaagtaccatagaccctgtggcttaaaaaacagaaatgtattgcctcacaattctggaggctggaagtccaagatcaagaggtcgacacagttggttccctctgaggcttctctctctggcttgtagatggctgccttcttctccctgtgtcctcacatgtgttcccatggtacatatctgtgtccaaacttctaatcaggacaccagtcatactggattaaggcccaacccaatgacctcattttgacttaactgactttttaaagactctacctccaaataaggtcacatcctgaagtactaggggttcggacttcaacctatgaatttgggtgggggggcacacaattcattctataacaggaggagatgacttttcagatggagggaggagagagatgcttgacagtcagaaaatatatgtaaagagatatctgtttacatttattttctgtgtatagcatggctcctttagtgaaaagtagacagctctgaatatgaaaggtaggttttcatttctgggaaagagacgccaagtgatgtggcctgacatatactctaacttctctgtgaggaaagggtaagaaaggaaagggtaccacttagaagactactgcaatagtctgagccaggaaacatgggggcaaaggcagagatggggaccctggaaacatctgcagggcaatggagaggcaggagtcaaagacataacagcctacccgcatctagcctaggagagtgtgggtctcagcccagccccaagtgctggctccctgcctgcccctctcattctccctgtgagcaacaggcagtcgtgggttgaggtgtctttacaatatcacattgcaaaaaagcccaatgcagtctagtgactagccaagataagcctaatatccagataaaatcagagtttgatttagaaagaatacaaggcctgatgctctggagaactctgcctcattcaaggaggagctgtagacttgatgccctgaaattttcattctgacccaggaaaagatcaaaaagccttctgaagctgagagagagagagagagagagagagagagagagagagagtgagcaaatgggagattctagcaatgcgagggcagaaatagaggccaaggggcaggcagggctgcagagaagggctacaggacaaagatgggctcagaggaaaagcttaggatcccaaatggggcacaattttaaaatcatgagcatgatcaggccaaagcgagtatctcccaagggcgaggctatcaccatagaggtggcagtgatctgctgcccaaggagtggcgacagaggggcttcatgaggaaaaagcccagaccacaccaaggtgaggctgtgggcttctgaaaccaggagggagaagtgagaaggggcccacagcctaggccattcctctagtgctaccacatgctgtggtcaccaaattctgacattcttggtgaaaattcttcatttgtgtataaggaaaaagagttcatgccagtgacaaaacagggtgttaagccattgaaatattggagtttgttacagcagctagcaatacttttatgcaggcttgctcattttttgcatagtatcttgtgtagtcattcacttactcttcacttactctttcattcatttgttcatgccacactgagctgcatgtcagagtctgtgctaggtgttgaggaaacaaatataaagaagaataagacattcccatggcccctgtcctcagggggttgagagtttattgagaacagcgttaaacagcaaagcatgattgattactccagaagagatatagcatgtgatggaaataagaagggctcctagctcagcctatgggaaagggcaggtgagaaccagcactttctaggaagaaagcacagagtgggccagctcagggagggaggacacagtgtgtaaatctgcagcactcacagggtaccaaggaagggtgtggggtggaaatagacctctcttctgactcaacagtctctccataattgctggctttcttatttgtccctgctggtggatgggcaactctaggatggaaacctcttttctcccaagtcccagggtctgtattgtatctggcattctctctcctcagatgtctcataggagccccaccccaccccttccaccacagcctgctcagacctgggcttatccacttctagttctccaccccagcctgcctctctgctcagctccccaattcagggaacagtttccacatccacccagatcctgagccagaaacctatttatcctggactcccatcttgcccagtccccacatcaagccatcactgagccctccagattctgcctcctagacacctcccagattctaaccagagtccacaatggctatgtttcaggttacttacaacaactgagtaacaagtgcccatctctgctcttgccctattcaatgcatcttcctctctgccaccagctatctttttaaaacactcacctgatttcacagctcctctgtcttccccggactttcccctatggcctacagagtaaaatccaagctccctgctagaccctccctacaagagcccccatcatctgtccctgccagcccctctagcctcagatctccctattcccaaatccctcagctctaagccattctgacacccttgcactcttgcaatgagccatgctttctctcccctttcccctggatccttctgtgttttgttctctctgcctagaaagcttcccttctccttctgtgactagccttctcctatttgcccttcaaaattcagtccaggtgacagttcttacaagcagtatttgtcagtgccattcagagtgcctggtacatggtgaacattcagggaatttttgctggatgaatggataaacagatggatggatggatggatgaatggatggttaagtaggtgctcagtactgtttgtggaatggacccaaaggtatctcttctagacttcattatttgagttccttaaagaaatgcctccactgagttatgatttaatgttatgctgtcttcagagaaccctgatgcgagaaactgacgaacctaacagcatctctgtcttttatgaaaacagaattgcatatattgcccactatgtcactcagtgtcctttatacaaggactcatgataaattcatgcttggggttatttcctggaaacattttgtctctgcagatgaagatgtgtattttctgctgtcagaaaacaaaaactctgccacccgacgtgtttccatttttgctttagctgacaaataaggatacccagttttattgccttattacctccatgaggcctgaccagttcgggtgctggaaagtagcaactgtttctgttttccttagagtcagttcttcctttattctttgatgctgtagtttgtactttttaatctgaaagctgcctcaaatcatctcagcagtaaggtagaagaagtcttaagtgaatgcattttagtgaccaatgtcccggcatggaagctatggaaggaagggcaaaatataaagcttctagctgaagggtttcccataaagggcctcgccaggaatccttggcatacctatcactactggggtctggcagaaaaaccaaagcaggaggaaagccagctgaattctgactttgtttctacctcactggaccactactgccaccaccatattcttttattctgtcatctaggaccttccttttccctaactttaagtggagatctcataggctgccatttttacattgctaggctctcaataacaatagctagtgataatcataattacacatttctttttattgagagtttaccataagccaggcactgtgttgagaagttcacgtgcatttccatatttaaaccttcttcctaccccaaacctattgtttttacaactttgcagatgaagaaatgtcagagaagttaagtatatacaaagccacctttatcaagtagtagagtaggaattccaattcaagtgtgtcagctgccaccacccgagctcttaactgcctcctctcatgtgggcaaggaacaaggcaatagtaagggaaaaacccccaagaaatggcagagatcaccgatggtgttgccaggagagagaagccacagagtcacagctttgcttgcagaatattcaaggttccttttcaaagtcctagaaatggctggctgctctgcagccctgtcctgttgctgagacaacatgagggggaggcccattcccatgaaacatggctgcaacctcctcttcctttagctgtgatggttaattccccaagatatttgcctgggatactcctatgcatggatcctgcctctgggcagtttgacccattgagcattattcgcatgggaatgggggtccctctgggttttagggacctacaaaagcgtttgagtcctaaatattttatgattagtcccacaatacaaagaagaaaactgccacatggaaatcagtaaatatttaattaaatgcagagtataacattatgtcaacttcattaactgttggatttagtagtcataaaaatttcattgcatttggtaacaatttgtaggttggagttttctcactgcacaagatttctcgagtaggcactaagattggtgagaaatcacagcccatcacaaattaaataaattactcatggccaaaaactttcaaaagcaaaatggcaaaaatcctttcaattttcctctatagccaaaaagttatttttatggtgagaggtgggtgtgtttaaaatatgttagatgaggaacctaaaaggacctacaagagtaagcagccttaggggctatatgatgattgtaaaagagcctaggccattcccacgtttctgagttttccagcctagccatgtttgtgtcagagatgaaagccagatgagaagaggctttgactggatgggaggtaaggagaattgcctcctccttaggccttcctggttccacagagaaaagctaagaatcccagaattctaaataatgatagccaacattcactggatacatacattagccaagctattataagcactttacatgtattatttcattatcgtaaaacaagtctatgaggtcagtattttattgtctctgtttcatagatgagcaaatggagacattgaggttaaaccaacctgcccagggtaatgtaagtagtcagggggaattcaagaagttttccaagctaaaaataatttacagattaaatggtgtccatgaccattaaatgcttcactttaaactctaaaaaagacagagaccaaactcctcttcttcactactctatcttcagcacctcaaacagtgctgggcatagatacatgtgttggaggaacataactccatgttggatggaaactggaataagtcagtttatatcacactgctctgcaccaggcacttatggaatgctttgccccgcctctgtcactaggtgattctgtctagggtagacatctttttcatcatctctaatccctgtgtctttcacaattttgacccatgatggatgctcaaaaatgaacaaagcctggaaaggcgtaagtgattatgtgaattcgtttctccatcacagaacaacttccccagtacaacacaattctccctctctacacaaaacacaaaagctgctattcagaaactccaaaggcatgcatttcagtgtaatcaacaagcaaacaactgtataacacgtttatctgtcagttgttgttcaagggactttccatgtgttaagcaattggttagtaatagaacatctgtagtaattctacaaagcaagtattcttcattatcatcccattttacagactaagaaatcaaatgttgtgggctgaattatatgctgcaatcctaaaccaaatacctcagatgtgactgtatttggagatgagtcctttaaagaggtagctaagattaaaaaaaagaaaaaagccattagggtgtgtcctaatctaatatgactggtgtcctttaaaggagtgattaggacagggacacatatacagggaagaccatgtgaggacatagggagaacacagccaagtgcaagccagcgagagagacttcagagtgaaactaacaatgccaacatcttggtcttggccttctaacctctagaatggcaaggaaataaaattctgttgtttaagccacacagtctgtggacttcgttatggtagccctaccaaactaatacaccaaggcacagagtaacttgcctaagcttacattgccagaaaacgtgaactcagaatctgaacccagggactctggttcccgagaatatgtatttaatgataagaaatgttctctgtgctgtccaatatggtagccactagccatatgtggctactgagcacataatatgtggctaatgcaaatgaggagctgaatttttcatttaatttatataaaaataaagttaaaattaaaacaaccccatgtggctagtggctaccatatggacatagctttatactatttctaagtacatcacttaagatttttgcagaattttctagaaatctcgtctgtgcactctaaaaacatgctctatctttgttccgtatccctgctgtatttgattttttttttttttttttttgcagtcctttctgatttagcccccgttgcctggtctcctgctgagggggagagggaacaggaagagtgagtgagctggctaacttccagaatcctggggcctgggcagtgcagggtcgttggcgttctgctctaagcttaaggtgttagccaaccaaatgccaagcagcacaaacactgagtgacattttcagaactattaatatttcatcagaaatgatcacttttcctttaaatacactattttaaaaggttttctacattcttaactataattttattcagtctaggccctcagaattttccccaaaggaacacatcttcaattttgtaatgaaaatcaaaggagaatgaagctcagatttcaaaatttagagtaaacatttccaggaactcagcccctctgtaaagagcaaggttgcgtattgggcacctactgtataccaggcactttacatacagtataccattaattcatccaacacatattttttgagtgcctactatgtgccagaaacatgatcctcataatttattaacaccattttacagaaaaggaattcctctcatccttctcaaatttttctcctcaaagaagtcggcctggaccaccatggaatattgcctcccctc

SEQ ID NO: 458 - DNA, 107615 bp, Homo sapiens
tatctaggcaataagattaatatggaaaaagtgattaagaaattcaaaagaacagattacattttcatgtgtgaactgcctcaagataaaactacatagactaggtatgtgtttgcatttcactatgttctacctccttcaataattgggggctttaagattcacaagctaggtgcaaattattgctagtgtgactcactattagtgatggaaatgtgtcatacccttcagatatgctgggaaagaaaaaaggtcaagaactattttctttcatatacccaggtaaatcataagggaaaaaaattttttaaccttatcagctttcaagaaggaagcagggatagaaactccttgagaattcatcatttattaccacatagctgagacagaatgtgagacacaatgagcagatccggctctgtacaaccatatataacctaagccaaagactccatggcattatcccaaacactttactgttctgttgtgtctacaacttagtttattctggactaggaaagggaaaacttccttatttgtcaagcttagtttttttctggactgggaaaagaaacacacttgactgtgatcaaatctgttacaatatttccaccactcttcctaccccgttgatcatttatttccctcattttcaggaaaacatgtcatttttctaattctacaagataaatggcatgtgtattgtgagcttgggtatatgcacatacacacacattatcataagccaaatcctaccacttacagtaattttcttgaccctcgatgtggccattcccctgtaaaagcccagtatcttggggctgggcacggtggctcacgcctgtaaccccagcattttgggaggccgagatgggcagatcacaaggtcaggagattgagaccatcctggctaacacggtgaaaccctgtctctactaaaaatacaaaaaaattagccaggcgtggtggcaggcgcctgtagtcccagctactctggaggctaaggcaggagaatggcgtgaacctgggaggcggaggttgcagtgagccaaggtcgtgccactgcactacagcccgggcaacagagagagactccgtctcaaaaaaaaaaaaaaaaaaaaaaaaaaaaaaaaaaaagagccaggcatggtggcacgtgcctgtagttccagctacttgggtggctgaggtagaaggattgcttgaactcaggaggttaaggctgcacgtgagctatgatcacaccactgcactccagactgagtgacagagtgagaccctgtctcaagagaaaaaaagtagctcaaggaaaataatatctttaaatattcctctttaggtggggcaaaggacatgaacagacactattcaaaagaagacatacatttggccaacaagcctatgaaaaagtgctgaacatcactaatcattagagaaatacaaatcaaaaccacaatgatataccatttcacaccagtcagaatggctagtattaaaaagttaaaaaacaacagatgctggcaaggttgtagagaaaaaggaatgcttatatacttctggtgggaatgtaaattagttcagccgctgtggaaagcagtttggttatttctcaaagaacttaaaacagaactaccattcaactcagcaatcccattattgggtctatacccaaaggaatataaattgttctaccataaagacacgtgcacacttaatgttcatcacagcactattcacaatagcaaaggcatgggatcaacctagattcccatcaacggcagactggataaagaacatgtggtacatacacaccatggaatacaatacagccatagcaaagaacaagatcatgtcttttgcagcaacatagatggagctggagaccattatcctaggcaaactaatgcaggaacagaaaaccaaataccatatgttctcacttataagtaggagctaaacattgagcacacatggccacaaagaagagaacaacagaaaccagagcctacttgagggtggagggtgggagcagggcaaggatcaaaaaactacctatcaggtaccatgcttattacctgggtgaggaaataatctgtacatcaaacacctgcaacacataatttactatataaaaaaactgcacatgtgcccctgaaactaaaagttttttaaaaaataaatgtatctttttttggggaaaaaaacctggataataatgcattagtacattattaacatgagcatttgaagacagagagagattcagtgacgaagattggcatatagaacagtcatatagaaggaaagaccaggaacagactttctgattttctatttgttcattcattgcatgaaacccatcaaattttagttgaaaatattctgtatattctgatgtattcactaaaatacaagctctatgagggcggtgttttttggtctattttgcttagtgttgtattcctagcacctgaaatgagcggcacaaagtaggtgcccaataaatatttgttgaaaataaatattgctatgttctagttagctgagcatttacagtagagaactcttagggtcttttccaggcaggagagccagtgatttttattaccacagaccaaactagttttcagattttccatcaggaaagcaaaacatagagcaggagttttggcaaatagcagggattggagagagagggaagaaggagggcaggaggaaaggatgcaggaaaggagaagaggaaggggtaatataagaattttgtatatattcctctgaaggaaatctgaattacaacaagacaacttacgtaaaacgaaaatgcatatagtattaggaagcatatagggtcactatacaactgcacccttaccttcttacttttccatccttaactattctccataaacttcccttactcttaaaggcctctatctggttgtccatccgtccttcccagggttctttttcattatgacttaagaaaacgttactcagcaatctttttcaccttctttatctgcagacctattatctgtccttcctggataaggagaggtagaggaaactgtcccgagtactgagatgtacatgggatgaggcctgcttctcttacagcctcttccctgaatccatttcctaaattgtatcaggaagggtctccaaaattctcattctctccctccaggagtagaactatcatctaaccgattttctacgctcgtcttctttcctacagaagtcttataaatcctgtttaggccagtagacaacaactacagtacttgtttatgtagggtcacttaaacatgttagttacatcttataagaaaatttcaaagctggacacaatctaagtattgttcctactttatacagaaatcaaatttaactcattccctgcaaaaaataaatgttttaaataaataaatataatttttgttcttagtaatgatatacattaagctgctaacatgtaatgataaggcaaaatcggataaagatctcagcaatctactaaatttagcattatgtgttataaacactttaaaatttcagaagttttttgtaagcttgatagtatgagttagatatgaagctattatatttcttttctctgattaagaaatgtactaatgaattttaaagtaaatatggtaataatgtattatacagcattatctctttcaataagaagatattggccttaactaccactttactgagccataaaacctaactctatgtgttcattcatttttttgttggttcactgttaaatccctaacactcaaaacattgcctatcggttaaatgtgtaaatgaacaaacattgactatgtacctcttataggccagatactgtactaggttcaggaatgcagcaataaacaagaccctgctttcatggaaattacagtctaggagagacaactacgtaagttaactatttaaccataattctgataaaagctataaagaaaaagcataaagtatatgaaaataagacctaatattgcttgaaaaatcaaaagagacttttctgaggaacagatatttaagctggcaccttcaaaaagagaataggatttagtaaagggaagagtaaagagagaaactattccacataggtgaaacaggatgtgtgaagatccagaggaagctaggtgtgtattgtctgtcttccaagaactgaaaacagatcagtgagattaaagaggagaattgttaaaaataaggctggagtggaaggcagagctcagattatacagggatattgtaaatttttaaaacttcctattttcttgatgcctcaacattcccacaaacaggctatgaacactatgtctgggcaatcaggtgcaccagtgtgagaaggctggttcctgccacaagttcccctttttgttattctgagtgtgatctagtgacattcaaacactccaatgaaacactctcatgctttttgcttatatactgtaccctgaccaccaacaaaggcccttgtccataggtccttcccccgaccctctctctctctgctccccacctgcttgggtgagctcactccctgggagttcctcccacatgccccctgcatggcatgccatacctccctcttctaggacctgccaatataataaatctccttcattttcatatgcctctccatggtgttattattacatgtccacatctgaccgatcatcaaaaaaacaaacaaacaaacaaaacccaacccattttaagtaacataattattccttacaacacaacaggagaaaggggatcaggatatgtcacctcaaagtatgccactttggcataaagattttgagctgaaagcaactgagagtcaacagatgtaagaagagttctttgccgtccccttaactgcctaaaagcagggcataaattatgctttgtgaaggtgttctccatactctgtggaccaggaagaggagtgacttatcaccggagatggagagtcaacaccgagatgagtttgcacaaacagacctaactaaaataacccttatcctccattagttcccccatgtatttcctagtcacttccccacaatttatctcttaaagtccaaacctcctttcctttattaaaagggtatataaactcctaatctaattacctctttgagtttcacttttctgtgaatacttatgcatgtaaacattaataaaaatggtgtcttttctcctgttaatgtcatttgttagtttgattcacagacccccattcattgaatataagagggtagaggaaaagtgggtcatcccctacaagggccttgtaggctgtgttaaggattttggacttcatactaagagcaccgagaaccaaggtgtgacaatcagattataaggaaagtacagtactacaggtgggatatgattttgcctttgattagagaagttgaagtggagatggagaagtgggtgcattcaagatctatttaggatatatatatttctgaacagggtgacttgagtatgggagataagagaagagttccaaggtgtgatattgatataacatagatttggtctttgtcgttgactcctggcacagagctcctaaaacccttagaaggcagctatgctcaccactgtaccatcaacacacctaagacccttggaatttcctaagcaataagtgtgatgaggcatcttttcttatatttggtttttgtccctggctcctgaaatagctccagagcgatgaaggtgaaagtagcatcttgtgtcattcctaacaagcccctttcaaacacaccccagtttatgttaatgaggtgacttttggaaagccgtcaagaatgagggtcttgttgccaggaaaacaaaaatatagttaagagggttggaattttcaggtccatctcccaagccccctcaacctctggggaggagagagtgggtagagactgagttcaaccaccaatggctaatgacttaatcaaccatgcctatgtaatgacatcttcataaaaatcttaactgaagtccagagggcttattgttggtaagcatatcgaagagcctgcaaggtggcactccccgagtgggcagggaacttccacatccctccccactggcttgccccatgcatctcttccatttggctgttcctgatttgaatcctttataaaaaactgacatatgtacataaactgtttccctgagttctgtgaacaattttagcaaattatcaaacctgaggtgtcatgagaagctccaatttgtagtcaagtaagaccaaagttgtgggcagcctggagacctgccacttatgattggcataggaagtggggggcagtctgtggaactgggcccttaatttgtggggtctgtgctaactctgggtagtgttggaattaaggtaaattatacaacacccagttggtgtccacagggaattaaagaattgcttggtgggaaaagcccacacatttggtgtcagaagtattgtaagaataaagaaacagcttttcttgttttaatttccccccccccccccagcacaaccagaatacagaaagagaaatagtttttccatttacatgtgttagtaactggtagaaaatgattccaacaaatttctaaataattattagaatttaagtgtaattaactcaatgaataggtttctgggatgaccaactaggtggatgacagtgccttttactcagatggggaaaagtgaagatcacacttgtggtaggaatgggaaatcaaaagtttgatttagaacacgtttaagaaaagatgtccacattagctatatgacagtggaactcatagcaagatttgggtagagatgtaaattagacagtagatagcatttcaagccatggaaatagatgacgttgccctggaaaacagtgtggaatgacaagaaaaggtggcctatgactgagtcctaaagaacttctactttttaaagtcaggtgcatgaagatgagccgaacagagaagaacagactaggaaggttgttaaaaaaataagcagagcataatgacatgaaagccagaggaagagacggtttcaaggagagaggcagggagagacagagagagaaagagagagagagaaagctattgttaagaaagttgatgagaataaaggaaaaaaaatagctgaaaagcatttattaagactttaacatgaactttggtggagtggtgaggatggaagattgaagagaatggactaaggacagagcggttagaaattatctataaagaggagaacagataaggcagaatctagaacaggagaggaagtctaggaatatttttttaagaaagaaaccacagagaaaggtgacctaacggatgctatgctgagaaaccaaccttcctattcattgagttagttacacttaaattctaataattactcaagaatttgttgggattgtagactaccaattactaacacttgttgagcaagcagacatgaaggctatgcttgggaacagtcgggtggaagaaggaaagtgaggaaagaaactcctgtgagaatgaaaagagcttctggtgctgagaatcttcactggctatgcatagactcacccgtagcagtccaacccagggaaagctttggggacctcggaagacacacctctatggggagcatgctgcattggctcctgctttatgtaacgtttcttagtccattcaggctgatataacaaaataccataaactaggtagcttacaatgaacatttattcctcacagttctggaggttgggaagtctaatatcaagatgccggcagatttggttttgggtaaaggcttgcttcctcatagaaagtcatctgttcactgtaaccttagctggtagaaggggcaagggatttctttgggtcttttttataaaggcactaatcccttaacagcctaattaccaatgccttaacgacctaatcttttcccaaaggtcccacctcctaatactatcatctttggggttagcatttcaacatatgaattttgggggaacataaacattcagtccatcggtgtttacacgggttccttcatcaatacaaaaacctaacccccaaaactgtatccgtagggttctttgcatcaaacacatcaccaaccaattttgatacagccacacaccagaggtttcaaagatgaaacaaagaatccagtagagtgagtgggaatggttcaaaaataggagaaaatgggcataataaatggaacgaaatcccagagaatgcggagaggactgggttcagaagtcatgaggaaggactggctttccaacataatgggggaaaggatgtatatgggtaaaaacaagtttgtggatatggtggtaggaagttggaggaaaacctgacattattttctttgcgaatcatgacataaggtcttctactaagagcaaagaaagcagcaggcaggctaaaggttagaaaagagtgaaagaatgtataaactgtttttcacagtgagtcagctgacaacacaaatgaagtaggatggctagggaggcagagtcagtgatcatgaacagcagtgcttggttttgtgtgtttcaggtcagggacctaccaaacctttcctaattccttccgctgcattaaattctttctttatttgagcctctaaagcattttgttcataccttaaaacctgctttctactagaatcttgctttatattatttcatttacctacctaaatataaaatctcagtgtaaacaatggcttattcattcttgtatccctgaaagcactaagcatggttctttgtgtgaagtactagattttttttgcatttagttattaaatatatcatataaaatggcccatttaaaaatgtggtttcgagattgacttcatacattatataatcaagaaagatgaaagactcagaaattaaaagacaattttaaaccacagttaaccaaatttatttctgctaaaataagtatcctatcctgaagggcagacatttttatcatcctactgcctcagaaactaaaggcagcacagtggcttgcacctgtaatccaagcactttgggaggtcgaggcaggtggatcacctgaggtcaggagttcaaggccaacctggcaaacatggcaaaatcctgtctctacttaaaaaaaaatacaaaaaaattagccgggcatggtggtgggtgcctgtaatcccagctactcaggaggctgaggcatgagaatcgctttaacctgggagagggaggttgcagtgagacaacattgtgccaccgcactccagcctgggcgacagagtgagactccatctcacaaaaaaaaaaaaggatgacccagaaacaaatcccacagcatagaatatgaagatcaatactgaataaacatcatcaccatttaaaagtcatattctcatttggtgatttagtttaacatagaatcagatagctttctattgtttcagaagacatacaaaactttttttttttttttgagacaagagtctcgctctgtcacccaggctggagtgcagtggcgcgatctcgactcactgcaagctcctcctcctgggttcataccattctcctgcatcagcctcccaagtagctgggactacaggcacccaccaccacgcctggctaattttttgtatttttagtagagaacggggtttcactgtgttagccaggatggtctccatctcctgaccttgtgatccgcccgcctcggtctcccaaagtgctgggattacaggcatgagccatcgtaccccagcccagaactttctttctagacatctactgccattatgagagtcctacagtttaatataattatttattgtaatcatggtttatagaaatcacattttttatagattaaaaaacttaaaactaaaaaagtactaagttaaaaaaaactccactaggagattactaaaactgtaggccacattcatcttcctacaattcttcacccacaaaataaaatccaatttaggaggctccattaactcttttaatatatttctaaatcttaaatctatatttcaaaatgaacatggtacttcatatgggcccacttttcataattctttcaactcaatgttttagccaaaactgcaaacatttgaaatttaattttgaataaaaattacagcttatgcaccaagataacattagaaagtgtcttcagacattttatcaggtattttcctcattacacccaaccaaacacagaaagaaatatatatttttgaaatgtcaattactgctatgctatcaaaagctgacatttattacaaatttctgaaatccttcataagcaagtatttgattaaacaaaaatggaaaatgttactaggagatatagtttatacctggctgttgagtacattagtatcagagaaattcatgtaactatatttaaacagaacttcagtttagggtcttttcagaccacaattatataacttgttcaaaatcccactagtttcttcttaacagtcttggtaagagatgaaactgatatacttcagaggccatttccctaggagtactgcttttaaaaatcatgcaaaacaaaagccaaatagtgatgttatattttaacccaggctgcagctatttgtgttgatctgaaagcttacaagtaaatccactgttaggaatgagcactgtaaaagctatcagctatcagcgtgaacccttccatggtttcctttgatcacatgacatcattatgatttccttctccttgcgtaagtgggtaaaggtcaagaaatgcctaggcaaatatgaagagaagttattttggcatagaatctcattttttactaccagctcctaacgtttttctcacaatatgcatacctattagcaggagattggatttttatttataggtccacataaagcttcaaggaaataaccagcattagtacctcctcacctgaaaaaggcttaagtaaacactaattaaaacatttaggatcttagttgtatcaatacttctgtacctgaaagctcttttaaatgtaagggttttctttttattgttttatttacctaggattctaagaaactgagaagtcatagctttcccttaaattatacatcatacatacattgtaagaatatagaaaattaaataaatcaaataattaaatattaagttaaatgcatgactacatatattaaatttggaaattcaaagcattaatagaacagagaaaccagctaaaacaaattgtagcttttaaaataaacaataaagcccgttatttattatctaaaagccagtaaatacatttacttctttggtacccattaaaatagttgcatttgcagaggatgtttagggcagcgaaactatactatattataatgatgcatacatatcatcatatatttgtcctctagcatgtataacaccaagaggggactctaatgtaaaccatgaactttggatgataatgatgtttcagagtaggttcattgattgtaacaaatgtaccattgtggtgcaggatactgatagcctgggaggctgttgagggctttgtcaggggagaaaggaaatctctatcttcctctcaatttttctgttaacctacaactgctctaaaaaaaaaagtctatttttaaaaacaatttttaaaagttgtattcgtctcagattcaaaatattatcacacaggtgatttatcttaaaaatccatgtgagtactgacctatatgtcattttttgcaaatctaaaacaaaaatatttcaaaatgttcagtggcagagagtactggtaccacaaaatcagagcagtagaagcaaaggggatataagatgtggacattttgtagcttgaggagatggcacctagggaaaagagaattaagtgtttatttgggaaaatgttaatgatatacacagaacataggagctggaataaagaaggcatgcttaggttatagcaaggtatactcctggcctaaaatatcaccatctttctctgcatgcctgggacaaagtaagaatgggggcagaaaaaaagggaagactgagaacacagagcacttagtctacttattagcaaaaataaagtgagattttctaaaatcaggtataatgtcatctgcctctccaaaaaactgttctttttggccacagttcttatggtcaattaagctgaaattatttccaaatactgagttctaataagtactggaaagaaaactgcaatagaaaatatttgttacacagtataatcaggtatggttatgaaaaaaatgagaaaatactcaaacacggtaaattatagaataatctaaattttaaaaactaaaaacgaagtgattatcataaaatactgaattttctatttaagctcatttaattctgtgaattaggatggaccatatggatgatactcttattttaactccaaataaaacaaatagtaaaatatttgagggaagaaaacagcaaagtatgtatattctgggtttccaattaaacttcaaccttctggtgttttcaattattcctgccaaaatgtagttttctatttctgaagttttttggagataagtagcttacaaagggataatgtgatgtcttatgggtaaaaaaattataaaacacagggcacaaactttctccaaatatagaaaatagttgaaatggttcaattcatttttaccgggagaaaatacatagcaagaggtaaacagtggagccaagacctaatcaataatgcctagcactgaaataatggtaaagtcttctaaatgccaatagtactaacagagacttgatataccaggttttgaatatctaagtaaagcttaaaatacaaaagcgaaaacataatatagaaagaactatctatggttgatattctcacagactttataatttatttagtcatcctaataatactttgattttactgtctgtgtctcttgttgcagttttaaaacatttcctttactttggatatctgataaaattcattacattttcttatcaaattttctatcagatacattatataccataattatagcccccataaattgacaaatttgttgatttgcctcttctcattggtagcaaattgaaatcataagtcttctaaaagaatgtcaagttcttcaccaaattaatgtgtgaagtcttcaagatggatttaatttgtgccacctgataacaaccttttctggatttattactgtctctttccactggttcactgcttcaatgttattactgtcttcacttatccaaatctgtaaaggaaagtatgtacaatcatttaacttgacacaataataataactacattcagacagttagttactcttactgatggaagaaatttggaagtttgctttacatattttaaattaaacatctttcttttttccaaaagtcagattgatttctctatttgacatttaaatgctaaaacatttaacctgcttagtcattctgaagactagtttataaggttcagttcaaaaattcaaggtgaaatattacaaaatcatttcccctagaacagttattagtatcctttcctattcaacaaatctaggagctcaacttaaaactgatcccaaccactcaaaaatatttttgtaaggataattaaactgaggctaatcatgattcaaattagattggtaaggaatgtgcattttaaatcaccttttacaagaaataaagtgtaatcttaattaaaatctaatagtcattcttgatcaatagtaatttcatagtacccatcacttatgtaacttaaatactacatgtgaatgtatacatagtattatgcaaattgtacaaaagacatcacaataattatattattatgaagacaaggaataaaaaaacttgaattttcatcttacctctagcactaacaaatgcttttaccttgaagttaacttctctgagattcagtttctaagagattggagcaggtcattggtttcaacctttttccttttctttcttggtctaaagaaccttcctttcaaatgaaatcttacaaataatcccagtatgtaaaacagacattagagtactttcgttgatacaggggtggaagaccttgagttcccctttggctaccccatcatagttcctcctaaggctataccagataagccatacggagcagatgaccagcaagaacctttccagaattattattctaactagaatcttagccaagagaatggaatcaccacaaatgttatcatgaaaatcatctcaagtaaatttcctattccattcataccgttaagttgaggctcgatgatatacgaaaactttaactgaattgacttcataaaggcttaatggtcttcaaaattatgctggttatatgaattcttaaattcaagctcttttccaaataataaatgataaaacaacattttaattagtattttacgtaaaaatatatattaaaaagtaaatcaaggagctgatatcaatgtttgaaaattcatatataatttgaggatttcatgtagactgttaataatatcttgtcaagttgaagcttttaaaccaataatatagattttggaatttaaatgtggttcaaacaatcgtaattaaggtaaaagataatggacagctaccactagtctattcagagtaaggaaaggaaacaagttcctagaggactggcaagttaacaagtgttatgttgttttatacaaattgtaccaagattttaaaataatccagacagtagtattaactaaataatatcacaaccactgttaaaatggacatgttctaggaattcaaaactaactcaggtaagagaatataaaaagtgcccatgttaaacattaaatcaaagattaaacaaaataaatttgatactcgaagacttaagaaattgatttaaatacttaatgttccctccttccacaaggaacaagtcagtagtactgaaaaattgataattctcatcgtttttgaagtaaaaaagctcagaaaaaaacatatttaaagataaacctgattgctcagaaattccaactatttgtattaaagcaaaaagtctgacaagtttcgatttttgtagcaattgaattttgatttatgatgctgaagaactgtactctatttgactttaatattatcctgtattccctttgttaactgactgtttaaatgcatagaaaaatataaggaaggataaaaactcctactaacctggcccacaaagtgttttcttcttacagagcttcgactgtaaagcttaatgagaaaaacaatttctttttcactctgtataagtggaaaaatcatagtctctccccacttgactcttccattggaggccttcagtaagcgtgtctttttcttataaatcaactctcccgagctaaacattcccaccttcacgaaaaaacctaaaaaattagaaatattggtttataaaatgttattcaaaataccatataaagatgtgtatatacacatccaagttggaatatatatatataacatttattgtaaaaaatatagataagtcacttttaaatgtttgatgagctacgaccataacagaaaacagttctaatcaactttataactttggccatactttactactgtaactttaaatgaacttaatctttctgtggctgaatgccattaaagactggaaatggaggcataaacaacaatcacagtaaaagagtgcacactgaaaaggatcacactaaagagaggtaccaatcttttggacagctggaggtatttatttcacaattatataggtaaaatataaaagactccaggagttaagtatatgcccactagataaaatctgtactttaaatttgagatgtatagagcttccagtaatggcagaatagcttgtataaactaaccttcccataaacaactattataaactttggaaaaaaattttaaaacactaaaagcagaaagaaactggagggaagtcaactggtaaaagacgggaacttcactgggtaaaattcaggttgatatagcttttcacctaagcatactcccctatctgactgacacacagtgcctacagctcaagcagaaagtacagtctgactaattggaggtgacagagctggggtgccagggaagcaagaaagtgagaactcccagaaaggtgggagccacagtgagggctgagatccgaccgtcagattgatagaatgaagagttgtggtcatcctgataagctgttttaagggaagcccgtcataaacagcatctgttgtccttgtttcctagaattaattatatatagttctgatgatttattccaagttaggttttatttgctcatttttcttttaggattctccatctatctacacaggtgacattagtctataattactttttgtgtgtgctatccattctgttttagtatcaagaatatgctgacctcacaaaattactttttccatcttcttttcatgctttggaacagcttatatacaacagaaattacatgttccttgaaaatttggtagaatctcccagtacaattaccttggtctagtgcttttattagaggcagttctttaactaccttttcatgcttattcttttattcggattttcttcctcttcttaagattctactttcaactgctgaatttctcagaaagtcatttattttacatagatacccaaataaatcggtatagctatatatggtattgctttatacatgatagaatctcttctgaatttgaaattatatcctcttcattgctcagaatatcattcatgttttctctattttttcacttgatctcaccttctatagatgtgtctattttaatgattctttcaaagaagcagcttttagttttattgattatgccttttgtggttgtctccatatctgtcaccttcaactttagctttaataccttactctaatttctttgggtttgttgtttttctagcttcttgaattgaatgctcagtttcatttatttttagtctttctagttacggtgaacatgcattgcttttgcctgcccccatacagttcccttcttttagtagggaaaaggggcacttctgcccactcaaatctctgggactagacaaccaaagtatcacaactcctggttgtagacaaaacacagggagagaaaagtgtttctaggtttgtttttgatatatatattttttacaattaagtttctagttagcagggcattccacaaagggcacagacctagagagaggataaatcatttcaggtggtaaaatataactgaaaatcctctagacattcaacctgtatgaactgatgagctaaataaaaaacagtatcaaaggcagagaggtcataactggataacactcaagagaccactgtattaaggtagacacaatggctaaaatttgaaatcttataattttaaatttaaagtaaataagttaaataataaaagttactaagattttaatctccattgtaagaaatgtaaaaaaaatactttctattactaatactttctgaagattctactttgaaccactgatatacttactcaaagtcagaggtgttgatgagcttggaaggtaccgtgcctcaagaatttgtaactgaattctgctatttactgcttgaaaacaagtccccaattcaagttctgcatggcaaacctgcatatcaaaaaagtgtcatttggtagttaagaataaagtttttgaaacaattcaaaaattaaaagataaaaagctaaggttagaaattttgaaagtattcctttcaaatgatattcaaaactataagttacaagacaaagttatgaagataaatatcatgaattctttaaagtactcatttgcatggtttctgaaaatacaggttatatctatgtactgaaacttcaaaatctgtgacacctagagccaattcaaattaaaagcaaattaaattaataagcagtatcactgaagaaaatgccagtgaaattaacacaaaaggaatacactttcaaaacaactaaatgtagtcaaattatttttagagaacacacgaaatatgattaaaaagttacatatgaaaatcatcattattttctaattatggagatcagagtaggtgctaccacaatcagaagacagcaataaacagatctgtggattaagagtgaattactatgctgaatggaagcaagctaaagaaagctggcaagaaggaagctagtcaaagtgatgaggcagtaaataataaggaaaaggtcaaagaaaacctgaggcaaacggcaaaatgaaggagacttagagaagaggaaaaattaaaatgtgttcttcagtactgctgaccaacagcagaagaaagttggttatttgtctgtgaaatacaacacaagccagactacttaggtggattccaaggtccttggactgaaaaataaaagggagaatggttgtccaaacacaaaaacactattgtttacatgttgaaaagagtaagaataggaataaagtaggaacataatgttcacagatcatactagggctcagcatagacagacacaaagtctttgttagtactgattccaataaagttacagaacaactgaatgacacttgatgaagacatttatatttgacattgctcagtattccccaataactggctcatagctcattgggaaaaacaacaacaacaaaaaaacaacaaaaactccaacctctccatatacataacattgacagaagcttggtgttttcttaaaatatgattctgtatttcaaaccagtcatgccataagaaatgaagagatagaaaaggaaaagtgaattgcttaacaagtacaaactcaactgttggaatttaatttccccttgaaaaggtctaaattgatgataaaacttgttatttggcaacaaatgctgacttctaataaataagttaatttattgcttttgactgtaatcagaatgagaatgaactaacaacttttcacatgaactaatttggtagccataaaaaaaaaacctttgctgattgaaaaaaaattgctgtccttggcatttaaaaaatatattttaaaagatagagtcatactgtttataaaacacaagggaaatcatggttaaatttttttattattttttattacagttttgtacccacaatgtaataacacttatgaaaacacgtaaaggtggcaaaacgtctcttattgttacacaattgtagagttcactctcataaaacagagcagcatttggcaataggcttaccatttcccacttgccaaggttatttcacaaattcaattcatgttccaggacattaattcagatcatgaaaaactgttcaaagagttaaactattggccaggtgcggtggctcacgcatgtaatcccagcactttgggaggccgaggcaggcggatcacgaggtcagatcgagaccaccctggctaacacggtgaaaccctgtctctactaaaaaaaaaaaaagaagaagaaaaagaaaaaattagccacccgtggtggctgatacctgtagtcccagctacttaggaggctgaggcaggagaatggagtgaacccaggaggcggagcttgcagtgagccgagattgcaccactgcactccagcctgggcgacagagagagactccatctcaaaaacaaaaaacaaaaaaaaaaaacagagcagcatttggcaataggcttaccatttcctacttgccaaggttatttcacaaattcaattcatgttccaggacattaattcagatcatgaaaaactattcaaagatttaaactatttaaatctcataataaccaaaaaattaaaattccaatcaattagcagttatgtattgcctgcatttaataagcacaaaactgctcctgaataatgtatccttttattcagaaaagaaaacattgttagccttcctggaagggttgaaatgaaatgctgagcatcattagagaacatcacgatctggtgatgtttgagaatatcttcttagcggggcaatacatggtagagttaaaagagctgggtttggaatcagactgcctccattcaaatcctgactccccaactactggctgtataacctcaggcaagtgttcccctgatctccacaaaacggataaagaacaacacggtgataattagatcattagatcacgtagcattgaggcagccgtaagataaatctctgtaaatgctagctatttcttcaggaaaacgtatttcttccacattattcaataccgaaatttgagatgtgaagtaattatttacattactatttgtcaaggtcaaggactctttattgagtaaaaacccgaaagttgtgctgttcatggtgaaacagttgtcagtgtggatgggaaagtacggctctttagacatcactattagaatatttattttcctcttcaacacattaaaacaaagcatactattattgctttagccaataatatgaaacattcacacttattaacataaactcactggtccagcatagcccaaacactcttctttcaggttatcaatctataaccctagcacctggcattcagaaaatacacaaatatttataaaatctctgatacatgaaatatgatttagtagaaatttagccataattattcattcatattttccaacgcagataataatatcttaattccccagaaaatccctgagttctcttcttatatactctgtttttaaagttttaatatatgaattatctatttgaatagtctatttgtgccttctgtaaactatggctgcagattactacctactaagctagtgtcaaaaatgccagtgacaaactcctgtcatagttacagaacagcacattgggggttgagataaagaataataggcaaggctgggcgcagtggctcatgcctgcaatcccagcaaatttgggaggccgaggcaggaggactgtttgaactgaggagtttgataccagaaagggcaatatagcaagaccccttatctctactaaaaatttaaaaaattagctgggcatggtggtgtgcctgtagtcctagctactcaggaggctgacatgggaggattgcttggtcggggagatggaggaggtagtgagctgtgattgcgtaccatactccatgctgggctacagagctttctgtcttcctcaaaaaaaaggggaagggaagggaggggaagggaagggaagggaaaggaggggaggggaggggaggggaggggagaagaggggaggggagggaagggaagggaagggtagatacatgtttctgccccatatcccccaaaattctaattttttttagtttatgtatgggcatttttttaaagctcccagatgattctaatgtatacccagagttaagaagcacttccagtcaccttaaatatttttggaaacaggtaaaatataaatcccatacaaatttaaaaccgcatataggtttgaccttacaaaagcttaagactgatttttataaacattatcctaacattcaatctatacaatttaattagaaattcctaaacaatttaaaaacagtgttcagttggctgagaagcaaatagcaagtcccaatcagcaccattaggtaataaagctttttacagaaaaaaaaaatcagctgtaaaaacttctaatcaatttatgagctgctgtatagcttactcatggttaaaacaactttcctaatctatttcagggcaatctctgattgagtgtggaatttatgattctttcttgtttttcctaagttatcagctacctaaaaaaacttaaaaaaaaaaaggttattcatacttcagagttatttcccttgaagtataaaacattaataagaaatgtgccaggagaggccaggcgcagtggctcacgcctgtaatcccagcactttgggagaccgaggcgggcagatcacgaggtcaggagatcgagaccatcctggctaacacagtgaaaccccgtctctactaaaaatacaaaaaaaaattagccaggcatggtggtgggcgcctgtagtcccagctactcgggaggctcaggcgggagaatggcgtgaacccaggaggcggagcttgcagtgagccgagatcgcaccactgcactccagcctgggcgacagagcgagactccatctcaaagaaaaaaagaaaaaagaaatgtgctaggagaaggtaaccctgaggttattttccaatggagaaagaaaacagttctgttaacattttatcaataatttctaaatatttgaaaataatattattgctacttgagagccttccagatcctctaatattctattcaggctattctctaacaaacaaaagcccatccaccaactaattctaaaagtatgaaatactcttaacatactattatcgcttacagaaatttttgaaggtggtgttatatccaaagagtaatccatttcctgtgtgctaagggttctgagtgacattgagcattctccaatggttttcttcctgggagtctgggtttgaatcttaaatacaagtcttacagtttgtagattttgaagtttaatagcaaatacaaacgtttccataaattcaatagccttaaaaaaaaaacaagaaaacataaaatatataaataaaaggcttatatgccaatacaaaataatattttattttatatttaggaaaggtatattcaattctttttacaacaaaacatctttttaatgtgaatgaaaataagaatggcaatgacttgtttttctagagtttatcctgggttctacctttcttaatttcacaaatcatcctttaaattatttaggaattcaggtcatattaacaccatgctcaccacaatacagctttttccctttttgaaaattaattgtttttccatctttggttctggcatctttcctgttatcaataccattcttcaacagttcaggagagtggtgcaagaatctcatatgcaagcactctcttgttcatagtatctaacttgttcacataaagagacttgaattgtttctttaaaggagttattttttgtctaaagaatcttcccatctatctcaggcttcaatttctcttttggtgacatttattccaccctttccgatctgaaaatctaactccttgatagagaagacaaaggaaaatatgaatttaaaattatatcttctctcctaagcacccatctcagtcagcaagtcactgttttctagcctcagaacatttttaaatgctcttgttacttttaatatttttaaatcgttggcttactatgggctaacatattcttgacactagacggttctttgccatacacttccttctttccatctttaatgcatccatttagaaaggagcttttattccttttgaaaaggcaagatatctgggcaactagcataaatattttgaatacaggcatacctcattttactgtactttgctttaatgtgcttcatagacattacattttttaaaaattgaaggttcgtggcaacactgtgttgaataagtctatcagtgtcgtttttccaccagcatgtgctcacttcatgtctctgtcacattttggtaattctcataatagttcaaactttttcattattattatatctgttacggtgacctgtgatcagtgatctttgatattactattgtaattgttttggagtgccacgaaccacacctatataagatgggcaacttaatcgataaatatgtgtgttctgacggctctggcaaccagctgttccatctctctccctctcctcaggcctccctgtttcctaagacacaacaatattgaaattaggccaattaataaccctaaaatgccctctaagtgttcaagggaaaggaacaaacgtacatctccgactttaaatcaaaagctagaaatgactaagcttagtgaggaagctatgctgaaagccgagacagaccaaaagctaggccttttataccacttagtcaagttgtgaatgcaaaggaaaaattattgaaggaaattaaacatgctactccagtgaatatacaaataagaaagtgaaacagccttattgctgatgtggagagagttttatttgtctggagagaaaatcaaatcagccacaacattcccttaagccaaaacctaatccagagcaaggtcctaactctcttcaattctatgaagcctgagagaagtgaagaagctgaagaagaaaaactaaaagctagtagaggctggttcacgaggtttaaggaaagaaacagtctccaaaacataaaagtgcaaggtgaagcagcaagtgctaatgtagaagttgcagcaagttatccagaagatctagttaagaaggtggctacattcaacaacagattttcaatgtagacaaaagagccttctgttggaagaagatgccatgtaggactttcacagttatggaggagaagtcaatgcctgacttcaaggcttcaaaggactaggctgactctcttgttaggggctaatgcaatcagtcactctgagttgaagccaacactcacttaccgttttgaaaatcctagggcccttaagtattatactaaattaactatgcctgtgctctataaagggaacaacaaagcctggataacagcatatctgtttacagcatggtttactaaatattttaagtctactattgagatctactgctcaaaaaaaaaaagattcctttcaaaacattatttctcattgacaatgcacttcgtcacccaagagccctgacagagatgtatacagagatgaatgttattttcatgtctgcaaacacatccattctgcatcccatggatcagggagtaatttcaactttcaagtgttattacttaaaaactaaattttgtaaggctatcactgccatagatagtgattcctctgatggacctgggcaaaagcaattgaaaactttttagaaaggattcaggattttagatgccattaagaaaattcatgatgcatgaaaggtcaaaaaaaggacattagcaggaatctggaagaagtttattctaatcctcatggctgactttgagggattcaaaatttcggcagaggaagtaattgcagatgtggtggaaacagcaagagaactagaattagaagtggatcctgaagatgcaattgaatggctgccatctcatgatacaatatgaacagataaggagttgattctcacacatgagcaaagaaagtagtttctggagatggaatctactcctggtgaagatgctgtgaacgttgttgaaatgaattcagaggattcagaatattacataaacttagctgaaaagcaacagcagggtttgagaggatggaatccaattttgaaagaagttctactgtggataaaatgctatcaaacagcatcacatactacagggaacttttttgtgaaaggaagagtcaatagatgtggccaacttcactgttgtcttattttaagaaattgccacagccacttcaaccttcactaaccaccaccctgatcattcagcaaccatcaacatcaaggcaaaaccttccaacagcaaaaaaattacaacttgctgaagactcagatgatcattaacattttttagaaataaagtattttaaattaaagtatgtaaattactttttttagacataatgctattgcacacttaatggactacagtataaagataacttttgtatgcactgggaaaccaaaaaactcatgtgacctgctttattgcaatgttcattttagtgtggcagtctggaactgaacctacagtatctccgaagtatgcctatactgtgcccaaactgttactcttgttgtaatagcttatgtctgtctgtacagccagaactgtctttctgagggtctcacaactactgagctatctttttcttttagagtctcaagtcatagaatcacaccaattatatattacacacaaaatgtttaatgagcttacaaattatgcaagtgtgatgcttcatttcacactttctgtattttgccaaataggagtctcccaaacaaatttatatataataataaaattgtaaaatgaaagattccatacaagttttaatatgggaacatttttcctaacttttcctaagttaaattagctttatttgaaaatcaaaaagtaaaattgtttaattcagaaagtattcatctatgagtgtcaaggttataatgagttaaggtttatttctagctagactttcaatgatacatattttcataaagtaagatcccaatatatatatacatatatacatatacacatacatacatatatacacattcatacacatatacacatacacacacaacccaattttgatcattgtctttttcatttattaaaaatgtttttccagctccttaaaaactcttcctaaacattagttttcatagttacctagttttctatcacatggtgttatgggatgaattacacccccctaaaaaagatatgttgaagtcctgagccccagcatctcagaatgtgaactcatttggaaacagggtcactgtagatgtgatcagtgaagttaagaaaaggtaatactgacatagggtggacccctaatgactggtatcctttaagaagatggccatgtgaatacacagaacacaggtataatgccatgtgaagacagaagcagagactggagtgatctacaagccagggaatgtcaaggattgctggccatcacagtagctggaagagaggcatagaacagattctccctcagagaaggaatcaacactgctgacattttaattttggactttctccaaagctgcaagagagaaaattctgttgctgtaagtcacccagtttgtggtacagtactgttatggtagccctaggaaactaatacacataggtacaccattaggtttttcaaccattcctctgtatgacacatttgaagttttttcaatttttcttcaaacaaaacttccaagagtattttatatatttttgtattttagattatttccacagaaataatttccagtttcaaagtagaattactgtttaaaagtataaatattttaaggttttgacatgtagtgtcaagataatttctaagaagttgtatgttctagaatacctgtaaaagttttcctaattctaagaagaaagcaaagaaagaaagaggaagaaagaaacagaaagcaatacacgcaatttaaatttgtatttctatgattaatagtgagaagaaactttttatatgtttattagtcatttgaatgatattattttaaaatgatgtcttttagaagatatcttttcatttgcatagaaaaacaataatcttttaacctataaaaagtgacagaaatgaagatgtatttaaattaatgtaaaatctaggatctacaaaaccaaactcaggatcataagtctttctgttatactaattggaaatatttaaaagaaattcattgcaatcatgaatttatttttcaaagccaaagtgggttgggggaaagagaagccaagatttatttcctttcacacaagaaaagtaaacaggtttcttagatattgttaatcttctatatattttagtgaataagatattctttttaaatgcatcttaatactagacaatgaaatatcaaatatttttcagactcaaagttgccttgaaaaagcaataatacatagttgtagtttccctaagataaaagactttcttattctgacttgtttacatgggtaaaagtgacaaatataaaaaaaaaaaaaacagaaaagaaattcaaatacaaacagccacttacgttggaaccttccttggctgaagatttgaaatgcactggtttgggcaatgtaagtattccttttatagaaacagtaggagtgtctccataactagagggccaacttaaatctctgcactaaaaaaattaaaaatacagtttgaattttacaaaggatccaacaatacaaacatttgatgtatttcttgaggtactgactttagataaaaactgcaaaaaataaacttgtctactgagacctcatgttgcatccacattaagcaaattttgacatataatattctagatgttatgtcaatttccctcttgagcttaaaaacacacatacttccatcatactacagatttttttcttagatgccttattaaatactattttctgtaaaaatattaaagaattccaaatgtcaaaggtggcattggcccattccccagaaaagggcaatagtcagtgtttacaatgtctaaatattcaattttgtaataaaagctggtattaactatactaatttacctgtaaaactgtgatccagatctgttctactgaagaattataaaacaatttcacattcagtctcccaaagtccctttcatctcctgatagagtaattgtatctgaattataaaaggacaaagatgtttcaaatgccatgcaatccttctaacccaattaagctttgacacaatccaattttaagagcacaattttaaaatgctacaattattttttaaagttcacaatctaagaagacaaaaatcacactttaatatatttattgaagcactagagggaagatatatactataaaaaggtctcatggttttaaaaacttaacctaattgcagtgagggatttaaattaaaactaagagaaatctttccaaataacatttatatggccttaatactgtattcttctggaggctccttcactagtacactttaatacaaacaaaagatattcaactgcttcatcactttttaaaaagccacacttgtacctgaacactgagaaatggaccatgtgatctgagtatccatatgctgataacactaccaacatagttttatttagacttaatttattatatcaacatagtagatacaatcatctagagtttttcaccttatatacactttcaagttactactgagtagaaataattatcttaagagtataaaagtaggatactttattccttacccaggcttctgttactcccctgagaatttttccttgaagaagaactactgggtacactggacaatgaatcatgtctctataaataaaattattctttagtcagaaattgcatatgaaaccttaaggattctgatacatatgcctcaatatccatcctagtaacaaactgcatgctaactattttgacagtgttacaggtcagaatttcccacttacaggtagtggaaaaaaaaaaaaaaagcttttggcatttgttaggaatatcttaaatatcttacaagatgatatactggaaagcctttgctgttttggtttggttttgtaataaggagaaagatattactgcttaagtttcatacctgagagtattaacgaaaatgagaatttatttagaaatagcctgctatggaaaaacttgtaaagcagcaattatcaaagcatagtcaatctggacctgcagaaacagtatcatttggaacttggtagcaatacaaactcaggccctactgcagagctactgaattaagaactctgaggatgaagcctgtcatcctgtgttttaacaagctctccaaacaattctgatgtgtgttaaacaactgctgctataaaaaaattaaatctataaaaagttaactcacttgaggattaaggattatctagaatatatttccattttaaaaaatatatgtacatatattcacatggaaacaagaccatgagtacacataacaatattttcacattgcacttactctgagttataggaaatatgggaatttgtctttctactttgcttacttctatttcctaattttaaataattacagtttacttgtaataaaaaagaaacattttttaaaacatcaaaataattctcaattccttttcaaaaccaggaggatgcagtgttaacatcagtgaataaagtcctacatctcaaaagaaatataatttttaaaactagctggttatattcagtaagaaaagctaaattaataagcacttttaattacaccattttaaataccaactgtttcaaggttccctgagagcataccaactgagatataaaatttattgaaaaaagaaaaactactgccttttagcaatcaaataacagctttctaaaataatatacatgggaaatatcaattatttattcttcagatatcagaacagatacatctacaaaaaatatacagcatattcctaatgtaattcatacatttctgaatttttaatttgaaaggaaattatcacatataattaaatttatgtagataattcacctggatgaatcgctgagatgagtttgtaagatcaaacatagatttgcttagcccaggggaaccgggaagtttgttcgtccttaaatcacaaactacaaagggatatgagaaaagtatatatttttaagaaacactggaattctacttaattaccatgaactaaatctctgtagcaatacatcatgaatattttgtgcaaatctacagaagagataaagccttctaataaaaattttttaaacttaaaaaaatttttttcagttattttatttttgtttgaaacagaaatcaacacaaatcaaacaacacattttcacatccacatcaattatcaaacagggaaaattacttttttctttacattccccattccttgatccaataaatataatctaagagtaaacactctgtattaagtgtagtgcaactatttattattaataagcatgtattacttttaaaaatcaatactcaatcccatgtgctcctatatttctagtctgtatttttagtttccctcctacactgtaagatctgtgaagaaaggaactttgtatgccaattgtatattctagcacagtagtgaacgtaaggcaggcccttaaataagcatttcttctttattttcagtacctcaccctaaattcactggttgagagagatatatatatatacacacacacatatgtatacatatatacatatatatacacacacatatgtatacatatatacatatatatacacacacatatgtatacatatatacatatatacacatacatatatatgtgtgtgtgtatatatatatatatatcctgaaaaactgagaattttgtgaatcacagacgaacatgatagactataattcacacagtctcaaatatgaaactacaaaagctctataatcacttaagcagtttgtttatatttcccatcacaccatgagtttctaaattcatcattttcactgaatacagaaaaaaatgaaaaaaatattactgtatttagtacaacatatctatgtacaaatagctgttgaagagtttatgaatatacaggtgacaagtgaaatgcatacaaaataatctgggctggtgtagtggctcatgcctgtaatcccagcaatttgggaggccaaggcaggaggattgcttcagcccaggattttgagcctaacctgggcaacatggcaaaaccccatctctacaaaaaaattcaaaaaaattagtcaggtgtggtggcacacttctgtagccccagcttctgcggtggggcaggggtgatggggagctgaggtgtgagaatcacttgagcctgggaggttgatgctgcagtgagctgagattgcaccactgcactccggcctgggcaacaaagtgagactctgtctcaaaacaacaacaacaacaaaaagacaaaataatctgaaaacaaaacttctttcttctttatgttttttcccttgtacctggtatgtagctaacttctttctcttttgttatatgtatttatcatgaacaacataatgctttaaagtatatatacattgcagaatgattaaatctagctaatttacaaatgtattacctcacagttatcacttttgaatgataacaaaaagtgttttgagaacacctaatatccactctcttagcacttttcaagaatatatcataattaactatagtctccatgttgtataaaagatctcttgaaccaaagcttctttcaaaaaagggaaattaaatggaatttagaactaccaacagatataactcattaatctttcaattcttatattagatataatactacagagatgtcataacgtttatcacatttatgaagcttgttttcttatttttaaaatgcttttaatagtaaaaatcatttattcccatatcttacatttgatttctaaatttcttaaagagaaacacagagaggaaaagcacaaaagatcttcatacccgatccatacagtctcttcacttctgaacggggaggaaagcgtcgactcaaatcaggtgaaatgtgctgatacatatagaatgggttatacacatcatagctaggtccgtgctgggatgaactggaaagttctacctttcgatctccaaaagatgctctggcagatcctgaaagcaaatgtttctaaaagtttataacatccttttcttggagttattagccaacagctggtacacccagggtaaaagaaaaaatattttgtctcaagtaatactaaatcacatgtctttgatagctaaaaagatcagcacatatttagggagttctgtgtgaagtattatgccaaggatcagccattaagcctgcatttaagacagtctggtatatttctggcatttttctttgccccatagacaattctgtattgtgtgatctgagtttcctcttatttttctacttatatatagaacatcttttaaattacaagattggggggggagatacatccttttcaagaagacgtagaacatttattaaaattgaccacatgctgagatacaccgagaaactctcaaatttggaaggactgaaatcatacaaagtacgttttcttactacaatgcaattaagttggaaatcaaatagcaaaaataaaaataaaaactatttatatggaaacactaaagaccaagaataaccaaaaacttaatctttaagaagaaaaacaagactgaaagattcgctctactgggaattaggaatataatattggtaagtgatagaaaaagagatcaatagcaaagaaaagaaggcctagaaatagacacccgtttcatgaacacttactttataattaaggtggcactgcacaagaaagaatgatcttttcactaaaaggtgataagacaactggatatcaacagggaaaaaataagcctgcattcaactaaagatattcacaaaaaaattagttccatggggattgtagatctaaatgaaatattacagacaaaccaataaagcttctatattcaggttaactgataagaaagttttcatgaccttaggacagggaagcatttcttaaatggaacataaagagcattaatcatatacatacatatatacacacacacacacacacacacgtacatacatacacacacacacacacatatatatatataattttatttatttatttattattatttttgaagttgattctcactctgttgcccaggctggaatgcagtggcatgatctcggctcactgaaacctccaccttctgggttcaagctattctcctgcctcagcctccgaagtagctgggattacaggcacacgccaccacgccagctaagtttttgtatttttagtagagatggggtttcactcaccatgttggccaggctggtcttgaactcctgggttcaagtgatccaccgcctcagcctcccaaagtgctgggattacaggcatgaaccaccacgaccagcctaatcatagacatattttaataaactaaactacattaaaatttaaaattcccatttgtcaaagactatttaaggtaacccacagagtgaaagaagatatgtgcaacaagtataactgacaaagggctcatatgcatccaagtactaaccaggcccgaccctgcttagcttctgagatcagatgagatcaggagcattcagggtggtatggccataaagggctcatatccagaatacatgaggaacacctacaaatcataagaaatcaataagaaaaagacagacgagactatacataaattggcttaagacattgataggcacttcagaagacaatcaatctcattagtcatgaggaaaaaataagttgaaaacccaaggaaataccactacacactcaccagaatggttaaaagcaaaaagacggacaatagtacgtgttggcaagaaagtagaggaatgtaaacgatcatactctgctagtggaaatgtaaattgatataatcactatggaaaaagagtttggcaatttctactaaagccgaagatatttatattctatgacccaacaagccattctgaacatatacacaactgaagtgcttgtacatgtgcaccaagagataggtataagaatgttcgtaagtattattacccataatagccaaaaaattggaaaactcaaaattccatcaacagtaaaatagatatagtatatacttactacatacaaattccttataatatgctacacagaaacactactgtacactatgccatttagaatacagaacgaattataatatacacttactgtacagatacaaaaacaaactaaaactactgacaattacttgaattaatctaaaaaacataatgttgaatgagaaaaccataaacaaaagaatacagactgaataaattatttatattaagttcagaaaacagaaaaaattaaactacaatattcagggatatgagcttaggtggtaagaagaaaggcaagagagtcatgattgtaacaatggtgacactgaacactctagggtgactgaaaggcaaaaaaatggagagaagctatggggttactagtactactctatgtctttacctaggctgtacctacatgggtattctgctttgtaataaatcactgagctgtatgtttctgttttgtgcatttttctacgtgtataatatttcataatttaaaaaagaaaatataggtcaaattcctttcaaggttaataatcatgttgggaataatatgtagacataaagctaaattcttcaaaggtttaaattattgtaattctctgtataacaacattgtggtcaactatggaccacatatacgacagtggttccataagattataatgaagccaaaaagttcctatggtctagtgacatggcaatgattgtcatcaagatacgtaggcctaggctaatgtggatgtttgtgtctaagtttttaacaaaaaagtttaagaagtaaaaaaaaaagtttttaatagaaaaaagcttatagagtaaggatataaatatttttgtatagctgcacactgtgtttatatttaagccaagtattattacaaaaaagtcaaaagttttaaaatatttaaaagtttaggccaggcatggcggcttacgcctgtaatcccagcactttgaaagggcgaggtgggcagatcacgaggttaagagatcaagaccatcctggccaacatagtgaaatccagtctctactaaaaatacaaattagctgtgtgtggtggcccgcgcctgtagtcccagctacttgggaggctgaggcaggagaatcgcttgaacctgggaggcagaggttgcagtgagccaggatcgtgccactgcactccagcttggtgacagactgagactccgtttcaaaaaaaaaaaagtttatacagtaaaaagttacagtaagctaagggtgatttattgttgaagaaacaaaaatatatttaataaatttagtatatcctaagggtacagcatttataaaatccacagtagtatacagtaatgtcctagttttcacattcactcactactcactcactgactcacccaaaacaacttacagccctgcaagctccattcatgataaatgccctatacaggtgtgatatggcttggctgtgtccccatccaaatctcatctttaattgtagctcctataattctcatgtgttgtgggagagacctggtgggagataactgaatcatggggacagtttcccccagactgtacttgtggtagtgaataagtctcaagagatctgatggtttttttaaaggggtttccccttttgcttggctctcattctctcttgcctgctaccatgtaagatgtgtctttctccttccaccatgattgtaaggcctccccagccacgtggaactgtgagtccattaaacctctttttctttataaattacctaaactcaggtatgtcttcatcagcagcatgaaaatggactaatatagtaaactggtaccaggagtggggtgctgctgtaaagatacccaaaaatgtggaagcaactttggaactgagtaacaggcagaggttggaacagtttggagggctcagaagaagacaggaagatgtgggaaagttaggaactgcctagagacttgttgagtggctttgaccaaaatgctgataatgacatagacaatgaaatccaggccaaggtggtctcaggtagagatgaggaacttgttgggaactgcagtaaaagtggctcttgctatgttttagcaaagacactggtgtcattttgcccctgctgtagagatttccgaaactttgaacttgagggagatgatttagggtatctggtggaagaaatttctaagcagcaaagcattcaagaggtgacctggctgctgttaaaagcattcagttttaaaagagagcataaaagttcgaaaaatttgcagactgtcaatgcaatagaaaaaaaaaacacattttctgaggagaaattcaagccacctgcagaaatttgcataggtgacaaggagccaaatgttaatcatcaagacaatgggaaaatgtcttcaggctatgtcagagacctttgcagcaagccctcccatcacaggcccagaggtccaggaggaaaaagtggtttcatgggccaggcccagggcccccctgttgtgtgcagcctagggacttggtgccctgcatcccagttgctctagcaatggctaaaggggccaaggtacagcttgggccatggcttcagagggtggaagccccaagtcttggcagcttccacatggttgagcctgcaggtgcatagaagtcacaagaattgaggtttgggaacctcctcctagatttcagaggatgtaaggaaatgcctggatgtccaggcaaacgtttgctgcagaggtggggccctcatggagaacctctgctagggcagtatggaagggaaatgtggagttgaagcccccacagagtctccactggggcactgcctagtagagctgtgagaagaaggccaccatcctccagaccccagaatggtagatccaccaacagtttgcattgtgcacctggaaaagccacagatactcaacaccagcccgtgaaagcagctaggagggaagctgtaccttgcaaagccacaggggtggagctgcccaagaccatggtaacccacctcttgcattagcatgacctggatgcgagacatggagtcaaaggttatcattctggagctttaagatttgactgccctgctggattgtggacttgcatggggcccttagccccttcatttcagccaatttatcccatttggaatgggtgtatttatccaatgtctatactcctattgtatctaggaagtaattaacttttgattttgcaggctcataggcggaagggacttgctttgtctcagatgagactttgaattgtggacttttgagttcatgctgaaatgagttaagactttgggggactgttgggaaggcataattggttttgaaatgtgaggatgtgagacttgggaggggccaggggcagaatggtatggtttggctgtgtccccacccaaatctcatcttgaattgtagctcccctaattcccacatgttgtgggagacacctggtaggagataattgaatcataggggcagtttctcccatactgttcttgtgatagtgaataagtctcagatctgatggttttataaggggtttccccttttgcttggctctcattgtctcttacctgctgccatgtaagacatgcctttcaccttctgccatgattgtcaggccttcccagccacatggaactgtgattccattaaacctctttttcatcataaattacccagtctcaggtatgtattcatcagcagcgtgagaacagactaatacaaggtgtatcatcttttaacttttataccatatttttactgtactgaatactgtatttagtatagtatacagcatagtaacatattgtataggtttgtagcctaggagaaatatggtatccatatagcctaagtgtttagtaggctacaccatctaggtttgtgtaagtgcctctacactgtccatgcaattataagatagcttaacaacaacatttctcagaacatatcgccattgttaaatgattcctgactgtgcttgcaacacaattttagtcattattgatagcagtctgctctattcactcaaaatcttctcttttctcaacccatcattcacgtgcatacatacatacacatatttaacttctttaattaggtaccaccttactttcttgactctaataaaagtaattttctctttaatatatacaaatcagatggttttaccacttcttcagtgaacctataatttaggagttaaccaatttcttcctcattcaactcaaaaagcaatgttttctagtgagcacaatgtcaagaacataagaaaaactatcacatatttccaggtggatatttcttaccttttttctgattatgaaaataatagagtaaaaactcaaaattatttaagaatagaaaattcattaaaaaaattacagtatgtccatatgaagaaatactatgtattcatcaaaaagcaacaaatatgaaatgttcacaacatattatgtggatgaaacaacttacaaggctgcatggtttaatcccaatgttgttaataagtatgaaaaaaaaagagaaagatcaattgattgggtattctgtaagccagaactttttaaaactatttttgagaaacactattgatatgcgcaaagtaagatgataggccaggcactaggttcatcttttcttttctctaaaaaattaaaattgggccaggcatggtagctcacgtctgtaatcccagcaatttgggagcccaaggtgggtggaatgcttgagaataggagttcaagaccagcctggccaacatgatgaaaccccatctctataaatacaaaaactagctgggtgtggtggtgtgcacctgtagtcctagttactcaggaggctgaggcatgagaattgtttgaacacaggagatggaggctgcagtaagccaaaaccatgccactgcactccagcctgggcaacagagtgagactctgtctcaaaaaaacaaattttaatttaaaatttaaaaaatcactcctaccagacccaactctcttgtaggtaacaataaactctagaccaaaactaaaacaaagcaagaaaataaaaaccctgaaggcaatgaagagtaaagaaaagtaatacagatctggacaggagttgattctggggaaaaaggtaatggcacaaagtgagttatctgtttttaatgacttttagcctgagtacacatcaaagttggcaacacgcagggtatataaaaccccaatagaaaactcacagtctttctagcctgaagaaccacagggtacagttcaagaaaatcagagctgcaggaaagtaaggtgggaatcctggaaaggagagattcccaaattctgtaaataaagccttttcaaatatctgtctcatctctgaactaccacccaagagctgccacccaagacaaaatctgtagtttaagtccaaccagtttacttgtctggtaggagggaggaagaaagaaaggaaggaagggaaggaaggtgtgttagtctgtttgtgccactataaaggaatatctgaggatgggtaatttataaagaaaagcagtttcatttgcttgctgttttgtagtgtgtacaggaagcatggtgccagcatctgcttctaatcagggactcaggaagcttacaatcatggcagaaggcaaaaagagaacaggcacatcacacggcaacagcaggagcaagagatgggcagtggaggtgccaggctcttttaaacaaccagatctcacaggaactcagagctagaactcacttatcaccaaggagatggtgctaagccatacatgagggatctgcccccatgatccaaacacctcccaccaggccccacctccaacattgggaatcacatgaatttggcggggccaaacatccaaaccatatcaggagggaaaggagaaagggaaggaggaagggagggatgaaagaagagaagtaggaagggaggatgggagaaagggaggaaagaaggaaccttttcagaagaatgtaactgaatctagagtctccacaacataacattcaatatttttgatattgatatcaagaatacaaccccaaattactccatatacaaagaaacaggaaaatgtgatctattttcaagaaaaaagacaatccacagaatccaaacctagatgatcaagatgctgaaatcaccagataaagattttaaagcttaaaaacataaaagaaaataggtttgcaatactgtaaaaataagaaattgcagtagaggaaatctataacaaagaaccaaatgtaaactctagaactaaaaaatgcaatgtctaaaataaaaaattcatgaataggcttaacagcaggctaaagataacagacgagacagtgaacttgaaaaaaagatcaatattattgaatctaaagaacagagaaaaaaagatacttgaaaaaaaaaagtctcagagacccatagaacaatatcaaaaggttcaacataggtataatcggaatcccagaagcagaaaagagaggggataagacaaaaaatatttggacaaatattgtagatcttgatagagatttggattacactgacatatacttttgtcaatattcaacaaatatacacttaaaattcaacaaatacacacaaaattctacaaatactcacttgggcagctcactgtgtgtaaaatttatgccaaaagaagaaaactgtaaagagatcgttgaacccagtaaatgatatatatgtttaagtgtttgcaaggaaatatattggtgtcttcaatttactctgaaattcattcctctccaaaaagtggattaataatggatagaagaatggataggtagacagatatttgctaaagcaagtatagtaagtaatcttaatggcagaatttatgtggtggacatacaggtcttcactattaagttttttttttattttcctgtatgtttgaaatttttctaataaaattttgagggtaaaaaagctattgtgacttacagtgtttcaatggactaatacaaattgttttttaaaaaaacaagacaagagctacatgttgtttcatcttctctctaataatttggcttctacatcagccaaattctgccaatggatctacctcattcaagtaactatttagactgggaagtacaacctggtagaagaaagaagagaaggaaaagtgattactaaccaaatattagaaattaataaataagaaacatgttttctacatttactaactcctttactttttcattctagacatgtgacggataactgaggtattctaattacagttatccctcagtatatgtgggggattggttccagccctctatggataccaaaatccatggatgctcaagtcccttatataaatggtgtagtatttgcacataacctatgcacatcctcccatatgctttaaatcatctcttgattacttataatacctaacgcaatgtaaatgctactgagatagttgtcatattgtattgttcagggaaaaaatgacaagaaaaaagtctgcacatgttcagtacagatgcaatcattctttttttttttctgaatatttttgaggtgcagttggttaaatccacagatgtggaacccaaagatatggagggccaattacatattatttcttgaaaaaaggccaattctacatacaaattattgtattatgatcagatttcaaaatgggacctttcaaaactactgtacattaagttcttctacagaaagagcaaaatataaaaagtaaaataaaaaaattttatatgaattttgtattaaaaatataaaagtaaaataatagcacttaaatgctacatatcgatttttaaatactgctattttattgtttaccttcaagttcttccagatgtgaaggagtttcttgtgtcctgggttgaatgtaagataacttaaacttgggcaccacaaatggtacttctttgccatcagatggtaatttggaaagcaaataatcctcagtacagccaagctgaggctttacagaaacagaagtcaatggaggtacagagatagtagcattttgactatttgggactgctgctttaaaatctctttccacagaaactgcatataaaagaaaaaaaaagtcacaaatatgaatataggttacatataataatctaaacctagcatactttgatatttatttaaccattttagaagaaattcctgacacataaactactcttgggtcttaccaaacacttctggaatctacattaattttgtccagacgatatttgagcaattaatacactactgttaaagtgcattaacttatcataatggtaaaagcagctttaaagagtcttattcccaaaagaattcatagatggaaaacaattttattttgtagtcagttatatagtgctttcaagtaaaaatctagtcatttaaaactactgtcaacaaaagcaattcttttgttgctggcagctaccccagtcgtagcttctatgacccattttattcattctttagaatcatatgtgattcctaagctacatgatttaagatgggaggtaagttattctttatatatatataatgctatctgtagactgaaagtacaagtactattctgtagaaatttatgaaatgttttaatgtaaaaaagaaggcttcatactcaaatatactatgaagctctgctgtagattaggaaataaaagtgccagagaagagataagggagccatgcaatagaaaaagaactctccaggggtccttaataaatgtgagtcttcatagttatgagtctcttccccattggtcattcattcattcaaggcatttttaatgttatacacatattgtagattgtctttatttaaatcaaaacattggtcagaatatgttgtctcccaaacatacttctcttccctccctgtctttgcctgtactatttcatccacctgtaatgcccatgtccaattttcagtttctcttccttcttcccacccaacttgctaaaatcctattcagatttccatagcaaatgcaattttctttatggtaatatcttacgaatcccctgggttgaattactctctctctcccctatgctccagactacttgaagttatggaatatttacttagtgtgccttatgtttctgcctcccctaagaagttggaaaacatgcctaattctttatattacaaaatgccacaaatgaagaagatgctacataaatgttactgaagtcaaaataaaactcacagttgtgtttttctgtttcaccatagaaacatcctccacagcaactctttataaattctgttgccattacattcaatttccaatatccagcaaaagacacaaacttccaatcttaatattaatctgttggtagaatagaaaacaagttaacctgcttgtcatgcttaataccattagatattactaaataaaccacattatctgtctttctaagacataatgaggattctgaagcaaaaatacttgaggaagatagatttttgtaaccatatgaaattctgtataacttatttgtaagttattaaaattatgtttaaaaattactaaatgaacaatctcaatgttaaaatctggaaaaaaaaagaaaaattccattcttaattttctttcacgaaaaataagatggaagattgagtgaagagatatagagtaacaagaggggtgtgtttatgagagagagagagagagaagggacagtgtggaaaaagaagagcaacatggaagaaatacagaaaaacaaagaaaaaaagagagaaagaagaaaaaagaaagaggtaaactaggacatgtgctgataaaacagcaagaaacctaagacaagagcacatagaattaggaagaaatgtttgggaagggagatgaaaagggaaaggtcaaaaaaaaaaaaagtcaagggcaaacctagaaatagagagtggagactagacagcaggagagacagagtgagctgaggcacagagagagaaaagaaataaagaggagaagagtagaatgaagcggagagagagggaaggagaaatgaagatgacagcaagatgagaagtataaaagggcagacaaatcaaagaaaaagaaggatggagaaagaggtaagaaaaggagaggggaaaacacaaaatgtaaaagaaaagagatgaaaagaaaaaacattcaaagaaacagtgaaagttagaaactgaaaaaaggaggaaagatgagaaaaggggaaaaagattgagatagagaagcagagtgaatttaggaacattggtcaaagaatacaaaattagttttgataagagaaataggttgaatagcattactccatgtgaatatagctaatgaagatctgcagtactcttgagagatgctaaggctggatgtttactgttctctccacaaaaataactatgtcaggtaatgcagatgtaagctagatttaatcatttcacaatgtataggcacttcaaaacatcacattgtatacaataaatacatacaatttgttcaatttgaaaagtaaagaaaaagcatatttaaaaaaaagtaaagagtggtaaaggagacagggttagagaggtaggagaacacagggataaataaaaacagactaggagaaatggagatgaaattaaaaagctgataaagaaactaagtatcttaaaggaaagtttattcattattatactctaataaatacacatatagtataactaaaacaatttttctctttcacctgatctatctaaatctatgttcaagcaaaagttaaaagaaaacatggcaccccataaaaagtgtgagaaaacattcacttcctccagatcaattattctggtaattcaaaggccctataatgggcaccaataaacaaataaactgcatacttcatgaattattttaatctttagagttatactaatagaaaagtataccttaagcactacatcacatacacacaaaaagacaccacaaataagatatagagcaaataaaggaagtctattttacatttaccaggaaattaaattgtataagaacttcatgtccaatttcctattgtccttggtctcagtgcctttgttctaaatgcactgccttcatttatgcctacttaaactccatacgtttttcacaggaggttttaaacatatgcgaagaagtataacaaaaccctaatcactcagattaaaataattatcaactcatggcaaatcttatttcatctctgcctccccatataccctgtcctttggattattttgaaataaattctaatcatataatttcatccataaacacataaataatgatctccaaaagatgtggcaaaggacttaggagttaacttcaaggggctctcactggctgaaggtgaatcatttcaagtattaatacaaacagtatctgtaatgaatggtaacatatcaaacatttctaaaatgttgctctttttaaacataaccataatagtattatcatgtgtaaaataattaatgtcatcaactacttgttcactgttcaaatttcccctatggtctcaatttgtatagttgttttgttgaaattcagatcaaattttaaattgtttcatcttttgttattagaagtagtgccacagtagctttgtgcacacatatttctcagatatttctcagtatatatctgtaagatagattcctagagataagactatggggccaaaaggtgtatatgtgtaattttgcttgtattgccaaaattctctctgaagcacaccattttgcattcccaatagcaatatgtaagagtacctttttctgttaccaacaaaatacactgtcaaactgatgcttaataccatggacttttgccagtgtgataggaaagaaatgatatactgtgttgttttaatttatatctctcttattataagtgatgttgagcttcttgtcatataagattaatctgtaattgtttatatgaattctattcactgtctcctgccgacattttcataaagctgttggtctttttcttctccagtttttgaagctctttagatatttgagagattaacactttgtccattatacaagtggcaaacatccttctggtttgtcatttatctttttactttgattatggtgtttctgctatgccaaagtgtgtgtgttatacaaatcataaaataatttacccatgttttcttccagtacttagtacagtattattttctatactgacatcctgttatacagtatgagaaatggattcaaactttcctcttcccaattcgctatctcattagcacaaacaccacatattaaaaattccatattttctccacttacaggatgctccctttagtacacattaaatttccatatgcaattgggtttattgtgtattttctattctcttcaattgttctgtctattcctgtaccaatggtatatcattttaatcttaaattcttatatcatgttataacatgtagcaagacaagtcatctttacccctcttcactttctgcattttcttagctattcttgcttgtctgttctcgaaaatgaactttataatctgtctagccctaggaggaaaaatctgatggtactttcatcaggatcatattaaacttctaaattatttttttaaaactgacatctctaagaatattgagtcttcctacacagaacatagtatatctttatatttgttcaagtttatgcttatacctttaggagtttttagagttctcataaaaattctgaagatttctcattaagtgtatgcctgtataatttgcttggctatcataaatggtatcttctcttccattacatcttgtgactatttccatttttaaaatgtatgcgttttcaaaggccctgttcagccccagcatatcagagtaaaatactccgtaaccacccaaatcaaacgaatagtctctcatctctaaatgtctagtgtctttaaaaaaaaaaagtttaacatttttcttaacattttatgagatcttgttctgtctcccctgttagaacataaactgctcaaaaacaatattgtactcactttctgcttagcactcagcacactacatgatgctgggaatataattggaactcagcaaatacctagttgatagataaggaaacaaagtacaactatctcccataaaaactaagaatatattcatcaaaccacatctctgaccccaatcagtttgcaaatatttaacattaaccatgacaggaatgtggtagaattggttaaaaatgactgctacttcagggggaaaagtcctcaacattgatggccttgagtcatccaaaatgagttggggaagatggaggaaggtagtagaaagagagaaaagtttatatgaatgaaatgtgaaatctaattaaaatgaacacccagtaatacactacaggaaagacagttaaaaaacacatggatattttacttttgtacaaaatagagtaacagagacagatttatcctaccacctgaaaagcaaataaaatatatggaacagcaattttcaagacactggctatcagacagcaaagaactgagaaataggaactaaatgaggtaagccttccaccttactcccttgagggagtttccaggccatgggaaattacccaagcaaagccgagaagattttctgaaatgaagagacaaagctgaaagtatgtggagaataaggcagcgagagtttgcataacagactactgtagaataaagaggtacatacagagaacaatggagatcagcagagggtcccactcaagtattcaacagagtactgatcagcacacacacaaaaaaaggaagctacacaagactgcgggaaaaaaacaccagaaaaatttacaaaaactatacataactggtattcaccaaggtcaggagtgatgcttgtccccacaaatcagactggaaaagggatcaaattgtttacacaaaacttaactgtgtcccaaagcaaatttacagaaatccaaaaatatccagcattcaaggtaaaactcacaatgtctggtattcaattaaaaaaagtaccaggtatacaaggaagcaaaaaaatatatagaacccataatgaagaggaaaaaaaaatcaatcaattagaaacaacctaaaattgagacaaggcagttgaggacactaaaatagttatagctggactcaatatgttcaaaaggttaagtagagatatggacgatattaaaaagacccaaatccaatttctagagatgaaaactataatgtctgagatggaaaatatactggatgggattaataccagattggatattgcaaaagaaaatattaatgaacttgaaggcatagtaagataaactaactaaaatgagacacagagaaaagactaacatcaaaatgataaaaagcatctgtgactcatgggacaatttcaagtgacccaaaatacatgtatttggagtccacaaagaagactggggataggggggagggcatatttgaagaaataatggccaaaattttccaaacttgataactacaaaccacagatctaagaacctccgccaacactaaggtcaggaaacatgaagaaaactacaccaatgcacaccacgccataataacatcattcaaaaacagtgatgggaaaatcttaaaagcacccagagaaaaaagacatgttatgtacatcaaagcaaagattaagaatagcagcatatagttgagcatggtggtgtgtgcttgtaatcccagctactcgggaggctgaggcataagaatcacttgaatctgggaggcagaggctgcaataagctgagatcatgccactgcactccagcctgggtgacacagagagactctgtctcaaaaaattaattaattaattaaaaaggatagtagcatagctctcaatggaaacaaaacaaaaacagtagagcaagatctttaatgtactgaaagaaaaaaacccatcaacctagaatttgacactcagagaaaatctttcaaaaatgtaggtgacataaagacttcttcagacatacaaaagttgaaagaacatattaccaacagagctacaccacaagaagtgttaaatgatgtccttcaggccaaaggataatatctgatagaaatatgaatctacacaaaggaataaagtgcaccataagtataaatacatgatttattattattgggatttctttacaagtttattaaagcttagacaaaaaaattatactgagacaaaaggtttgtaacatatgtaaaactaaaatgtattacatcaatagcacaaaggccgggggagaaataaaagtaaaaatgtaaataattatagtatatgtgatgtggtatcatatcatttgaggactgactgtagaaagttaaagatatatactataaaccctaacacaaccactaaaataagaaaacagagttacagcttataagccaacaaaggagataaaatggaataattttaaaatactcaattaataaaagaaagcagaaaaagaaagggggaacaaagaacagataggatgagtagaaaacaaatagcaagatgatagatttgaacttaattatatcaagaatcacaagtgtgaatactttaaaatatgccaattaaaaggcagaaattgccagactggataaagaagtatgatacaagtatatgctgcctacaagaaacattttaaatacaaataagttaaaaataaaaggatggataccccttgagaacatacacccaaaatcctcaatgaaatactggcaagccaaatccagaaacgtataaaagatttatgtatcataaccaagcaagatttatcccaggattgcaagattagtttaacatctgataatcaattcatgtaatgcatcatattaacagaataaaggacaaaaactataggataatctcaatagatacaaaaatttgacaaaatccaatattcgtgataaaaatactgagaatagaagagaatctttcaacataataataaacagcatctatgaaaaaatctatagttaacatcacaggaactggtgaaagattgaaagtctccctctaaagccaggaaaaaaaaaaaagatttctactctctctacctttattcaacactatatttgagattctagctaagccaattaggctaaaaatattttgtcaaaggcattcatcttggaaatcaagaagtaaaacactcttcattcacagacaacaagatcttgtaaataaaaaaaaaaaatctaagaaattcactaacaaacttaccagaagttcactaaggttgcaagatataagagaaatatacaaaagttaattgcatttctatatactaaccatgaacactccaaaaatgaaatagaaaacaattccattcataataacatttttaaaaacttaaaatacaaatactttaagaaatgaagtacaagacttatacactgcaaaccacaagacattactgaaagatattaaagaagagctcaatacttgtgaagatatcccatgttcatggattggaagatgtaatatcattaaaatggtaatattattaatattgctaaggtggcaatactccccaaattgatctacagattcaacacaatctctaccaaaatcccttccagcttttttacagaaattgacaagctgatcctaaaactcatatgggaacgtaaagggtgcagaatagccaaaacaatcttggggaaaaaaaaagaacaaagtggaaagactaacttcaaaatttactacaaaactagtcatcaggacaatataatattagtataaggacagataaataaatcaatagaattaaattcagagcccagaaatacacccttacatttatagtcaattgatgtttaacaaaggtgccaagaaattttaaagggaaagaaatagtgttttcaacaaatggtgctaggacactgaatatcaatatttatatccacattatatccacatgcccttcccacaaaaaaaaaaattggatccctgcctcccaccatatacaaaaactaactcaaaactgattatgcacctatatgtaagagttaaaacttcaaaactcttagaagaaaacataggagtaaatctttgtaaacttgggttaggcagtaatttcttagacacaacaccaaaagcacacatgatcaaagaaaaatttgatgtactagatttaattgaaattaaaaactttgtgctttaaaagacaccattaacaaagtgaaaagaccactcggagactgagagaagatatttgcatatcacacatccaataaaatatggattatatccagcatatataaaaaactattacaacttaataataaaaagaaaaataacccaattaaaaaataggcaaaagatttgaaaagacacttctccaaaaaaatctacaagtggccaaaaagcacatgaaaacatgctcaacacagttagtgattaggaaaatgcaaattaaaactataaaaagacaacaatatacattgattaaaaaggataaaattacaaagattgaccattccaaatgtttatgatatgtgacaagtagtattctcctattctactggtgggactgtaaaatggcatgaccactttagaaaacagtttgacaagtttctaaagttgaacatatacctgctacatgatccagacatgccattactacatatttacttaagaaaaaagcaatcacatgtttacacaaagagttgtacactggtgttcatagcaaatctattcaaaatagccaaaaattgaaaactatcaagtatctatcaacagattaatccatttagaaaacaaactgtggctcaatggaacactactcagaaataaagaagtaagctggttaaacatgcaacaatatggatgaatctcaaaataattatgctgggcaaaagaatgccaacaaaaagagtatgtgccatacagatatgtgccatattctcttgcatttgctttattaataacaaagtcatatttcagttcttattttgtctttaatttggcttttctagctatcttattaatactgatttgtagctgaactccactgcatgattcaatttatataaaattgtagaaaatggaaattaatcaatagtaacaaaaagtagatcagaggctgcctcgggacagtgaggagtggggagatgaagcacagagagggacagaaaggaaggacttggtggggcaggaggaaactttggagtgggggtaatatactcattatcttttttttttttttttttgagacagtgtctcgctctgtcgcccaggctggagtgcagtggcgtgatctctgctcactgtaagctctgtcttctgggttcacgccattctcctgccttagcctcccaagtagctgggactacaggtgcccaccaccacgcatggctaattttttgtattttttagtagagacggggtttcaccgtgttagccaggatggtctcgatctcctgacctcgtgatccgcctgcttcagcctcccaaagtgctgggattacaggcatgagccaccgtgccgagcctatactcattatcttgactgtggtgatggtttcataggtacatacatacatgaaaacatgaaaacatcaaattatcgatttcaagtatatgtaacttactacatatcaattagacctcaataaacctgaaaaaataatacataagtagaattacagaacattaacagaaaaagaggcctcaaaaacattagcagagccgaaggcttagaaatcattttatcaggggccaggcatggtggctcatgcctgtagtcccagcactttgggaggccaaggcgggtggatcacctaaggtcgggagttcgagaccagcctgaccaacctgaagaaaccccatctctactaaaaataaaaaattagttgggcatggtggcacatgcctgtaatcccagctactcaggaggctgaggcaggagaaccacttgaacccgggaggcggaggttgcagtgagccgagatcacgccattgcactccagactgggcaacaagagcaaaattccatctcaaaaaaaaaaaaaaagaaaaaagaaatcattttatcaaagtccttctaattttacccaaagaaaataatgagtcaagcaactagataatgttaggtttagaaccaaaccctaagcttcacaactttttctaatacaccacattgctttaggtagggtatgggtagaagggcaggaccagtcaggttaacagactatgtgctggctatctacatagccacatgtttgcttttttagcaacaaggagaaacaaatataaatggttaaaagtatactgcctatgttccaatcctgtaactttcacttattagctatatgaccttaaatctgttacttaacctttttaaccttcaacttcttcatcaattaaaaaacaacaacaacaacaacaacaaaacacttcttagggctattgtgatgatcaaccaaagtaatgcacataaagtataaaactagtggtagggctgttttaagaataaatgtttgctgtcatcagcggcatcattattatatttattatcatcagatcccacttacaacagatctgattcatgctaggcactttacccaatgccagaaatgatatggggacatttagctagaacattctagtatgaggacagattgtaaaaagacttaaatacttccatatcaatagataaaagctataaacaccctagtcactttaactcctccctaggcacccctgaggtaaatgtctgaaaaagcaggggcctccatgactctgctccaatattacagtcagtgctcatgcacgacaagttgttaaaatacttttaatatcacttccttttgagattcccaaagggcttatttgcctctgctggtctgacatagtctaggaacagcctgtctatggtattctcacaaataaaggacagtacatcatcacgactttcccctgcaaacctgcttttcctctggtatttcctactacagtgccactatccagctaattaactaagccagaaatacaagtgccattcttgagtccttctgctcccaaaatccacacatccaattcatccattcacttacaagcatttattgagcatctactatgtactaggcaatttgctaggcactgaagacaaaatagggaacaagacagacaagcttttggagcgcttacaacagaggagggagataaacagaaaaataaacaaacacatgatacattcaatccaatgaggaaaattaaccaggattcaaaaggaatgaatgttaactttgtataatcagaaaagacttctctgaggaggtaacaatccagctggaacataaacacaagaaaggatcagctagcaaagttcttgatggtggagcattccagaaattgcaaaaatcttgagttgtacccactttgcattattttgcaaggtactaagcaacagaaagagtagttagcaggtgaactgtgaaataggcaagggctagaattctgttgagtagagccccttaatccttgtaattttctttttcttttcttttttttttttttttttttttttttggagatggagtctcgctctgtcatccaggctggagtgcagtggtgcgatcttggctcactgcaacctccgcctccggattcaagcaattccctgcctcagcctcctgagtagctgggattacaggcacccgctaccatgcccggctaatttttgtatttttagtagagacggggtttcaccatcttggccaggttggtcttgaactcctaacctcgtgatccacccgcgtcggcctcccaaagtgctgggattacaggtgtgagccaccgcgcctggccatccttgtaattttcacaccttcctttctattctcaatttgactattttgattcagatgttatgataccccaaattacagagagccagctaataggtttgcctttcaaattctttttatccccccactgtgctgctaaggtccttcgtctgctttaagtaatgctatatctctctatcactttcaggataaaatttattctgctaaatacaatatgtgacccttctcttgctcatcttccactacttccttctgcaaataccaagcttcaaaatataactacctgatgtgctagaaacacaccattctcttttttacttttgcacctttgaactacgttagggtaggaatgcttcttgctgtctctagtttctttgagaaagatttgtctgtattagaaaacctacttgcctgcagatacatgccatatctaaattagctttattaataacaaagccctatttcagttctccatctgtcttattcttttgtttttctttaatttagatttcctggctatcttattgatattgatttgtagctgaattccactgtgatcagagaaattgtatacaatcaatgatattcatagtatatcatcaattttaataaatgttccatgtacatttgcaactttgaggtgcaatgttccatgtacatcactaaatcaaattcgttggtcatgttaaaatcttctgtatcttggcagggcatagtgcctcatgcctgtaaatcccagtattttgtgggggccgaggcaggaggatcatttgagtccaggagttcaagaccagcctgtacaatatagggagacccctatctctacaaaaaattaaaaaattagccaggcatagtagtgcatacctgtagttccagttacacgggaagctgaggtgggaggatcacttcagctcaagaagtggaggctgtgggaagccgtgatcgcatcactgcactacagcctgggtgacagggtgagaccttgtctgaaaaaaaaaaaaaaagcaggaaaaaaatatgtatctctattgatttttttttctgcttgttttatatagtactaaaagagatgcatctaaaaagaaaactccaactatgactgtggatatatctatttctccttttagttctatcagatttgtttcatatatttttattctaatttatgaggtacatataaatttattaatctccctttcaatctttagtaatacttctagaagccttaatgttggcttgtctgatataactagaatttctttcagttaatatttgcatgttatatcttctttccatcattttcttttcaacctttctgtgttatgctcaaggtgtcttttataagtagtatgtagttagattgtgttctactatccactctgacaatctttgtatttatttgtattttaactgtatttagtccagtcataaagatttaaaactgttttaacatattggtgatttaaatctcttatcattatggtaactttttaatttctagaaatgcttttaccctgaaaacaattttgtctgatagttatagctatgcagctttcttttagaaagcatttgtatggaatatctttttctgtttactgtttccatttgtttaccaacctttctgtctcctcatgttttagatatgtctcttataaatagcatttagttaaagtgttttagtccagataaacaatctttgtcttttgactgtaatatttattccacttatatttaagataactggctgatatatatatgaatttaaacctatattttatcctgggctttctatttgtcctacttgttctctgtttctttcctttcatccttccttggattgactaagtgtttatgatcttcatttttttccctccaatagcttggatattgtattactttcctattgctgttgcaacaaattaccacaaatttaatggctttaaataaacttactatcttacagttctggaagtttgaagtctgaaatgggtttcactgagctaaaatcaaggtgttggcagggctgcattacttctggaggctctatgggaaattccattcctttgccttttccagtttctagaagaaacctgcattccttggctcatggccccttcctccacttcaaagccaacaagacagcatcttccagtctccctgacccctgctaccattgttacatcttctctaactccgaatctcctacaatctctctttcatttataaagactcttgcaattacattaggccaacctggatactccataatccaagataatctccccatctcaaaatcctaaatcacatctgtaaagtcactttttccatgtgaggtaacattcacaggttctgggaattaggacatggtaatctttgtgaggccattattctgtatactataaattttataaactcaatttccttttatttaaatagtcactctggttgttttaatacacacacttaacatgtcaaagtctaaagttagtccttttatattctcctgttgcatagtaaaaggactattaaaagacttttagctcctttacatgccaatcaatccatgtgtgacttaggcatgatgtcatcattgcacatattttgattctatcttgttaaaaccccacaaaacattattattcttttgtaaaattagtgttcatttgtatttacaaacatatttcaccaattactttccacttcattccttcttacattccttccatttcattctttcttgcatcgccaactgttcatgtacaatcacattcttcttgctaatatcctttatgatttactttagtgaaggtatgttggtagaaaaccctctgttgttgctgatctgaaaatgtccctgatttttatatttttttgtgaaaagtatcaataatatacaaaagtatagcaaatataaaataaatccacatggacacattatctagctttaattattatcaactcatagtcaaacttttttccacaatatcctcccacttccagaaattttgaaaacaaaaatcaagatataattttatctgtaaatatttcagtatgcatctctaatatttcagtatgtatctctaaaagacaatattgaagaacatctaataccaaatataactttacatttatgtttatatttatattatatatctcttttttaatgcaactacagtaccatcacactttcagaaaaatctataatttcctcatattagtattcacatttccccaattttcctataattttgtatagcttatttgagtgaaataggtttaaatatttcttaaatctcctttaatctacaagtttccttgaaagtattctgatgctgaaaccaggtctcttacccaatagagtttatcataataggattttgctgattgcattcccatggtgtcattcagcaaatctctgcctatttttctgtaaaattatagttcaatctataacttaatacagatttttaggtttgactttttatttttagtaagactactacataggttgtaggtacataatgttcagcttttattttttaacagtgttagcaaccattgatcatcaccctgtattactctcattcttaaagatatttcctctggttatgaattctaaattataagctattttctttaagacaaaaatatcttattccattgtcttctgtcccaccattgttataaagaaggcagctgctagcataaccactgttcttttaaaaaaaaaaaaaaatcttttgtctaggccctaaagtaatgttaagatttttctctttgcctttggttttcttcatttcactgtgatgtttctaagtatgtactttttcttgctggaaattcattgagattcttgaatatacggattggtgtctttcctcagtactgaaaaattctcattcattatctctttaaatattgtttttgcccatttcttttctctttcttttcttgcagaaattctagtttattagactttctcactataattcctcactctgatcactctaatttccatgtctcttcacctcttttatattttccatttctgtctctttgagttatattctgaatgatttattctatcttccagttcattcaatctctttgtggagtacatctaatttcctaattagtagttaagctgaaagatgagttttattactgcatttttcattagtagaaattacatttagttcttttttcaacctgctgtgtagctctgtcactttttagactcctgatctctgaacatatctttaaatctgtcttttatttacttaaactcagcccagtatagttatcttaatgatctatgactggtttttcaagcttttgtaggtttatttcgaggttctatcattctgccaattcttgctcaggatgtcctacttccttgtacagctggttatctttgacaatgaattattcattgaccatgaaactgtactggtagaactttttaagctaaaaatgaaagtatactccagagaatatctgcatttgtttaccagaccattttcaattcatgcgttgacaaataacccaattctaaaatggacaaaagaattagacattcctgcaaagaagacagacaaatggccaataaacacattaagaagcgctcaatgccactgatcattaggaaaatgcaaatcaaaaccataatgagataccacttcacacacactaatcaaaaagacagacaaaaaataagtgttggtgtggctgtagagaaactggaaccctcataaattgcttatgagaatgtaaaatggtgcagctgttttggaaaacactttggcaattcctcaaacacttcacacagagctaccatatgacccaggaattctaatcctaagtaaatatacctatgagcatagaaaacatatttccacacaaaaacattttacacagatgttcacagcagcagtattcatgatggccaaaaagtagaaacaaatccaaatgtccatcaattgatgaatgagaaaacaaaatgtggtatacagccatatgatggaatactattcaaccataaaaacaaatgaagtactgattcacactacaacacagataaatcttgaaaacattatgctaagaaagaagtgagacataaaagaccacatattgtgtgattccatttacatgaaatggccagaataggcaaatccacagaaatggaaaacagattagtggttgccagtgactgagaaggaagaggcaaatggggaatggctgctaatgggtacaaggtttttttaggagggtgacaagagtgttctagaattatatagtgatagttgcacagctaaatgaatatacaaaaaaaaaccccactgaattgtacattttaaaggggtgaattttatggtatgttagtatctcaaaaaagaaatgattttttaaatttacatcttgaaatatttttgaccaccaaggtaatataaaacttctccccatggtctgtttggtggtcacaacttcccaaggacaggatttttttcctttcttgttttacctggcatcaagacaactttccttgcactcccttcaaggaggtagagtgagtttttcgcccttctcgtgacatcacagccctttgtggtcccagaattagcctcttagcctacattgaatgagccctgggctgacttccaactatccttggtgacatgcaaatataccaagtgcctattcaaatgcatcaagtttcccctgtttagcaaatgctctcaaggcaagtaagacttaaaggctcctttagtctctcatacgtttagctttctcttagattttggcatgttaattcctatcttttgaattgtttttttaaatacagcattcttagctgttctcagctaaggttgtccaatacctcacaacttacactgttcccaaaatgcaaatcctatatttatttttcaagttaaaattaattctagtaagttaggaaaggatttgcagcctgatatagtctacattagagtagcttcagtattatttatgacttcaggtgattacagtagatatttaagaattaaataacacattttattactttttaaaaagaaaaaaattaaacattaatttgaggagcagtctaatttaaaagaagcatgggtggataacttgttctctcaagtatcaaggttctttaaacagctaaagtaaataagactgtggtaagatacataaacagatctgttttagaaagagtagcttggaaacgaccacacatgtatggaaacttgatctatgatacttgtagatcactgaaatgaaaaacagaatattcagttctataatgctgggaaaaactgattagccatatgggaaaaaaagaaactggacccccacttcacaccatacaaaaatcagttctacatggattaaggacacaaatatgaaaggcaactttttaaatagattttcttttttagagtagttttagaatcacagtaaaattgagaaggtacagagatttcccatatacccccctgcttttagtagaaaatatcagactatatttttataatctcagggaaggtaaagatttgttaaacaagatgccaaaagcacaaaccataaaacaaaaagttgacagagtcaactatattcaactatatataaaacgtgttaatcaaaagacactataaagaaagtaaaagacaggctgctcacttggagaaaaagaaatgtgccacgtgcataactgacaagggattcacatccagaatatataaagagcttctattacagaaatccatttttagaccgagtgcaatggctcatgcctgttaatcccagcactttgggagactgaggcaggtggatcacctgaggtcaggagttcgagaccagcctggccaacatggtaaaaacccgtctctactaaaaatacaaaaaattagccaggcatggcggcatgcacctataatcccagctactcaggaggctgagacaggagaatcgcttgaacccgggaggcagaagttgcagtgagccaggatcatgccattgcactccagcatgggcaataagagcaaaactccgtctcaaaaaaaaaaaaaatctatgttttaaagtaaaaaaacaacaacaaaaaaatggccaaagacataaacacccacaaaacataaacaatgaaaggttcaacatcatcagtaattaaggaaatttaaattaaacccccaatgggataccatttctcacccgattgtctaaaagaaaaaaaattcaggtaattacgaatgtagaagtgtcttacatgttgctgaaaaagggaacaaaatgaacacttacatcccgcttgtgaggctataaactggtacagccactttataaaacaatccggtgttttccagcaaaactgaaggtttttaaaaccatgaacacaaagagacatgagttagaagggtcacttaaaaacagattttaatggaaaaaagtaaaaattaaatttaaaagcaaaaaaataaaaaaaaagactgaaaacatcctaaatatccatccgcaggataatggataaagaatggtaaagtcacacaatgaaattatgcgcggcaataaaaagtgaacaaactacaacacatcagcatgaaggaatctcacagaatgtgcaaaagcaaagccataggattcacatagtagaatatcatttatacagagttccaaagtagactaaacaacacagtgtttggaatgcatagacatgtggtaaaaccatatagagaatcaaggagagtggaaagaaaaagatataatcagggagaatacacaggttggcttcaaaaaatgttggttatgtatatttcttaagcaatacataggcacggggctatttattttatttgtattctctgaatctgtagatgtgtcaaaagtactattttgcacatatgaaataatttctcatttaagaagtaaataaatacatggttgtggtacaaaacattaaaaattcagaaaactatatgaataaaataaaaattatccataattatattaccctgaaataactatagtatttgaaggaggtaaatatacttaaatgatgtgcctttcttctattctttatttttatttaatctgttttaaagctttactgaggtataatttacctacagtaaatttcacatatttaaaatgtataattaaatgagtgacatacatacatataaatacatacacacacattggtagaagcatcatctcatcaagaaaatgaatatatccatcatcccctaaagtttcctcatactccttttggatccatccctccttactttctctttcccctacccccaagtaaccactgatgtgtttttccatcacattagtttgcattttctagaattttattgggtatatgtttgggcatagcttatgcatatgttttactttcgcagacaatgccaaaaagttttccaaaatgactacaccaatttacacttccaccagcagattatgagacttccagttgctccacatcctcatcaacacttggttgccagccttttccattttaactattcttttcatattcctaaggaaaatactcataaaatgatttgtctgaactcttgagcaacaaaaaaaaatcaaactttcaacgaagactgaagtgaaactcattatacagaaattttaatctaagagctttttcccctgaatgcataataataattgaagcaaaggccctaaatgatgtatgcctcacagattctgctttagtcccaacacctgatttctacataagatttttagaagaaccattgggacatacgtaaaagaaccgcataacttaaaagcaagttgagaacatcaacatattggaactcaggtaaaatagagtccaacacagtttatatgtgtgacttaaacactataacacctgaactcaatacaccaaacaaaacaccactaaaattgtgttcataatttggatggggcggggcataactactttaccacgaatagttcttttcaacatgctcagcttcttgctctcagcttctgctacttaaccatgagagaggaacaatgttatgaaatgatgcacttcgtttttaaaatttgtaattattatggataacacaaaggtagtctatcatccttatttctcttttttcttttcttttctttttttaatcatctccctaatcaatggatcgcctctccttctaacctttgtttctcaaaatacggattctaaactcacatttacttgtgagtgcagaatcactattctctcctcagattcattcaaacttggcttctacccttacactgtacttaaattatgtctgctgaggttaaagcccccatcctaacttccaaagacaataggcacgtaatcagttcttgactcccagatagacttctctccttgttaaaactctcctctcctggcttctatgagaccactgccccctagatttcctcctttcctgatgctcttcctcagactccttggctgtctctacccatcgcttaatgctggtgttccccatccttggtcttgccctcttcttacactatacttacttgaatgatttcttacacccttacaggattaaccaccacaaatccactgctgcttccaacatttgtaagtctgatcttgacttcagaaaacctgataccaatatatctattggtatatatccactagacagctatgccagatgtcccgccagaatctcaaactcattttctctccacctgaattaatctctcaatattagttttattcgtaaatgcacaattataattcatatgaagtcaataaaatacaagatatacttaaatttttcatgaagggttaaacaaagaataaatttgtattatggcctcttcctcagttatgaaggtaactcatattcattagcaaaaattacaaaatacaaaagagatgataaaaagcaaatatcccagctctcaaaggcaagcaacattactccctccttccagaaaaagcaatttttaaccatgctgaagttacacatcaaaatatgaaactggtaaatggattttgttgttgttgctaattctcaatattttccaggctatgttctacaatattaatcagggaaaacaaatttctattaactgcctacctaaagggagaactagaataatatttcaattacaaaagcaatccttttatatgctgtattttaaatgttctaaagaaatcaatggttttggcttggcatctatcttgtctatacccagatgtctatcggtgtgcactatagcccacagttcatccacagtatcttcctctaaagaaaaccatagcaaaggaaaacctggaagaaatagaagtcaaatctaaaacctagctgggtagattgtggtttgcaaacaccacagtaaagggacacttttaacaccctttcgccacttcacaaagtttcagaaacatcacaggtaaaaaccctctgcgaagctcttctcatcagaccccgccagggaaaggaaattcgcttctctttccccagagcccagaaaccacctggacgcgccgtcggaagcccgagcacggagcagggagccgggcgcccggcgcgcggccgtccccgcctgggctggggtctccaccgtccccggtcacgggtccccctaggcagagccgcccacctggccagcggggacctagcctcgccccgtcgcccacccctggtgccctccagaccaccgcgcttccagctgtcgcggggcctaaagctctctcaggcccccgcgacacaggcgtcgctgaggagacgtgggaacagcccctgggccccaccacggccccattttaaagaaagttaaagacaaaagagacagaactgacactcacctccagcccgcaaggcggggccgccctcacaggcaccccccacagccctgagcgagctgccaggtgggagaagcgcacctgagccaagccacgccgcgcctttccccgcccgggtcccgccgccctcctccgggtctccacgtcccacgcccgcgctgggccggcgccgcgcggccgcggccggttacctgctggaggcagtgggcgctctgctgtcgccgcctgcgggaactgtgactccggtcacctcgcgcggccgcgcctcgaggtcctgcctttcccagggcctcccctaccctatcacttaccccctcccctccacttccctccccgtacccactcccacaccacccaccagggccgccccgcccctcgggacgggcgctaaggggcgaggcgaggcaaggcggggaggggcgaggcaaggcggggaggggcgaggcagggcggggcagggcggggagtggagtggcgcagaagggctgggcgcggaggggcggggcctcccgcgtacctgagccgcgctgcgcctgcgtcctccgcgactccgcgcttggcagccccttcctgggaaggtgtaaaatgccgccaggtgtggggtgtgttttgggagaagaagggagacaagcggtaggagggggaagagaggggaagctattggcctgaggaaacttctctgacttggggaggcaggggcagtctttctggcgatgtttatgcacactttacttagaagcggagtagtcatgttgttacttgacttttagagtttttataaaaagtctataaagtctttgaggatcagccctgctctctgcttttgttgctatctgctactgccttgccatcaatgggtgtcttggaaagaatattaaatgtatccaccacagcacctcacacccccgattctatgagggatcccctctaaccctggtaaagcggggggcctggcccttttctctgggcttccttggtggaaatctcaacactgcttggaaatgagtttcctagactgtctgatgaagaatggcttagcattttttgtttgttttgttttgacagaggttctgtcgcccaggctggagtgtagcggtgcgcccgtggctcagtgcagcctcgaccttcggggctgaagtgatcctcccacctcagcccctccgccaagtagctgggaatacaggcgcgagccagcatgccaggctaattttttaattttttgtagagatgaagtcttattatatggcccaggctagtcttgaactcctggactcacgtgatcctcccacctctgcctcccaaagtgctccacctcccaaagtgctgggattacaagcattgagccacggtgccagcctgggtggtgggactgtaaaattgaaagaaaggttcatacttttccttctggagagcagtctttcccagagtgagttctgtccatctcaaggtcctagagatgctgcagtgggagtaggggtagatcaccagatcacattaatgtgggggagagagacacaaaatatttgttttccttgagattcacaatgcatactagcattttacaggcataagaaccatgttttactttctttgatcctgcatctcccaaatgtgtttgaccatagaactcttttcttgagaaaggcctgtttccaatcttgggcattagtgtttcaacaaacactttgaaaaccactgctttcaactcctagtacgttcacatttaataatgtatcacaaatgtttgcaaagttgtgcactgttcacacaaaactttcatgagtcatctcatttaatcctggaaattgcaatgtagctgttattatcttcattttgcagttgaaaatatttaaaggtcagacaaccagttagtggttgcccaaacatacagtcaagatttgaatctgaactttgaactccaaggcgttttagactaatattcattctgtctctctctcatttgttcctttttttttttttttttgggcaggctctcactgttgcccagactggattgcagtggcacaatcatagctcactgctgtctcaaactcctgggctccagccatcctcccacctcagcctcccaagtgtgctgggactacaggcacataccaccacgcctggctaaatttttaaatttttttatagagacagggtcatgctttgctgtccaggctggtctgaaactcctggcttcaagcaatcctcatgcctcagcctcccaaagtgctggaattacaggcatgagccacagtgcccagcttcccttgatacctaaggagagcacatccttggttagaaatcactagattcatgtgttagttgaatcttctcaagggcaagaccataacttttacttccttgcagcacctgacttagtgcagggcacaaaagtgtcattgaaatgtgctgaatgaatgaaggaggaatgaatgctcaataactactaattgaagtgagctgatgcttggttccttaaatgaacaactttaacaaactcttcactgatgcagaagtaccaagagcaggagctcccctaattgttcctagttttcttccctagtccatcttaaaacattttcctagaagaatcctctctattgacagatacagttcttgtaaaatcatgaagccaattcctttgttttccttgaaatgggcctccttcctgttctatctgaggcaaggctacttgaatggaggatattgtacacctttctttgtgctcttatttctaatctcttcccacaaaaggatcgtcctcaaaatactatgaacgggtttttgtttattttttaatttagcaattttatattatttgaggccgatctaaggagaaaaatagactggtcaatatggataacgtggctgcttagatattactgtgtgtatcaattctttcatttgatagagacaaatcgcataattcctactctaaacccctattcattctttatttaatgcagtttagaagtgctttgtgactcagcccaagcctacctctccagccttatctcccagtatttccatcacacctttttgacctactgaaggaattgcagttccataaactgtcgaatttgcacacaccattccctctacccttctcttacaggtatcaactagcaaactcatgttcatccaaccaagataccacctcttctagacaatgaaaccccacaacacccattcctgactcaattaggtgccatttcccagcataaccaccacaatccatctgtatctctatcatggtgcctacatcatagctgtgattactggcttcttttcccacttccctctagatgcattccaagtgagttaccaatgggcaggaatgatgacttccacctctatttcctgagcacacagcatagcacttgatatagaaggcactcaacagtttgttgaataaatgaaaacagctttcaaagagtataaattcctagagtgcttgtgaaataattttacaaataaatggtcatgaatacattgggggtaccagacagatttttgcttctctcaaaattatttccttcccattttctgccttagaacataacagcagaagcctatacatattcattcatttcatgtatttgttcaaaaaatatttctgagtgcctgccatgtaacaggtgcagtactaggcacttgcttcagagaggaagtgacatttcaaaagtgtcatggatgctcaccaaacctcaattcctctccctgggcatgaagctaaactgctttgcctagccactccccttgcatctaggtaaggtcatgtggccagttctgaccaatggaatttgagcagaaatagagtttcacttctgcatctaggcaactaagaacaggtgagccttcaccccactgtctccctctttccattccatgacaaccttggactaaaccatgctaaccattgctaaagctcacaatacgacaagatgggagaaatgtctgggtccttgattggcttcatagaacaaagctctctccactgcccactaactttgattggatggtgatgtgagtgaaaaatatattttattgtgttaaaccactaatatttggggtttttttctaacacctggatttacttactctgataggcactgtcatgaatgatgacatatagattacattaaacataccaaaaaaatgtttctcatgctgtaggcattctatgggagacatagaacatgaaaatttatcaaagagcttattaaggtcatagaaactttaagtttgtcccaagtagataaagaaaaatctttatggatacatagctttctgtctctcagatggccaccttatcagaatgctgacatcttgacctgaaaacaagcacagagtcaccattatgccttcttcatcatctttatctgcacttctctgtctctttcatgcactttgaagggtttccctgagtgggcttcaggagatccagtgttactcaaagtctagtatatattcaggaaaagagaaaaataaaaaggctaggctccaaaaggtcttgaatagcttactaaggaatttgtccattaatccacaggatacatagttgaataagctaggaactatttgtagtgagaagagttgcttttttcttttttctttccctccctcatcatcttacctggataactgttacccactaaactaaggtaacaatgggataatgggtggtcacagatgctccaccaggagaactaatcatgagagtctcatttctcagtgccctcccacaaagcccttcctcaaaacacccatctgcctcctccaaaccccaataatcaatgaaacttcatagcactaaaaggctgacacagttgtattagaggtgtaaatgagaaatattcagcacctagagcaggaggcaatagcaccagtggggtcaaaggaaatctgtgaaggaggaaacaaagagagaatccaaaaacaaaagaaggttttccaccaaccacatgatcaactcacccaggctgagtagctggtccaaagaggatgacagcacatgaaactgctcaggattcaagaacaaaggctcccagactcactgagaagagcagagaaacatctaaacccctatttctgtgacctctgtatggactggaagaaatgactcaaacctgaagcaaatgaccctgcattcttctggacccacatcagcttgcttaagttggaactccatttccccaaatttatttccctatatggttccaagttaggttggccaaaaagaagaattgaggcaagatttggaaggtgaaagtggagcagagccactccctctgaagatcctcatgactacacgtggtggcagacacacacagagattctgggaggttcttgctcatcctcctcctcatgtctagctcttcttcccaactctagtccctgctggccagaggacccaagatgacttgagagcttggtgggagacctccagaagtggcagctatgtatggacttttccacagcccccctcctgggtaccactccagcagttagacatgtgcggcttcctagaatcattgcaagttctggccttacaagtccacctgtacagggcttcaggatggctggctagtgacttttctctaacccttcaattccactttcagacctttacttcaccagtttctcacataattctgcaagagattagtcccattatcagtaagactctagtggttctgcttccctgattaaacccctccaatacatcattcatgttcttggctacctagcaataagattatgcagattgtaccatccatccttcccttccaccttttttttttttttttttgagacagggtctggagtgcagtggtgcgatcatggctcactccagcctccacctcccaggctcagctggtcctcccatcccagcctcctgagtagctgcgagtataggcatgccaacacacccagctaattttttgtatttttttgtagagacaggtttttaccatgttgcccagagacaaggtttcaccatgttgcccaggctggtctcaaactcctgggttcaagccatctgcccacctcggcctctcaaagtgctgagattacaggcatgagcctccacgcctgacctccttcccctacactattaaaggccaagtgctgaagttatttatctataggaactacagaaatttgggtaaaaattatgccctagtagtggtctccccatgagagggtgactggttgcccactgccttcacactgaatttacataatagaacaactgactttcagcttttcgagcttagaaacttgttccttttctcttttagcatactgagtaaatctctcttgaagaaggaagtttggtcaggctcaccagaagtagacaatagtatgtctgtctattaatatagaatgagaaataggattgttgcaaggcccaaacatgtatcttactgccaaaacactatgccctgaagaaatagctatccaggaagctaaatgataaccaaacggttgcctgatcagggaaatggaatgaaaattaggagagttgggaggaatattgagcgttagcgttgagatatgatagctaccatcaataccacagaagggactaacctgtcacagttgcagataagctatgtggttccacttactggagccacagtcctagtcatattccttctttttagtaggttacagtattggccccaggacttcatcatgcactgtatccatgccctttgctacgactttgaagttccttccactgaaggagtggagtatatttccctacccgttgattttgggttcagccacatgatttgctttggtcaacagaatgaaatggaagtaatcgtgttcagttctgcacttaggccttaagagacttcatgtgtttctgcttgccttcttgtacttctaccaatgctagaagacttccctgggccagccagctgctccaaggagggtaagacaccctaaagcagagtcatgccaggtaaacccagctgagaacagctaatccccagctgcccagcaagcgtgagaaataaaagatgattttttttttgtaccatggcattttgggaatatttgttacatagaaatagttacctgacatgtcctcccaccatgattttctggaatggagaatatctaaccccatcatgaccccagagttccagaccaatgtgcccaggactcccctctcaagtcactgggcagcaccaatttagccaatagtaagttagaggattcagtttctcaccctcaatacaattcacttgaaattttctgtcctttgggttagatataaaatctaaatattttttaataacagagatgagaaagatttaacaacttttcagaaagttactgctgaatattagtgattgtacatgccactcaaaatcactgtgtgaaataacattcgaagcctatcatttgtaacttctgctttcatcagagttttaggaaaacacctacgcccagcaaaatccccagggagttttaggacgccaaagctttcctcatctgtttttaaacccactccacatccataaagataattcatgaataaatgtggttggcagatgaacccaatattcaaggacatcttttttaagcctttagttaagacctttggtttattagtttacacgttagtctctctatgaattagaagtggagggaggggctcaaaatgctttataatcctattttttttcagacattccctctttctccaccactcccagcctttcactatcttcctccacccttctagcttatgaagggactaatgatgttgggatagtttttgaggaaatgtgggagctctgtaatccatttcctacttgacgtgggttacatttttaccagaagaaaggaaaaaaaaatgcaaatatatttccagcacagttgggcggcagctccataaagtggcttttaaagagttatcccattgccctgagagttgacagcactccagggaggggacagggtctgtgagggccagagaggcatacccttccattcctaagtaacatccccccaggaaacaatttggcgtttcctacaaaacatgaacttgtttggcagcctgagcaactcatcactcctgttcatctcatattgcttgcctgattaataacaatgacatagtgaatacaacttcaataggaaacgggggaggaagagccaaacaacatccttgccaaacaaacgcacatgcccacagactcacacaccccaatatataaagccactcttaaaatgttgggaaatataaaaatgtttccatcaaaaccatcttatgggcccaacgtggtggctcacgcctgtcatctcagcactgtgggaggccgaggcgggcagatcatgaggttaagagatcaagaccatcctggccaacatggtgaaaccccgtctctactaaaaatataaaaattagctgggcatggtggcacatgccttagtctcagctactcgggagggtgaggcaggagaatcgcttgaacccgggaggcggaggttgcagtgagccgatattgcaccactgcactccagcctgggcgacagagcgagactctgtctcaaaaaaaaaaaaaaaaaaaaaaaaaaagccaccttatgttactggcagggaccagggtcaaagattacttcctttctcccatccaaatagtacatcaacatacttggggatgacaatagctgtcattcttcatggacctactacgtgccaaacactgtgttaatggtccatataagtaagtgtgtatacattggctgggtgcggtggctcatgcctgtaatcccagcactttgggaggctgagaagggggtggatcacttgaagccaggagtttgagaccagcctggccaacatggcgaaaccccgtctccacaaaaattagccgggtgacgtggcgcacacctgtaatcccagctactcgggaggctgaagcaggagaatcacttgaacccgggagatggaggttgcagtaagcagagatggtgccactgcattccagcctgggcagcagagtgagtgaaactccatctcaaaataaataaataaataaataaataaataaataaataaatatgtttatacgtctagtctaattcttgcaacaaccatttaagaattagtaggcattatctaggcattacagataagtaacttctccaagatcacaaagaagtaatggtacagattggatttgaacccaaagctatgtgtgactctaaagctcaagctccttttgttaagtcacagatttagttggtaaattgtaaagcctagacttaaggttgtttccttactcaaagcccattggaattgtcatctcttctgtgggtccttgacttgttctggacagaattctgatggttacaagtaacagaaaacctctccaattagctcaagtaaaaggcagggaatggtattctattcctacccttactttgggtaagggaacatatatgggaacatattcagagaactgaacaagcaggcatcagaaagtgcaggacctaaggtagcccagacacccctcagcctcgcattccatgaagactgcttctttttgcacacctgcacatcccaatcagcttatctgagtcaccagtctctcaaagctgcagtctacacctgattctctaattacttcctcaatggtatatctatccagcctctgggctcaggagccaccaccttagaagtaagtgcttctcccttcccagttttctgggagaggaatctgatttgctcagctcatattttccagtcaggccacacacaaggtacaaattgctggctagtctatggttgggcacccgttgatcagatgtttaccctggtccacttcagaggtagctggggagaagagggtcaagggatctgctgctgcacctctgggcagggaagtaccctgaaatccaacagatagacgctcagctttttctctcctttctttcataagactgtcacacctgcattaggattggattttaagtagcctcccattgctctccaactgccctctacttattttctagattcttacagtaacatcttattggggttctatctgcaatggccttatcagagtgctaaaaacacagtggacactaaaaaatgatttgttgtatttaggtagagttcatcgtggagaggaccaagacagaagatcaagaagaattttttttttaatctcttcccttgtccaccgaaagaccatcaaaactagagagagattatcaaatgcctggtgacaagtcctcggctgcactggcttcacaggagcttatgtggagaagaaaaagaatttgagccacagcaacgaaactctaaagttgtttccaactctcttaccaaaagaggcatccagcccaacagctctcaacctggagtaaagctcccacgtgccctgtggagcatcctcgctttgattccatccctttactcccattcagagaattctacttgaatttaaataaatgactcttctgctattattgtggtaagcttgattctgctgtgatttgaaaagaacaaaaaataaattattgcaaaacctttgtattaaattactggtaacaaattactggtaactttgctacaattggcattgtgactgagggctgttcgttaaggacattctgctgcccatggctgaggtgacactaactgtatcaacaaggatgttttcagccccagataaacagaaaacccatgaaaaaggatgctttcagccccaaataaataacagaaaacccaattcgaatggtcataaaaacaaggaggccaggcgcggtggctcacgcctataatcccaactctttgggaggccgaggcaggcggatcacctgaggtcaggagttcaagaccagcctggccaacgtggtgaaacaccattctactaaaaactacaaaaattagccaggcgttgtggtgggcgcctataatcccagctactcaggaggctgaggtaggagaattgcttgaacccgggaggcagaggttgcagtgagccgagatcacgccactgcactccagcctaggtgacagagcaagactccatctcagaaaaaaaaaaaaaaggaaatgttttagtttctgcaatggtttaaatcgtccacagttctttgaaactcctttcaacaaaagctggaacctgtgtcctctgaactgcatctaggctaaccatagtgactggtcaaccagcaaagtagattggaaatgatgctatgtgatggccaatgctaggtcagataaggtgatgcagtttctacatagttatctttgtgtgcttactcttggaatccagctaccatgctctaaggaagcccacacagtttgtggagacccaaatgaagagggccacgtagaaaagaataaggcccatgaccttcacatctgactgagccagcattgactttccagtttgtgagggagccgtcttggaagtggatccccctggtcctggctaagcttccccacctgaccccttgtggagcagatataagcctttcccactcagccctgcccacattgcagattcataaactaaataacgataaaatgctgttgttttgagccactgtttgggaaaggtttgttgcacaacaatagataactaatatggttaacctatgaggaaatccaaagatagatcagccttcagagtcattgatttgcaattcaaccatttagcattgagtgttttccttcccttttctctgttctgcattatgtaagtttcatcctaaatctagttccatttgtggttgtagaatggctaccaggggaagaccctcctccttcaattcaggtgaagagaatagaatgaattcccctggaatgctcttaagagaaagtaactttccaagaagccagcaaacctcttatccctttggccagaattaggtcacatgcttatttttgaaccaatactggcaaagaggataagatatcattttgactaatcaggcctatcccttaaattgagaccaatttcccaaaccacatggctgctgcttatgggatagaatggatgttgggaaagtcgcttcaccaagttaagatatctgaaagaagggacaggtaaatgagaaaaccctcaggtggtggccagcccgggcacataactaagagaaaacccacaggattaggagtatcctgggtaagccagtcgagggtctagcatgatacagattgtctactttcaagacccatgtgactgcagaccttccctttatccccttttctggcatctcccatttttgttacctgtcttaccttcatcagccatctgcgtatttattccagctcccttgcaagtgtcagcctagtgggaggaaaatgcactatccaacttctggtaactttattccaatttctctctgaagaaaaacctcctgacatatgtaagggttggtgtcattatttttcccatttttgccaatgaaatagctaaggctttatgatagccttgggaagattacttctccctggatccgtctactcacatgaaaaatgaagggagtagaccagaagattaataacctcttgagctccaggagtttctgtactcttactcctatcttttccaagatgactacagccatgcctgaaaattcgtatcatttgttgctgcaatgctgtatgcctagctcttcatagtcatcatctccccaacattcactattttgctttcaccgctttgggccatctgcaaatcctgccttcctttttcactttctgggcaggatgtcactaaaagtaatgaggattccttagttttactacgtggctttttcctgtttctacctttgaccttgtgctgccacctttaaacacagcacaacagtgtagtggagttcagcaaacatttaatttccagaaatttaataggatatttcctgaaaaaacatttgtgtgaattaagtgtaggagactcagagtcgacatctgcttttagtctcatcatgaggaccactcttcctccattccaaagttgcgtggctgctgtgatttcccactatttcacttccccagtaagagttgattggttcatgagatggtatctaacccaaggcggtcaatcaaaatccttccctagaatttgttttaaaactgtaactagaaaaaaaaaacagtcctctttatagtgacacaagacactttggtggccacgtttcccaggtagaacaggtcaatccataataaaagacagtgaagttgatgtgctgagagaagtaaagataagagatggtgaaggattccaaaggcattagatttcttggttgcattcttggttgaattcacctctacttttcccctagtactagtacacaaatcacaccaggtataagcccataaataatatattttgcctaagttaatacatgtttagttcttgtcacttaaacacaagagatttaatatgagtactcagaaaactgtgtccctctaagattctttggaactgagtctttagcatttttattcgactatgatttgcataaatgtttattttctttaattgcttgcctctgagtatttgtttatggcattaaagatggggtttagaggccaggcacagtggcttacccctgtaatcccagcactttgggaggccaagatgggtggatcaccggaggtcaggagtttgagaccagcctggccaacatggtgaaaccctgtctctactaaaagtacaaaaaattagctgggcgtggtggcatgcgactgtaatcccagctactcgggaggctgaggcaggagaatcacttgaacctgggaggtggaggttgcagtgagcccaaatcacaccattgcatgccagcctgggcaacaagagtgaaactccatctcaaaaaaaaaaaaaaaaagattgggtttaaaaaatgggatttagaggcagaaaacctgagttgaagttctggcattaatactttttaaacatggtgacagtgcaagagcctccctgagcctcaatctctttcctaaaaaaaaaaagggataattataattgttgccctagcaacctctcagagtcatgatgataatcaaaataagaaaatggggagggatggggccatattcatctttgcatttctaatgtctactttaaagcctaggacagtatagtacatactgaacaaatatttggtgaatgaaagaaaaaacacaaaagcatacactataaagcgggggtccccaaaccccaggccacggatcagtaccagcctgtggcctattaggaaccaggccacacaacaggagttgaacagcaggtgagcgagtgaagcttcatctgtatttacagcctctccccatcactcatattaccacctgagctctgcctcctgtgagatcagtggcagcattagattctcataggagcacaaaccttactgtgaactgcgcacgtgagggatctaggtttcatgctccttatgagaatctaatgcctgcccaggcacagtggcttacgcctgtaatcccaccactttgggaggccaaggccggcagatcatgaggtcaggagttcaagaccagcctggccaacactgtgaaaccccttctctactaaaaatacaaaaattagccaggtgtggtggcaggagcctgtaatcccagctactcaggagtctgagagaggagaattgcttgaattcaggaggcggaggttgcagtgagccgatattgcaccactgcactccagcctgggtgacagagcaagactccatcttggaaaaaaaagaaaaaaatatctaatgcctgatgagctatcactgtctctcaccaccctcaggtgggaccatctagtttcaagaaaacaagctcagggctcccactgattctacattatggtgagatgtataattatctaattatatattataatgtaataataatagaaataaagtgcacaataaatgtaatgtgcttgaatcatcccaaaaccatcccctcacccctagtccatggaaaaattgtcttccacgaaactggtcctgctgcaaaaagattggggaccactgttctgaaggactatttaaatgcgaattatataatgaagaccactttacaataatacagggtgtgtataaatattaacactggcaacttacgttggtcttgggctgaatgacaatttcagtgtcatgaacagagcttcctataaacaagctgtaaagtgagtggaatttgtggacagtacctctccaacctttctttggttgttctccctctgtgtggtctaaatagagtgtcaaggtgtgtctggtcccaagttctgtaagtggccagtgctctagagctgtttgatgctgttgccgtagcgtcggaatgaagaaggaagttttaaaaatcacctaaggctctttcacttataattagcacataaacttacctgtccctttgaagtatcacaatggctgaggctctcacaaaattctcaggctgaaaattgcctatttataacttctttttctcttcccaaatgcctatgtaaaattattcaaagaagacatgcagatccaagaagcacactagcctggtgccattcagcatatgggcaaacagacctccacactgtattatgccaccaatgtttatcctggatcatcatgaagtaaaactctatacgtggtggagtctagctactaagacaaaaagtggtccacactttatttttagcatccatcaaaataactaaagttatttaaaggtttagtgcttcaaaaagtattttctgaattatctgaagtacatttcccaaaatgattcattttctaactattcaagatggccttagttttcaagtatcattgctcattcaatgcttcaataagttaatcacaggtactagattcccataatgtaaatttcacaatccttaacattgtacttgtgaaaacagacagtctctcagcaataggcatactctattggaataaaaatgcggccaagcgcggtggctcacgcctgtaatcccagcactttgggaggccgaggcgggcagatcacctgaggttgggaatttgagaccagcctgaacaacatggagaaaccccgtctctagctaaaaatacaaaaaccttagccgggtgtggtggtgcatgcctgtagtcccagctactcgggaggctgaggtaggagaatcgcttgaacccaggaggcggaggttgcggtgagcggagatcatgccatttcactccagcctgggcaacaacagtgaaactccgtctaaaaaaaaaaatgctctgcctcactagccttaactttttcaatcgggaaacctgcctttgatcacatttcctaaagcaaagattgttgtgaaagaatagagtatcaagaatttttgaattttgttacccccaccaatagatcactaactggttgtttaaagcaaatgatctcccactttcctaccttaatagatgtaatataatgtgtgtgctttaatcttagcttgaccagtaaaccataccatgtcaagaaatttgcatgacatgtttgaggaacagtgagagggccagacccactggagcaagagaaagagaaagagaagggtaggaagagagggcagaagaacatggggtagagttggccaggcatagtggctcacgcctggaatctcagcactttgggaggcagagggggcagatcatgaggtcaggagatcgagaccatcctggctaacacggtgaaaccccgtctctactaaaaatacaaaaaattagccaggcgtggtggtgggtgcctgtaatcccagctactcgggaggctgaggcaggagaatggcgtgaacctgggaggcagagcttgcagtgagctgagatcccgccactgcactccagcctgggcgacagagagagactccatctaaaaaacaaacaaacaaacaaacaacgacaacaaaaacacaacatggctgttattaaacatttgctgctactctaaataggctgagaagccattggagagtttggagttgagaaatgacatgaactgatttcaccttagtacagatcactccaactgttgggttgagaatagaatggaagggacaggggcagaggtgaaggcagagggaccaggtaactgattctgcctataatgaaggtgagagaggaaggtggctgggactcagggtgtaggagtgaaggtgccaggtatgagggttaaatgatatatacacagcataataattggcacagtcagtccccagtagatgttcactgcgataatggcattctgaaccccaagactcaatagtagatggttggttcattgcatggcagacccaggtaagtgattacaaactagatagttgatgtcagaattagaaaaggaactttttgaacatttctgcatgtatcaattgaagtgaaattgagtcaaaagtaagagttcatgctgcccttcactgaattctctgcttggatttttttttttttttaaagtacacacacacacacacacacacacacacacacacacacacaatctgtgatcaaaaaagttattgaagtgctgcagttgcccagaattcagcctgaccttgcagcactcctagttattaaaaatcatttctatgggcttgcattttttggtttaacaagcacaagaggccatgaactcttaatatctgaagcaaacgtgttaaacatctgggatctggcataagcttctcctgtgggatgcattgtttgtgcaaacttttattgaattaaaaaaaaaagtaagtactgagtttcaaaatattcgtgtaacctagtaagaatatttctctgaatccagagtcaaaatacagagttttaaaaactgatttataaacttaaatttaaaaataggttagaagtcttaaaacacagcgtggttttgaagtggaaccaaacttcagctctagctctaacaggagatggctgatctaagttaaataggtttttccaggctaaaggcacagcttctgaccactctaagaaagccatagggtttgcagacagggtactggcctagagtttagggcaagttctgtggcttaaacacagataatcttgggcaacttactttaccctgggcttgattttccttatttcctatagaaactggaaggaaaaatacttacccatgggtcttagaaatgtacgaggataagaaataaaataaaatagcaagtgacagaacttttaaaagctctacacataagatgaggaggaggaggaggaggagggggagggggaggggaaggaggaggaggagataggagagggggaggggaaggaggaggagataggggaggtggagaggaggagaaggaggtggaggaggaggaggaggaggaggaggagggggtaaaacataagagattcctatttgaagatgcaaaagaccaaacaaactgaacaaagctttttaaagaagaaagactaagggttgtctttggagtgttcctctagggagggacaacctcttgtattcctttagtatctccttgaagcacccagggaagcattcagacacaggggacagtcttatcagtctagactaactgacagacggacaggtccctctccacttccacaatccataccctgaatattctgaggagtaggggagagcaaagcctggctcagcccaccccattgcctctgctagactgaaggacaggaaatagagaaggagccagtcctccccaaagagggatagggatagctttttaaactcacctctcccttctgagaggaggctgctattccttgcaacgtatttttgtgcagctgaggatctggaggggttctgacctgaacaatgggctgggagctgagtttgggagctggagttctgcataatagagtaggatgaatttggagtttggggactgtgtagaaagaggagatgaagaaacaagttgagcaggggaaaggaaggatgggtggttgaagtgggaaccagtggaacggcagggatggagggctgaaaagcaggttcgcttctgtcccaccttccactcccaaatcctcaggaaatttgcctacagacccaaatgcaaatgcactgtattaatttctagggctgctgtacaatgtaccacaaaccgagtggcttaaaacaacagacgtttattctctcacagttctggaggccagaagtccaaaatcaaggagtcagcagggccatgctccctccagaggctctaggggagaatccttccctgcctcttcctagcttctgttggtcatgtaaatccttgaagttccttggcttatagcctcaaaactccaactctgcttccatctttgtgtggccgccctcttctctgtgtatctttgtgtgtcctcttgtaaggacatcagtcattggatttagagctcaccctattccagcatgaccttatcttaacttgactaattacatgtgcaaagatcctgtttccaaatgaggtcacgttctgatgttccacatagacatatattttcaggaggacactattcaactcactacagtgttgtttatttttgtttttatggaaattgagtaagaggtagaatctcatgtcagggccaactggcaagggacgattggatggtgcggggcgaggggagttgtggcagtggtaaaaatggcctgtgaaccaaacgaattcaagggaagtgccgaggttggagtcagaagtgaccatgaaaataaaagctccctccacttcctatgggagtttttagaagtgtgggaagactttggaattctacagggcagggagtaagttcaaagtaatatcatctagatctcaaaggccaggaaaccacagctgacttctgggttacaaataaaacaaagacatatgagagaggagaaaaaaagatgaagcagaaggaaggacaaaaggtggagagatgagcatgaaagacagatgagtttttgaagagagacaaggaaacgaaaaagcaccagctctttggggtcagggttaaggctctaacacagaatctggcatataaaaagtattcaagatacttttaagggccaggcgtcctggctcacacctataatcccagcattttgggaggcagaggtgggcgaatcacttgaggtcaggagtttgagaccagcttggccaacatggtgaaaccctgtctttactaaaaaatacagaaagggcatggtggtgcacacctgtagtcccagctactcgggagactaaggcacaagaatcacttgaacctgggaagcagaagtagttgcagtgaggtgagatcgtgccattgcactccagcctgggtgacaaagtgagaccttgtctcaaaaaaaaaaaaaaaaagacaagtttagggaagaaaaaaggaagatagggaggagggagagctgtgcctgggaggcttcatgtggtatcactaacaatttcctccgctgtccccagagctgtctatactgtggctgtttgttcatgaccctaattaatgtcaaagcccagagtgccatatgggagccctctctgcaccacaggcctttagaccgaagaggcagcagtccatcttccaccaaggcctctggattctctctatccttttccagtgatgcttattctatctaaactctcatttgagtggccatataccctggcctcttggtgttttttgctgtccctagtgccaccagagtttaccttaccttgaaaggtcacagaagtggtctaaattaggaaatatccttcaacgccaaaaggcaaggagagccccgtggattaagccagctgttttcagatcacttgagatacaagtagttacaacagtttaggattggaaagatcctgtggtttatgagaaagagcgctagaccaagaggtagatcaagcaagagacccatctgccaatctgccactcactcccagcgttccctggagctagtcaatgccccactccaacctcagagtcctcattgtaaaggcagttggccctcatgacagaatttctagatcctttcagttgtcatggactatattctatacttttctggaagcattctcaacaaaatataattaaaattacctccctggtacacccatagtgtatttccagagggaaaacgttgctagaaactccattcccagtttgtagaaagtggccaggaaatgggtctgatttcaaatctttctgaaatgcaacgagaggaaagcactgagggaatgccgaagtggggccactttagtctcccaagtcccaggaaccgtttataaaccgagtcgtggcttgggtgaatggcttgggtatttggaacatttgacgtgaagaaagatgtaggggcacctgctgctttctcagacaatagggaagaaaaacaccaagcacctccacacacatcatcttatttctcaaaacaactggagccggtattattatccccatttaacagatgagaaaagtgaggctcaaagaacctcagtaaattagtccaggtcacaaactagtaagtggcagggttgagacccaaattcaggtctattcaactccaatcccagcattccttccactattggcaacagattcgcactatgatgtacagtcgcctgaaccacaacaaaattcctctaaagaaccagagtggtacccagcccacttttccaagtttggcataaagaacagagccatgcattgaattgggagtaacagctgtttggccagggaccacagcaaaaaagtgttcatgcagggatatttaaccagctcagtgcccagaacagagtagaagcttgaagaatatttgggtttttgttgttgttgttctttgtttgtttgttttttgagatagggtattactctgttgcccaggctggaatgcattggtgccatcatggctcattgcagcctcaacttcctgggcttaagtgatcctctcacttcaacctcttgagtagctgggaccacaggcatgcaccactatgcttggctgattctttctttcttcttcttcttttttttttttttttttttggtaaagatggggtttcactatatttcctaggctggtctcaaacccctggcctcaagcaattacctgcctcagcctcccaaagtgctgagattacaggcgtgagccatcactcccagccaagaatatttgttgagaagttgagtaaatacaggattcagggttgacatcgacatcttcagcaggttacaaaagaaggatctgaggctcagagaggccagatgacttgccctaggtcacacagcagagagaattggacaaagaaccaaagatgtctagactttcagacaaggatcttcctgtcacatcaccgtaactcctctggccaggaaaatttttcctgtacctttaattaaatgcagtatactttggggtaaatgaatgctaacctccaactgagaacatttattttcctaatgagttcattagcaaatgactctgctgcttcaggatgcagagatagcttggttaatgcacgtttcagttttcatattatgctatgagtcatttttgtttatcttagaatttctttcctcatctgttgtgtgtggtggccctagtcaccagggataggagctttgtcactcactcaggaagtgatggactgaccccctgcgagtggatgaagaaactgctctcataagcgtggttatgcagatcaaagagtgggtcctctacacatgttcccaattaactgtggccatcccattccatatcccttctactcgccagcatagtttctgatcctttaatagcccaaacaacaagagggaagcccagcccagccaaaacaaaagcagaaaacagccaaacgaagatgaaaacatcctagtgattagtgagagagctccagatatcccagtatctggagccacctcgggatactgggatatttggagcttctcaccgcaaggggtcaccttatctgcacctggtgtcacttcccacaaggaccccagagctcggtctctagcaccagactctgtgctttcatacacactgctggccatcttcacaataccttcacccaaatgtggccatcttcaattcagcatgttttatttgtccagctgtgtaattaatatctatgcatttaactgtatgtaaatcttaccttaacaaaacataaaaattaaaaaaaaagaagtaagtttaaaatgacattcacctttcccctctaccaaaactcctcctcctgaggtctttagctcacctcagggtgtgccttggctccctaagcctccgtacccgatcaatcaccaagacctattgattccacccattccacttctcctgaagctttccccttctctgcattttcccatcatcacattctactcaacctattgacactgaccacctactatgggccaggcactgtgctaggctgtaagtctacattatgaacaacacacaaatagtatcatgcaggagtttgcatttagaaccccaggtggaaactacaccacaggggcactggtaatacagcagaagtgactccctctacacaggggtgggggcttggtgggctgcacagaccacagaggtcagggatggctctggaaagttcctagagaggctgatctctgtggaaagatgaataggcatttgccaaatgggcaaagagaagaactgcattccagccaatgagaagagctcagacaggagcagctggagggagtacataagccattctggtttgttggggatgtgtttgtttctccaagaatttggtctaaaggaggggaaagtggtaggagctggaactggagcagcaggcaggaaccagatcacggaaggttttgtcaatcctattcaggagtttgaatcttaacctgtgggcagagggaatgtcagtagggttctaactaaggacctagtcagtcttactctttagaaagatcgctttagaaataatgtctcttatgtgaacaactgcaattatttttcttaattctcatctcccctccctccatacaccatttccaaagtagaaaacaagatgatgtgtcttccctaattaaaaatcaaaacaaaattaaaacctcaccacagcttcccatagcagacagcagcaattccagactccaaggaaaattgttcctggagatgttaagttttgttatggggggctggggaaggggggaaatcatttccttgcaaaaaaaaaaaaaaagttggattaacctttatacaaaattaagcaggttttcttttcattgcaggacttctcagagccttcagttttctaaaatcaactgtgactctttaaaaaggggattcagcattcaaatccccaacttattaaacaagtgagctccttgatcttggagcattgattagcatcttcatgggctagtcttctgtgaaatgctgacctgcacaatatgaagtccaaactcaactaggtgaatagtcttgtgaataatctagcctcaacttttatcccttcctgacatacacacacacatccttgtatcctctgttccaaccacactggtcttcttactgcccttcccctctttctatgcttgaggaattctgggtcatcctttaagccatagccaaatagcaactccactgtgaaaaagtggtctgtagtgagggttgcagagatacaggttggtctgaatcaaggctactgtccatgaaaccctctatgcagtacgtggaaattgtttggatgaataactctgtaatctgcgaatctgtgaagagggctggactacattttacaaggcaattaagggttctttgtgactggcaaagaggctctggcctctggagactgcactgtcctgtatttaaagaaacttcagtttttcccagcctctctgctgtagattacatgaagaacagaagcatcatgtcaagccgctggataccataatggagtgggacaaaaggagtgctggaaagatgttttgaagtccatgtttgggaatgagtggaggtagcctggatctccgacaaggggtactggaatgaaggaaattgattctaggatggagagactggaaatcagaaagaccagagaatgaatcctcagaagaacagccacaagaaagtaccatgttcacataagttgatacagatactttcttttttaaagccggaacaggaagagggcaagtaacaacaacaacaaaaagctatggctttgctcaggaagagttgttctagagactgcttctgtgtgctaaggagagaagaaaagaggaatttaaggcagaagaagtaataatgcataaaaagctttgtgctttgtcccttggacccagctttgctttcactggacaggacctaaccctgactactgccttccaactttgggatggagaacagacggaggggaaggtgggccagtgcagagaaagaaagaagagagagaagagaggcaggggaagaaacaagaggaggaagtggagggaagcaaaggggtcaccagctcttatgcagaagtaaacaggagctggacatgatggctgatgcctgtaatcccagcactttgggaggccaaggtgtgtggatcacctgaggtcaggagttcgagaccagactggccaacatggtgaaatcctatttttactagccaggcctgatggcgggtgtttgtaatcccagctacttgggaagctgaggcagaaggatcgcttgagcctggaaggtggaagttgcagtgaggcaatattgtgccactgcactgcagcctgggtgacagagtgaaaccatgtcgttggaaaatatatatatatatgtatatatatgtttatatatgtatatgtgtgtatatgtgtgtgtgtatatatatgcattgcatctgactcagcaactcaattttgtaattttaactcatttaatcaattggtcttaatttaaattataggctgggcatggtggctcacacctgtaatcccagcactttgggaggctgaggcgggcagatcacttgagctcaggagattgagaccggcctgggcaacatggcgaaaccccatctctaccaaaaatacaaaaaaatcagccaggcgtggtggcgggcacatgtggtcccagctacttgggatgctgagatggtaggatcgcttaagcccaggagatggaggttgcagtgagctgagatcacaccactgcactccagcctgggtgacagagtaagactctgtctcaaaaaaaaaaaaaaaaaaagaaagagaaaaagaagtaaagcatggattcagagtttgagcaggcgaggaagaggaagagaaagagaatcagacccatatctgccttcctcttggttttcacctcagccgtcaacaggtttgttggtctttgttgaaccagcaaaggagcggagtggggctgagggaaatctggtgaaaattaagatcaagagcagcctcgaggcaatttcctaggatggaagcctcctgctgctgcagatcaagtgtgaggagcacaaggcaacttggctcagcatttgctggaaggagccacttcctctcctccctgcggcctgccccatccctgcagtcactccaaatgaggcagcctgcttctttttggtgtgccttattgttccaaaacttcttggagtacacctgggaactcttcaccacctactgatgaaaagtcccagcttttatggtgaaaaatgatgtcccggattcttttctttaatctcattgaaggccctaacaagataacacattccaaagttccaacagaacaacaacaacaacaaaagccagaagcaaaggagtctacctctctgtatgacttctgagttgaaaggatctccttgactaattatggttttactgaaagatgtagatgatgattttaatagtgcctttgctcaacaaaaatgtagctgttactggcccatagggctgcttcttagaaagactggtgtggaaagactggcttagaaagactggctgtgtggaaatgccagccttggggcggaaacctccatgagatctttttaaatgtggaactagaacaaaacaaaataagacaaaacaaaactatgaggttacagcatcaccataaagatctaaggtatctacaaatatcatagcttggtttcagtgacattaccaaaccaaactggagtgggcttgcccagcgcagtaaggccaaacgttcataccaaagttttatagtgggagaaggaaggggattgattagcaagacaccaagcaaggagaattgggcagctcacgcctaagacctgacctccccaatggcttataagcaagggtttctaaaggcaggggtaaacttcaggaaagtggaagttacaagcaaaattgtaaatcgatatatggaggttatatactggtttggcctaaaaaggtgagatagcttgaagtggggggcttacaaagtcataggtagattcaaagattttttgatttgcaattggttaaagaagggaagctttgtcaaaagacttgggttcagcagaaaagaatgtggggtctggcctgtgggtgtgacttcctccaggcccttcaggaaaaagtttagaacaaagaatggaggctgggcatggtggatcacagctgcaatcctagcactttaggaggccaaggtgaaaggatcacttgacgccaggagctcaagatcagcctgggcaaaaaagcgagaccccagactccatctctacaaaaaaaaaaaaaaaaaaagcctgacatgttggcacgtagctgtagtcccagctcctcgaaaggctgagatgggaggatcacaggacaggaggtcgaggctgcagtaagctatgattacaccactacactccaacctgggcaacagagccagaccctggcaaaaaaaaagaaaaaaacccagaataaagaacagaggtcagaattcagtcctcagaattcagtcctcagttctcccttacctgaggtctgcatgccaggggatccatttggtgggggtctgggtttctgaaaaacaactcagggatatatgttaagatgttacctttagtctctggagggaaccaaacatctcgcaactctaacttccctggctattgttttaagctactattaccttcttgtttaccaagttgctccttacttctcagggctagctgggtgcctggaatttcccttgcaggaactcaagatttcgctttatttccatgcttgtaggggagtagggggaaggaggcccctaaaaggggtccctgcttcatctcaatgttggcttttttggtaagttttcagatcaggggatgtagaacgttcacaaataaaacaatccacactcgctttagggataaattatgaatggttcatacgttaaaactccaaagatgccaaagcacctaccctattttaaagcatagtagctatcgtgatacaagccagttttgcaatgtcaaattcattctgagtagaaggttggaaacgaagacttagaaaaaaggaacaggttgaaaccaaaacaatcctacccaaacgaaaacttcttttaaacagaatcaagtgatccaatgactctgtggccttaaatcaatgttaattaatttctcaaatcctaataaacaggtatcataatggcactgtatttgtatgtgtgtacaatttaccctgccttcatcttttttttttttttttttttttgagacagactctcgctctgttgcccaggctgaaatgcaatggtgcaatctcagctcactgcaacctctgcctcctgggttcaagcaattctcctgcctcagtctctgagtagctgggattataggtgtgtgccaccactcccacctaatttttgtatttttagtagagacgggtttcaccatgtcgaccaggctggtcttgaactcctggcctcaagtgatctgcccacttcggcctcccagattacaggcatgagcccctgtgcccagccccctgccttcatctttacattattgctcaagaatatcccaaattcctgaaaaagtcactgcctgtcaacatgcagttcccctctgaaagaacaccaaaatggcaattcagtagatcactcctgtgttgacacctattttctcactttaatgatttatttctctgatggctgctggctaagattcattattaagaaccattagtaagtcaaacattctaactggaggctttcatccccgcaaaagctaccaaagtgataaattttgcctctgtgcactcctttgtcttggagcctcttggtttttttttttttttttttttaaaaaaacatcttttagctatgttcagggattccaacaaagatatcagccatttgttaagtaacaggactaagaaatttgaaaacaaaaatatcagcacaaggaacaatctgtatatttgtttgtagtttataagcattggccaattccaaaataatgaagagatttgctaagtgctcacgttttttttcagataaaaaaatattgcatttaaagtaaacacaaattgtatcaaaaagaaaaagtttatctagcatttattagtgtttcctttcaaaatacttaataattctaagcagaggcaacttattctaaatttcaaacacatgtctataaattttcataagaatttttcttgtataaaacagatgtcttaataatttttaaaatctaactaaaataattttgtggaccctgctactgcacctaccacattatattccagttttgtcgtgtatgctgcataaacccctggctaaaggtgttattaaaaagttattaaagttttagattaactttttataaagttttaataacttttaaagttattaaaaagttattaaaggtgttattaaaaaggtgttattataaagttatcggtggactgtctatcctgttcatgtctctgaatccagcaaccggcttaaccaaagtggattcttaaccaaagtatgtgatcctctcaagacaaagaccttttacaaacaatatttcatctggcaagaggggagtagaggagagttcctttgtcaagtcttctctctgtgggtgaccccgttggctcagaatgaacaacttgggcacattacagtaaccacccaggccacaaaaatgcgttgaaaccactgaaaatgaaataatcagacctacttaaatgtttttaccatctgggcaaataacaccccaagggccaagacttacctaagaaagtgtctgaagtatgttacccaagcctgagaggcaacaggtaggtggattttgtgccaattagaaagtgttatgattggcaaaccactgcaaaactctgaaattgcagtgaaatggaaatgctggctgtcatccccaaagtacatttcaaggaatcacaaaacttcagaattagaagcaattatttaggatgaacgttttcacccacatgaaagttggaagatgaggtggtaacacgagagcttttgcaggcgtccctactcttaatcctgcgccccttccaccttggtacccttcattcttcaggacctgatggagtggtacaaagcagaggtcacttgacaagctcagcccagctcctggatggggcaaagctgacaaggaataggcacagggagcctggagatctcagggtccaggaaacagcctgccccattagaactgcacagcagagcacagcactgggatcagagagcaggctcatccccagtcttgtacaaaaaataacatttgatgattcccaaggggtaggtaaagcaagtagcatttggggttccagcagcctctagaactgtttcccaaatgtttggagcttgactttgcagtatacactttgccctggactgtttttctcttaatttttaggcccaagtgtattttaaggtaaatggatcccacatgcctctggtgcatttacactgaacccatcagaccacattttgaaagcgcaatttgaggtccaagaagcccttggaggctgcttttatgagcctgagtttcttttcttagaagcaggaagccacattttgacatgaacaaataaaacacaaaccttaaagactcggatctggttccaaatgtggcacctctgaaaccagtgggtcctcaaatcatcaagacagaaagcttcccagttttctttttgagaagttcatggagacttacccctgtgttctgttgagcccagaggcagtggttcggaggcgctcggtgcaaagctcacgtaaaccttcagcatttctgattccatccttcttcccagcccctgagtctccctacacagcagggacccaggctcactgctgccttctggcctttgcttttcggagccgagctgagtgagtcccaagggaatcaccctctgttttataagctttgaaaccagagcatcctgagccatttggtgctgatgtgattgctaacaccacttgaccctgactgaagaaccacaactaggcatggtttagatgtgcttagttagagaaaaaaataaccacagccaacagcaaagtgaggtgtgtggtgtgggtgtgagaaatgctcttggggtgaggagggaggacttgcagcttcttggatgctacagggcgtggaacatgctgtttccttccactgaaggcctaagatactactaagtggaacaggagaattccctggccccctcacaggatgtgcaacaggggtgtggctctctcttcagccaccccaagctaaaaccccttatgggaaggggagcacgcagacaggcaggtgcaggaaccagggtgagcacttttgggccccagccccatgacagcatcccggggtcggtgtctgtgacttccaaagcccgagtaggcactgaaacagtgcagtctttcagccttgccatccgtggacagcttaagcgttaaccagcttagtggaccctctccctttttgccagggcagagggccagtgtgacagtttcctgtatcccgagctcttgtccagcatcccggagggatcaggtcacacatggatttgcaggatgaatgcaggggttttattgagtggtggaggtggctctaagtaggatggatggggagctggacaggggatggagtgggaagatgatcttcccctggagtttggccatccagtggccagttttcagatcgtctccagtcgaattcctcccaatgttccttctcttctctccttctttgccgtgcttttctgccattcatgtctgctcatcttcttgtctccccgtctgcttctggagcctggagcctggggttcagggtttatatgggtacaggataggggacatggcaggccaaaaggcaactttttagggatgaaaacaggaatggctgtcctcatttagggccatgggtacccaggcttgagggtggggcctttgccagggaaccaccctcttctacccagtatttccctgtctcctgtccatatcacaaggatctgtggaatgcctactaagactaggggtccaggacacaactcctgataggcactgtgggggtccttaatgaatacctcaccaacaggtaggatgggagcaccctcagatggatctgtagactccacctcagctatcagggagtgcacttttttcctgaagccttgggttgattcctgggatggcacataaagacagccatcccaacctgttctcctgtgacttgcaatgttgactctcttggcccctgcacagggttctaagacttgaaggatgtccagaggccctgaccaggaaaagaataatgtatcctacaatgagcagaaaagacattgagggcaaggcagctagggctccagccccatctgtccacctctctttctagggtttataacaatacattctcaactctggctacatagtcaagttttcaaaaatcctgatggccgggccctacctaagcccaatgacatcagagtgtctgggggcatgtcccggggaatcaatctttcctccaaagttctactggttatccgtctatgcagccagggttgaaggccactggtttaaagtaacttgaatacattcctgttctgcaggagcaccggaaataatctacgtaagagaaggattgttggttgttttctaatcagatgaaacaggactcagggatgatgcctccccctaacttccccacgacccctatttctctgccccaccgcccccctcccatcaatttgccagagtcacagataatgccctagctctctggagagctttctaagccagcgcacaataaacaggtttaaacagaactagaaccccaaaggctgactcgtctatgatgtcaaaatgaaccaaacacaagctctcttcaaatatttaatcagtttggagacctctgcattccaatccaattgggtaaaaattctaaagaaagcaagattaaggggtcctcaaagaaaacactgggctaaaatggagaggagactgggtttgggaagacagaacatagcatgtgtctgaaggcctttcgaaggaattctacgacatattttttaaaaatactcaaaatgaacaagacagaattaaaccgttatacaaatttaaggacaactgaaacttcttttatggttgaaaataccaggcatggttttgaaacacattctctaaaaacccttcgatcctgctgtggtttgtttacatagccttctctgtgtacgcaaaaagcaaactagctactcccagggttccccgccagctcccgggtctttgcaaagcagtaacacagtgagagaaggagtggaagaggtgaagaagtgacagcaagctgttcacagtctttgaacatagactcagacccccgcaaacctaatctattttctttgaaaatagtggaaataaactgaaggccttgaaaattcaccaacaatcttctatcaggggagcaatgataatactttttgataactgtgtcataggaactgggggtggcaagtcctgcagggtgacaggtctgcaatagtacaggtgagagtcaggaagtcggggctgactcttcggggaaacgttcagcaggaaatgcctaacgtctgtgtcgctctcattctctctgttatttcctctcttctcctgtcccttggtgccaatgagaggcagcgtcggaggctccagcccgaggctcagaatgggtactgcgacacatatatccgcagtcggatcacggagctgcctctgaagttgatgacagtgttgacagtgatcatttccaagtccagctggatttcccggggccctttgatggggcgtgtcatcaccagggtggcactgatggggcccgtttgctatggacagaaccggggaacaccagtgagaaaaggcctgcatggtggccctgcagccccacctgggcgctcccttgcctccgtcagtcaaactggcaccccctcggtgcctcaactgtgccatgctctttccctggctttgcccactctccacctggttcttttctgcaaacccttcaggtctcatctgaaaggtcacttcctaagaggagccttctctggttccccaatctaagtcaggtccccctgcgacctctgacgctgcagcctttactttgtacaggatggaaagcatttatgaccatgtatgattgtccatactgtctacctgatccgtgtctgatatctaggctcccactaggctatgagttctgtaagaacaggtactggggtcaggcttttcaccactgagtccccctagaagccagcatggtgccttgaacacagaaggtgttcagaaaacatatattgaatgatgaacgaatcattgattgaaacttctgcatggcttagggctgtcacttcacccctctggggctcatctctcaaatgagggtttggcattgagtacatacacatggacacaaagaagggaaaaacaggcaccagggcctgcttcagggtgggaggcaggaggagggaggggattgaaaaactacctactgggtactatgcttattacctgggtgatgacatcatatatacaccaaactcctacgacacagtaatttatctatacaaccaacatgcacatgtactcttgaaagtggaataaaagttttaaaaaacgtttttgaggaaaaataaaatgagggtttggaccagatcagtaatttaaaaaaaaaaaaaaaaaggcatcaaaggctactggaactttttttgttaaactaacaattccaggggcccattccaagattttctatgtcagtatatttttaggtgatgcctgggaaaggtggaatttaagaacccccctctaggcaccctagagtcatctccagcttcaccattctgtaacctgatcactgtggtcctaataatttcgcgtgaactctctcctccactgagtctttttctaaaactttcaaggaggaaggcagagaggaatgacatcaactgagcacccatcatgtgtgaggcactcttctaaccatgtttatgtacatctgcttatttaatcctcataaaatggccaggcaccatggctcacaactgtaatcccagcatttgggaggccgaggtgggcggatcacttgaggccaggagttggagaccagcctggctgatatggtgaaaccccatctctactaaaactagaaaaattagcagggcatgttggcaggtgcctgtaatcccagctacttgggaggctgaggcacaagaattgcttgaacctggggggcagaggttgcagtgaatagagatcgcaccactatactccaccctggacaacggcgagactccagctaaaaaaaaaaaaaaaaattctcataaaaccctgaaaggccttgccactcaaagtgtggtccctggaccagcagcatgggcatcaccagggagcttcttataaatgcagaatctcagggctaggatctactgagccagaatctgtggcttaacacaatccccagggctttgtgtgcacattaagtattgagaaatattgatctaaaagcacaggacccaggtgggggggccctggctgtccttgtctaagtgctgtatgaaaggtatgactcattacttccccgttttataagtaagcaaactgaggtcccatgaggttaaataattgcttagggttacccagctagtcttgggcagaaccaagggcttccattcaggtatttctgaccccaagccccaggcttttttcactgcacagcaggtatcagaagaggctgatgtgtgtttcacttcttcctagcacccacctaatgagagatgctcgcggtcagtgcaagggacagatattggcactgttagaggaaacagtgtgaagaagaaaagggatgggctggacaatcacttcccatacactgcagagcccagccctgtgcccagaagctgcaagcaacagtctctgcaaaataaaggaacctagctggtttaaagctacactagatgttttatctgtctccataaaaggagggcgccccataaagttctgaacatccccaagagccaccacaagtaagacaagggtggggctggcagacaggtgcaggccaggcgctgggacctcccctatccatgaggctatcggcagcctgacagccacacaatttcctcttggcactggttcctcctgttcccgtcagcatccacgttattggcacctcctcacgcagatttcttggacttccttgtcagcccttacgaaacctgagccctgggccagggcttcagagggtaaagccacacaaggaaatgcctgcagcctttacatatacaaatatctcaccagctttcactgcgtgaacaaagaccaagagttgagaaccctgagctagggacagccctccagagggagatctgcagagcccaaggtctggaagggagaagggggcaagtgcaaacttccaagttgttcctttgggctctcctggtaaatgtctcctgagtacgaaagaatcctcaactatcccatttgaaatcctagactctcccatttggaagtaactgcagaagctggtgagtccggcctccacctgggtccaccctacccacaagcacctggaagagctcaagtacctgccacaagagctgaggacagccacctccacattcggcttttagggcagagccagggcattaatgaaataaacccctgagagcccgtgggcattagtaggcttggtggtgcgaaaagatgaggaggaggaggatggtggcgacagtgatgacggtggtggttatgatgccaggcatctggctacaacctttcctacacctcttaattaatcttcacaaccctatgctctaagtaggttagggatactacataaggccaccaaactactgcatggtactagactttatggctccaaaaatcatgcttctaaccactacactctctgataaggtctctgtacctctccatttactcaccatcccatgggtcttgacttgacttgagaatcgccactttgtgttgtgtttgctaggttgttttccccctctccgctaaggtgtgtgtgggttcctccagggcagagaccacatcctgtttgtttctcaacgctcagtgcctgacttgaagcctcatatgcagtggtgctgaatgcacgctggtaacggaagaatgcacacgaatgactgaacgccagtggacttgaccacgctgggagtcggctgccaacagcccaccagctgtgtgtcttcttggccctgatcccaaacacactcaggtttattctaatcaacttgtgggatggcatggtctgacctgtggcaagcagccacgctgtagcaggccagcttccatgggccctgtcacttgatccacgtgtgtcatggagtaagtgcactttggcacagtctgaaccccatgaccttgctccttcttctggccctaattatgacccccaagccacctggccaaagccaatcatcagtcctctttctagggctcagtgagagacaggcagccaataaggcttatgaatgggcttgtgtgtgtgtgtacacgtacgcatgtgggcataagtgtgtgcatgtgtgcatgcaagtgtgtgtgtgtggtttgcctgcggggtgagatgaagctcctcccatgtggttataatcaaatcaatgaatctcagggtgtgagagcctggatggccatccagccccacctcccacacgatgctccagtcccctgggtagcattcccaagctctccatggcccagcagctcccagcctccttgcagcagtagcagcaacagtagcagtggccacaacagtatctatacaatcataactgctatttctggaatactttctattgtaactggatgttagacttttcttgtgatctccatttcatctgagaccccaaagctggaagagtaggtaaagcatacctccccattctgaagaaaagtataacagcacagatttttggtgccaggctgcttaggttcaaatcctgccctggtgcttattagttgtgagactagtcgggcaggttgcttagctctgtgcctcagtgctctcatctgtaaaatctggacgataaaaccatcctatatcataggattcttgtgaagattaaagggttactgtatagaaagcacttagaatagtgtctggcacatacaggcactatacacggcttgctgctgatgctgtgtgtggagttattggggttatacaggacttacaaagctgtgatccaaagccagatgtttccctcattccatcaccccctccagcctacatacatacttttttgtttgtttgtttttgtttttagagacagggtctcgctctgccacccaggctggagtgcagtggtgcaatcatagctcactgcagccttgaactcctggattcaagttatcttctcatctcagcctccagagtggctgtggttacaggtcatgccaccacacctggctaattttttaatctttttttgtagagacagggtctcactatgttgcccaggctggacttgaactcccgggctccagggatcctcccacttcagcctccagagtagctgggattacaggcatgagcccctgtgcccaactctacatatattttattaaacacacttactagcctccatctcaatcaagaggggttttcaaaaaaagaaaaactgtttagagatgcaggcccctgaagttcaaggatgcagaaagtggtaccagactgtctccaggagaagtctggagatgtgagccctgagctgccccacaccatagagaggaacggggaatgcaaggagctgatgttgacatcctgaaaggcccttgtgtaaggtctgctgccaggatgcagtgataccctccacctcactaccaccacggcacatctgtatgagacatagccccagaattaggggctgagaggtttggagtagcaggtgaccaaccacaggccctactgcccatatcagggactggtcagtgtgaagtcctcaggcaaatctccaaaagacccacaaaagcaccctgtgagagcaacagctttgggggctctgctcctgagggaataccaatgcctggttacaatggctacaatcggggaggagcctcactcttccagccttaccctttctaccacctgctcctcccctgccagccctggaggagccagggccagcactaccattaccgggagggtgacaagaggacagggcagaggccaaccacaccccttgcctgctctgaactaggagacagggagaaacttcacagtgggtaagagacagagaggttgaagtttccatttaaactagtacagacttttgacgtgagagaatgagacaatccaatagaaatggaacatgcctgtgaatcctagggaattgacgtgagatgtaacccaggtgctcacaggtttgatccaacagcgtgagaaaaagaaaaagtcattgactgtttcacccccaccaccaaactccacttctttgataaaaactgtattccagatagggcactaagtggataatctcatctaatcctaaagtaaacactcatctagaggtccagaggtgttaggtcacatcacacaattgtgaaattgttaaactgtagaagacatggctccagagctcacattagaatgactgagtggtttcccggggagggtcccgcagcttcagacagcatggaccctcggaaagccagccttatcgggaagatttctgtcttcctgccttgtggcccatgacttcatagggcccagtctctaatgaaagcatataaacgcccatggaccttttcaatatggctccccacagtgaccctggaagatcacagcagcatctgttagaaatgcagattcctgggtgcagtatgctgggtagtagcccccaaaaagatgcaagtcctaaatccttggaacccgttccgttataaggaaaagggtttttgcagatgtgattaagaatctggacagagagattatctggattgtttgaatgggccctaaatctactcgcaggtgttaatataagaaggagacaaagggagatttgatacacacagaggaggaagaggaggcagcgtgaccacagaggcagatattggagtgatgcagccacagtcaagaagtgctggcggcccccggaagctggaagagatatggaacggattctcctctagagcctccagagggagcacagccctgctgacacctggatttcagctcagtgaaactgatttcagactcctggcttccagaactatgagagaataaatttcctttgccttaagtcaccaagtttttattgtttttcagagatggggtctcgctctgttgcccagattggagtacagtggtgtgatctcagctcactgcaacttcgacctcctgggctcaagcaatcctcccatctcacaccacctccccgccacactgccccaggtagctgagactacaggtgcctgccaccatgaccggctaacttttttttttgtagagacagagttttgccatgttgcccaagctggtcttgagctcctgagctcagacaatctgtccaccttggcctctcaaagtgctgggattacaggcatcagcccccgtgcctggcctgcataggaggtacttaagaaatacttgtcacatgggttggttgaaaagtggagacgtgaatgcctctccaacagaatattaggagaaaagagacctaagattgcatcttggcctaacttcccatttcacagatgaggatcctgaggctcaggaggagaagcatcttttgcaagactacacagaaagtggtggaaaccaggaccttgaaccacaccctccactcttctctctgcctacctgtcccccagccccactcttacctgcttgcatacagcacgttcctaggagagacagcacaaggccactgttacagatggcgtccccactccccactccctcttacccgcatgtaaaattctctgccctcattcccagatttgatctggaaaatgt

SEQ ID NO: 459 - DNA, 67200 bp, Homo sapiens
aggatctataccaaattatcaataaggcttatttttggggaagatgcagatatattttaccttactttgtacatatgacttgaatcttttacattgagatgatatatacattatttcatttgtttaatgagaagggaactcagaaaaaaattgctgtaggctttttataataaaagggtttaatagatggtatttctgaggagtgttgcataatgcatctgaattttatgaaagcatttcattaggttgattatattatctttttaaaaagatgcaggaacatggacagcattactcattcgtttaacaaatagtcagtgaatgcctactgtgtgttaatggaacagctatacccagaaaatcttgttaataaatctgcgtcagcttggagagatatcactgctagctccatccattgccctgtcctggttagcacttttgtctggaaagagaaaagtcagatttggcaagaaggtggcttattggcgcaaaaacacttgaatatattagattaaaacagtgtcaaatgttcagctccactcttccatttatctattgctgtgtaacagaccaccttaaaacttagaggcttaaaacaacattctttcattattattatggtcctgggctctactgggctaaactaggcagttgttgcttgtcaggtctcttatgtggttgcagacagcagctggagtcatctcaaaggcttcctcatgtgtctggttgtcagctaggacctcagttgggaaggtcaacaggaacgtcatatagatgttgacttctccatgtggcctcaacttcctcacagcgtggcagtagggttcccagagcaaatggcccataggaccaggtggaagccataagtcacataacctcactttcactgtagttagaggccttcccagattcaaagggagggactgtggatgccccctctcaatgggatgacggataatgcccctataagaagagcatgaaggagcggagattttgttatggacatcttagaaaataaaacctgctgggccgggcgcagtggctcatgcctgtaatcccagcagtttgggaggccgaggtgggtggatcatggatcctttgaggtcaggagttcaagaccagcctggccaacgtggtgaaacctggctctactaaaaatacaaaaattagccaggcatggtggcctgtgcctgtagccccagctactcaggaggctgaggcaggagaatcgcttgaacccgagaggcagaggttgcagtgagccgagattgtgccactgcactccagcctggggcacagagcgatacttcatctcaaaaaaaaggaaaagaaaagaaaagaaaacctgctgcattcactaattatcaaataaataaaaactaatcaatgatgcttccccttcttcaaagaaacagttgactcagttaacacagagtaaaaaattcaagctcttctgtattaggccagatgggctaagttatgctgtagtggtaaccatcccccaagtctcagtagcttaacgtaataagtctcagtggcagatagtggctgtctttctttccgggttgctaccagctggtgatagctcatgacacatgtcacactcaggttagtaggggaggctctgctccacatagtcactcaaggacccaggctgatagaggctctaccatcttctagctccaccatctggaacacagataccatatctgggaaagaaagatatgagaatcgcatatgggatttttatactttttatttctttttcttttttttgagacggagtttcactcttgttgcccaggctggagtgcaatggcacgatcttggctactgcaacctccgccttctgggttcaagtgattctccttcctcagcctcccaagtagctgggattataggcgcctgccaccatgcccagctaatttttgtgtttttagtagagatggggtttcaccatgttggccaggctggtctcaaactccagacctcaggtgatccacctgcctcagccttccaaagtgctgagattacagatgtgaggcaccacacccagcctttttatacttttaaaatttttatttttcttaaaaaaaaaaaaaaagtccaggtgtggttgctcatgcctgtaatcccagcactttaggaggccgaggtgggggatccattcagtcctgggcaacatagggagatcctgtccttacccgccccacaaaaaaaaaattcagctgaatgtggcgacacatgcctatggtcctagctacttgggaggctgaggtgggaggattgtttgcttggacctaggaggttgaggctgtagtgagtcctgatcatgccactgcactctagcctgggcaacagaccgaaagcctcttaaaaaaaaaaaaaccaacaaacatgtgatggggtttgctatgttgctcaggctggcctcaaactcctgggctcaagcgatcctcccacctcggccttccaaagtgttgggattacacgtgtgagtcactgtgcctggacttatatgggatttttattgcctaagcatggaaatggtacactgtgcttcagtcacctttcattggcctaaactagtcatatagttctccctaactgcaaggagattgggaaatgtagcagagtaaatggagttattggtgagtgtttgatggtatctgccacaccttgttacagcctacaaggttatgtcagatctgtccttccagcttactttttagaccttgtctccaggcattcacacatagctcaccttttagcttcttcaagtcattgctgagttgtcttctcaaggaagcctctcctgatcaccctatttaaaattgcaacccatccctcactcctctcctccacccttgaagtcccttaccctgtttttcctttttcctaggcacttattacttttttttttttgagacagagtcttgctctgtcacccaggtgggagtgtagtggcgtgatcttggctcacagcaacctccgcctcccaggttcaagtgatcctcctgcctcagcctctggagtggctggaattacaggagcgcactaccatgcccagataatttttgtatttttagtagagacggggtttcaccgtgttgacctggctggtctcaaactcctgaccttaagtgatctgtctaccttggcttcccaaagtgctgggattactggtgtgagacactgtgcccagccacaaggcacttatttcttctaacatactaaaatatctgtctttctctgctgcaacgtcagctccactaggtcattgatctatgtctgctttgttcaatgatgcccaagtacctagggcagtgtctggcacacagagggcacttaataaatatttgttgaaggattaaatttttaaaaaaatatttgctgctaccaagggtgtggttacactaacacttccacacacttttagtgggactctacattggcgcaatacattttttaaacaaaactttaaattttgtactaattttagatttatggaaaagttgcaaagatagtacagtgagttcctgtgtaccccatactgagtttaccctaaggttaacatcttacattactgtggtacatttctcaaactaagaaaccactatgaacatattactgttaaataaactctagaatttatttaatttcaccagttttctattaatgtccctttttcttctgtgccaggatccagttcaggttaccaaattgtatttgacagcacatattttttaaatgtccatgtttcttgcagagaaaggggccctcttacctacactagtagaaaggcaactgagaggtttcataagccccagcagagacagatttgtgttgatttgcagcaaagtcagtctgggcttctttctgaccctggactactggccccagcagtgtagaccattttctctcactttctgtcccttctttctttctgtgaattggtacagattttctgtagacattaggccacatgtaaaaagatcctttataaagtgccccaagcatcttctcatctagacatgtagtccaatacagcattattttgttttattttttatttttttaattttgagatggagtctcgctcggtccccagactggagtgcagtggcgtgatattggctcactgcaacctccacctcccaggttcaagcaattctcctgcctcagccttcctagtagctgggattacaggtgcacgtcactgggcacaggtaatttttgtagttttagtagaaacggggtttcaccatgttggccaggctggtctcaaactcctggcctcaagtgatctgcctgcctcggcctcccaaagttctggaattacaggcgtgagccaccacgcccaggcaatacagcattaatttatatactaaaacttaaacaatctagttattttatagtggatggattaagtagattatgttatatcccatttaatatgggagaatgtttataatgatacgtggaaaaagcaggttacaagagaagatacatagtgtggctctaattacaaatattattggaagaaaatatatcaaaatgttacaagtggtcaccacttgttatggtatcatgaattattttcaccttttttgtttttttatattttctaaatttcccacaaaaaatatgtattatagtcaggaaaaaacctataacttttaaaaaagtgtatactctttgaactaccttctgttctagtattctattctaaggagttaattagaaatgtaacaaaggacccagtgcagtggctcacgcctgtaatcccagcattttgggaggctgaggcgggaggatcacttaagtccaggagtttgagaccagcctaggaaacatggtgaataccctgtctttacaaaaaataaaacataagctgggcatagtggtacacgcctgtagtcccagctacttggtaggctgaggtgggaagatcccttgaggccaggaattggaggtggcagtgagccgtgatggtgttactccctccagcccaggcaacagagtgagaccctgtctaacaaaaagaaagaaaaagatgtaacaaatattttgtctacaaagatatccattacataattacttatactagtgaaaatggaaaacaattcaacattgtaggaatgttaaatacatatgggctatattataggcattaataatatttttgaagaaattttaaagacaaaggaaaatatttttcatggctaagtgaataaagcagaatctaaaattgcatatacaatatgatctcagctactctcaactcgtctctttattttttattgtaaattgacaaattataatgctatataagtctctctagtttgattcaacagagataatgcattcttatatcacattattaaagtatgccctctagaacagttctcaaactgtctgtagtgaaggatgcatttttaaaaatttccaatcttttatggactgatacttttgtgaagtgcaagaaatactagttactagaaaactgaaataaaaaagacctattaaatacaagcctcaatttttaaaattattacattcagatgaaaaattactggcagttcctgtaagcttctaaatgtttgctctcaattattgcatttatctagttgtggaccagtaacagcttgtggagcccacttttagaagcactgctctagcagaagcagcatgccactctgtcatgttgctcacatctgggcaacagagggagatcccatctctaaattaaaaaaaaaaaagagcaatataagcttatcgtaataatagtacaagaagagccttcttctcatctctactctccaaaggtgaccactgccaagcttcttgtgtatcagtccaaaatgacagctttctacattggcacacacagatccacctcatttttttttttaagagacagggtctcactgtgctgcccaggctggtcttttttttttaaatttaattaattaattaattatttttgagacagagtttcgctcttttcacccaggctggagtgcaatggcgtgatctcagctcaccgcaacctctgcctcctgggttcaagcgattctcctgcctcagcctcctgagtagctgggattacaggcatgtgccaccatgcccggctaattttgtatttttagcagagatggggtttctccatgttggtcagactggtcttgaactcccgacctcaggtgatccacccgcctcagcctcccaaagcgctgggattacaggcgtgagccaccacgcctggcttttttttttttttttttttgcctgttgtccaggctggagtgcagtggcgcaacctcagctcacagcaacctccgcctcacaggttcaagcgattctcctgcctcaacctcccgagtagctgggatcacaggcacgtgccatcacacctggctaattttttgtatttttagtagagacagggtttcaccatgttggccagcctagtcttgaactcctgacctcaggtgatctggccgcctcagcctcccaaagtgctgagattacaggcgtaagccaccacacctggccttcccaggctggtcttgaattcctgggttcaagtgatcctctgtccttggcctcccaactgctgggaatacaagcgtgatccaccatacccagcttccagctgataatttttattggctgcttaatgttccattgtgtgactaccctactgagtttattgccaatacgaacaatactgcaacaaatcctccagagctctttgcccacatatccaggtatatccacaggaaaaagtccttgctgggtatgtgcacttatactaagaaaaacaagctttattgaaatataattcacagaccatacaattcacctttttaaagtatataattgtgtgatattttattatactcagcattgtgcagctatcaccactaattacagaacatttttgtcacccctgaaagaaagcccatacccattagcagtcactctctgttctccccttttcccgggcctttgcaatcactgatctactttctgttcctatggatctgactattctggacatttcacataaataaaagtatacagtatgtggcattttgtgtctggcttctttcacttagcagcacattttcaagttcatccatgttgtagcatgtgtcactatttcattccttctgataggtgaataatattccattgtatggagatactacttttgtttatctactcatcagttgatggacatttggattgcttccattttttggctattatgaagagtgctgctatagatatccatgtgcagatatctgggtggacatatgctttcaattttgttggatatatacctaggagaggaattgttaggtcacatgataactctatgtttaacattttgaggagtggccaaattgtttatcaaagtggctccactattttaacccttccagcaatgtatgagagttatttctccacatcctcaccaacactgatcattgtgtctgctttattttagccatcctaatgggagtaaaatgggatctcatagtgattttgatttgcatttctctaatggctagtgatggccaggcccagtgaccctggcctgtaatcccagcactttgggaggccaatgagagcagatcacttgagcccaggagttcaagaccagcctgggcagcatggcgaatactttgtctctacaaaaaacacaaaaattagctgggaatggtggcgaatgcctgtagtcctagctatttgggaggctgaggcgggagatcacctaagcctggggagatcaaggcttcagtgagccatgatcacgccactgcactccagtgtgggtgacagggtgagacttcgtttcaaaagaagaaaggccatttgtatatgttcttttgggagaaatgtgaattcaaatcctttgcctatttcttaattaggttgtctttctattgtgatgagttctttatatagtctggatataaatcccttattacatatatgattagcaaatattttctcccactctgcgggttttttaatttttttttgttttatttttattttattttttgagatggagtcttgctctgtcacccaggctggattgcagtggtgtgatcttggctcactgcaacctccacctccgggttcaagtgattctcctgccttagcctcccaagtagctgggattacaggcacacaccaccacgcctagctaatttttgtatttttagtagagacggggtttctccatgttggtcaggctggtcttgaactcccgacctcaggtgatccacccacctaggcctccgaaagtgctgggattacaggcatgaggcaccacgcctggcttaaaatacatatattttttagagatgggagtctcactatgttgcccaggatggtcttgaactccctggactcaagcaatcctcccatcttggccacacaaagtgctgggattacaggtgtgagccaccatgtctggccttttttaaagagttttatagttttatctcctacagttaggtctgtggttcattttgagtttatttttgtatctggtgtggggtaggggtacgacttcctccttttacatgtggatttccagttgtcctgacaccatttgttgaaaagactactttctgttgaattatcctggtaccctgcacttaatttttttcatgccaccttgtctaagaagcacttatattttttatatttccaaattgtcctccaaagaggttacactggcatatagtcccattcataggagctaagaaactgtatctcagattgggcattgaaggttagcaaggacactaatgagctcaagcttatcagggacccacagcagagtggagtgttgggggagcttgagagtgtcacaaaaggggaggttgaaggaagtaaaaatgtttctcagagaagagaaaaaatgctggggaatgtatatctggtgggcctgagtttaaagccctgttctgctcctttccagctgaatagccttgggtagttatcagatccaactcggaacctcagtttcatcatgttaaaccaagatgaagaccacaacaacctttgtagggttgttgtgaggagtaaatgtatgtaaatatcccagcccacgacagactctcagtaacggtagctattgtgacatttctatatgtggtatatgtggctgagatcatgtgattgtgggggagcattgcagccatttggtgagtatgagatttttaatgatggctgatcacatgtagaaacttggatctactggtaaatgtcactgtcacccagagcaaggcagtacttgaagtctttgctgtgacatgttaaggggggggagaggctgtgactgagattggatgtgacagcaagacagatcctgagtgacagaatggaacggagtggagggaggcagactgcaccaggcaaaggtgtgtccccaacaggagctgcctgggagttcagatgtcagggcaggtgtctgtctctactgtcccctccccaacagacttccctccctactttctgaaagcaaggaggaaaggagggagctttcccttcagaaaggagattttgatcagagtgtagaatctacaatacctaaggagttatggcttaagcacctttgatatcaccacccaaggctcaggaaaagaacctgcaggaactgtgtgtaaaacgggtggggtagaaattagagtggcttctcttctcagctttagtcttcagagtggccgataaaaacagaatagaaacctaagcattccttcctcctctctgtcccccgggggaaggaagagagaataaatgccacatctcattaagcttttacgatctcaggcaggcagagtaggaccacaccggaggcaggcagagggctgggggaggctgcaggaaggattccccagttctctcagggagctgtgttccagaacttaaaggccggctctacagaaaatgaaataagggttaacaacagatgtgggagtaacagctgcttttattaacatcagaagggcaacagtacaggaagttgggtagatgtggggacaacagagagactgtggcagaggcaggactgcagatctatggaaattgcctggaagagtcagctgtaagggatgagaatcctgagggtaaaagagaaaagggaaagactcctctttgatcttatgaagctgaaataacaagatcttaaacatgagtgagaatctgttgccccaacctaaggtgactttaaatccaaggtaaaaaacacggcatgggtattagtttgaatagggaaaatgagaactctctttgagctcaaaaaaaaaaaaaaaaaaaaaaaaatgaaagcgttaaaaccctgattaagtctgcacaatgatccagagtgtaaggatgggagaaagaataaataccctagtgacccacatattaaacagaccacagacaagagaacaagacttgaagctaatggaaggtcatcttgcccatgccgccatggggggcaacagtgccacaatgccacatgggcactaacacacactgcatccccccagtccctgcccaggttggagggtgtgcagatcacagcagcagagctgcctagactcaggaagggcaggaacacccactgctgatgcagtgggaggtagggatggggagcctggccctggctttgtgggagtgcagagagaaggaaggcagaggggaaatcaagccgctggggcagtgcttgtaatattggggtgactgtgggagggcagtagcagacacaagagtaatggctttcccaggtcaaggtccatgtcctaccatctggcaggaaagccaggggtttgtcatgcatgataaaagccacacagctggactctgggcaaggcccactttagccaattagaagatacactgtctgtggccaggcaggcaagctcctcccagctggggaaggggtgagaatccctgggccttgcccagtcctgagctctaggtgtctgcagggaagcacagtggtgagttagtgttaaagaaagcatccagagaggtaagaggggcttgggtagcaccctttgcctctgtcacttccgcaaaaacttcttgttgaggaggaagatgagaaggttgacattgactttggccttgttgaagagtttcatgacagccacaccctcatactggagctgcaggagatcctaggagggaagaggcagggaggggagtttaagggcttctgaatgtggtccagtcagatggtgtacaaaacactcacatcatggggccttctgcagtcaccagtggcactggccactgaagtagggcattgaaatcccacttcacaaatgaggaaactgaggcaagagaggtacagtgacttgatcaaatgtcaactcaagcagaaccagggcttgaaattgtttttcttattttatttatttatttttttgagacggagtctcactcggtctcccaggctacagtgcagtggcgcgatctcggatcgctgcaatctccgcctcccaggttcaagcgattttcctgcttcagcctcctgagtagctgggattacaggcaggtgccaccacgccaggctaatttttgtatttttagtagagacagggtttcactatattggccaggctggtcttgaactgctgacctcgtgatccgcccgcctcggcctcccaaagtgctgggattacaggcgtgagccactgcacccggccaaaatcatttttcttactcaaaaggtaaaacatcagagcaaaaagatttggattaaaaactactgctcggctgggcatggtgactcatgcctgtaaatcccagcattttgggaggctgaggcgggcggatcacaaggtcagcagttcaagaccagcctgaccaacatggtgaaaccccatctctactaaaaatacacaaaaagccggtgtggtggcgcacgcctgtaatcccagctactcaggaagctgaggcaggagaatcgcttgaacccaggaggcagaggttgcagtgagctgagattgcgccattgcactccagcctgggtgacggagtaaggctccgtctcaagaaaacaaacaaacaaaaacccaaaaaagcaacaacaacaaccacaaccaaaaacaccgttgcttcactcctttcctgaacactggcctatgacttagccagcttcttaaccttttagcctagagcctgtaaaatagggataatacttcagagctgtggagaggattaaaggaggtaacatgtaaagtccctgacatgtgatagggcttcaaatattaatcctgcttctgacaccagtagcccactccactctccctgatgcttgccagtggggtctgtgtcagggcatggggaaaggggggcttgggctgcacagacccccacccttctcttcaggaacagacgatactgattgggtgaaaaactgagctggtgtcatctgaggactaggaaagtgaggccagctgctctcttcaggccagcacctaaagcccagcagatgtcctgcaggctcatgggactgtcccctcacctgatagtgaagctgaaatcgctccatgtccacacccaggaacttggcatttacttcaaactttcctgcctcatctcccggcgtgatgtcaaagatgacgtttctgaagctgtcaggaacaggattcaaaacaggaacccactgcctctttccagggctacagccacattcttgcacccactgctcctcatcctgggcagcggtgtcatccagaaccagttttccctctgtcactcccagagggcccagctcgctgtcttctccattttacttctgctccccacaccatctctttatctgccccgccctacgcagctgttctcacctctggaaagctttcccagtaccctctgcctcagggcatctagaactgtgctagaccatgtccacagcccttcactttctgtctgggcatgctctgtctccaccatcattctagcagctccttcaagatcgggaccatgcttcttctcttccacccggtgcccagcccagagctccacccccaggttagaggacaggaaggggctgacatcctgccctccaaagacacatactgagaggcgggaagatcttcaatttccaccaagacacccttttccaggagctgagcagcagtgtaatgaagagaaggctgcttcttccccttcccagaactcctgattaaaagaaggccccagagaattcatccaataaacactttaccaccaaagaaacttgttttctgtggctggaaaggaaatgagaccccgaggaagacttctcactgatggaagacagaggaggggggctgcacttgagcccaagactttgtaaatgaggctcaaagaccagacttaggaagggactgtgctgtgctgggtgagattcccctttcaaagctgggagatagcagggcaaaggtgacatgggcaggggtgagaagtcactcgtaaccttccaagtacgggaaagcagcacctacttggagtcgggggccaggtggtccaggcaggcccggatgtactggctgtagtagtcaccctgctcctcatagaaggtggtcttagtgctcaggccctgtaatgtggcctgcagcttcaccagctctgccttccgcctgtgcctgtgtctgtgctggttgcggatgtcctggggttggggaacagatggagggatgagtggtccttcctggcaggagagccttagggcctgacacaggcccaagagctacacactgtgaggctcttcggaagaacaggcttcaaggctgttttcctagaaggaaaatctcaaggatggtattccaaatcctcaaggcatgtcctcagggcctctgcccgttgaggactaactggtttcaaggctgtttgttttttagtaaaagaaagttgcaaggatacttttgtaggtcataagctgaggattgggttttcatgctcttgtgtgagatatgcttctctcaaaccttctgacctgggcacattacccagctaatgtggggaagaaaaaaaaaaagagagttgcaagaacaccttcctctctaactaatttcaagatctttccttcaggctaggagtggtgattcacacctgtaatcccagcactttgtgagagcctaaggtgggcagattacttgaggtcaggagtttgagaccagcctggccaacatggtgaaaccctgtctctactaaaaatacaaaaatttggctgggtgcagtggctcacacctgtaatcccagcattttgggaggccaagatgggcggaccctgaggtcaggagttcgaaaccagccaggccaacatggcctgaaaccgtgtctctactaaaaatacaaaaattagccgggcatggcagcgcgcacctgtaatcccagctacttgggaggctgaggcaggagaatcacttgaacccaggaggtgaaggttgcagtgagccaggatcacaccactgctctccagcctggatgagagtgagactgtctcaaaaaaaaaaaaaaaaaagaaaaaaaaatctttccttcaaaaaggaccctcagccttcctctggctggtgacaattttgggtgaggactcatcaggaggggcccaccaacactatggattaacatgtatatgcacgcacacacacacacgtacacacaggcacacggagcccaggcccaggttgttaccttggccagctcgtccactagcccctggtagccatttctggcgctgaccaaccccagggcttcaagtcggcgtaggttccgcaggacgcgccgctgcttctctgccagtggcaggagggagtgagctgtcagtgagcggtgtcgtcgcagtggctccggtgtctgggctgtacaggcctggcgtcggctcatcagctgcttgtgggctgcttcctggggacacacagacgctggaggggtctaccaggtcctaccattctgctcccacaccagtgaaggtcccatgggcaccagcaacaaagggaggcctgagcatttttctgcatatcattaagaaagtgccccagagcccagcctctgcaggatatggctggggcagggcatcgcttatgaagaatatcaaggtataacaccataatgcatggtgtcacacatgggagggcctcatagatcaccacaggggaagagtggcccaaaggagaaccaaacccaggccatggcataaaggattccggacagacactagctgtgacttcccaacaatggatctttctgacggcacaggatgtttgggggcatttacctgtctgttctgttttgggacatacctctactggccatccccaccttttctttgggaagaccctggttcagtcttcactccagcgggcccaacctgcccctggccccccacctgcctactaccttctcctgcctccaggcattctagcagaccactcttctgagtgcaggccttccaggggagcattcccagacggtctctcagtgccccccatagccctagtgttggtgcttgtttcagtgtgtgaagtggggagaggggtggggccccatgactctgtagcccgaggcttcccaaggctaaagctgtatccctcatcctgtaggcctccagagttctcattactggtgagcacaggtgtctgcttctggctgatgtgggtgaggttcagaggagggaaacagcagcggtgcaggtgggatgaggtgggggatgaatgagacagaacctgtgggccagcccggctactcacttgctctctggaagccgagagggacaggatctccttgagggtgtccccaggatggaactgtatgatatcggccaacagctgcttggtgctgcacaaggaggacagtgacagaggagaggtaaggggcaggggaagggcctggacatgggactggccagaggtctgagagtaagtggaccgtgctctatagcatggctgctaggatataaggagagagagcgagggataggggatgtcgttgcctggaataccttcccaacaaactatctgcctttgagtccttcagctgagcacacatgtccttcccacccagccatcccttctccttagctctcaatgcatctgacacccaccaccctcttggtggtgctctgtgttcagccctagcccgatcctgctctcagccctttgatggcaggacaaagatgatactcagctcacttgttttttttttttttttttgagatagagtttcactcctgtcacccaggctggagtgcaatggcatgatctcggctcactgcaacctctgcctcccaggttcaagtgattctcctgcctcagcctctcaagtagctgggattacaggtgcctgccaccacacccagctaatttgtgtattttcagtagagatggggtttcaccatgttggccaggctggtctcgaactcctgacctcaggtgatccacctgcctcggcctcccaaagtgctgagattacagacatgagccaccgcacctggccagctcacttgtttattgagtgaatgagtgggtgcaaggggttgccttgttggcaggagcttgagctggcactttggctcctcttctgcccagatgaccagctcacccctactgggagtcctccctcacttttgtagaactggggaagaagagctccatgcccatctcctgaccatcacactcaacaagaatgcggaattaggctgggcgcagtggctcacgcctgtaatcccagcactttgggaggccaaggcaggcagatcacttgaggtcaggagttcaaaatcaggctggccaacatggtgaaaccccatctctactaaaaatacaaaaattggccggacatgatggcgagcacctgtagtcccagctactcaggaggctgaggcaggagaatcgcttgaacccagaaggcggaggttgcagtgaactgagttcgtgtcactgcactccagcctggatgacagaatgagactccatctcaaaaaaaaaaaaaaaaaaaaagtggaattagaacatgagctctacaacccactggctgtggaactttggataaatcacataactactgagtctttcctcaactatgaagaggggaagccaccatctacctcatagcttgtttctaagaataaacgataacttattaaaaaagcatttgggccaggcgcagtgggtcaatcctgtaatcctagcactttgggaggctgagccaggtggatggctttgaggccaggagtttgaggccagcttgggcaacatggcgagactctgtctctacttgaaaaaaaagaaaaaagcatttggtaaacagcacgatatgcaaacacctgctgttgccaatatcttcaccattcctttactttcagtacaacacagagcaaaaagctgaggataccagatggaaaagagccaaggctgcagcgaggggaataaaggtaggcttcagggagaacttcctgaaggataagggagcccaggaagaaggtggaatgggcgcctcagaataaggccattttactggcctcagggctggggagctcaggtatgcaggggcagaggctggcatcacccacctcagaagcaggctacgggtgttggagtcatcagcatctgcctctagtccttcaaacttgttggtcagcgtcagggacacttctagcttgctcaggtccgtgtgcccatctgcagcgatgctctcacctgaggtgtggtgaggaatgagagggagacaggcatacacacacacatgcgcacacacacatacacacacacacatgcaccgatggggtcacattaaatcagctgctccacatgcccctcttccaggaagttttcccacactggcctgcagaactaccctgtgtccccaacccttagcaccgatggaagggctgttacccacagagcatacccttgtgttactggggctgtgccacccccacaccctcagccctgggtgccctgagggtagaggagctgtgcctccctgagcctgcagctcctggttctctccaatcaccatcttcattctgtccttcctcccagtaagttggcttcctcctattccatggcccggaaacccctccttctcagagaaacctaatgaggccctgatccctgtgcctctttcagatcatttcattgaccgttttccatgatgatcgtgggtccctctactgtctgtctaccttctccacatcaatctgtgtccctgtgcccatgtcaggaccagagggagagtatggaactagccgcctggcacaagacctaggctgcatgggcacgctcacatgccctgcctgcctgcctgtccctccctccatgcaggtcccctagctggcctcagctgctaaggagggcacgtaccaataaggtcagggatggtgggcagctccccaagatcctccaggagctcatgcagggggtcttggtgatcaggggcaatgcagtcctggtgctccagcaacagctgcaggacggagaaagaaaaggagatgcagggtctgagccaggtcttccctctggggccagcccactaccccatcacaggctaccaaacccttgcccacccagccaacaccctccagatctcagcccctcaccctgtgcgtgttgaccagctcccccacggtgatgtacaccatgggtttggccacagccaccatgtctgagtactcgtccactgcaaaacgctcctctggctctggcacctggcaggctctatggatgaacttcctgtccagagggcgggcatgtgagagagcggggagggccagcaccccacacatcttctgtccccatcatttccccagccttctccagtgattgctcaggccaatttggactctccagtctcagcttctgccctctgtcctgccctacctctgtcccagtgacccctcaagacaatctctcttaatagtctccttttctctccactggggagtccttccaacaacctatcctccaccccgctcattatgctcatcccttctatttatgcctcttgtcctcatggattctggaggggacaagtgggatgtcaaaggtgagaagagggaagaaaggggacagagaggaaagggacccaagacctgaacttgaggtgtgtttcctccagatagtcattcaggacccgtaggtgctggctctgcccagagaaggccttgccagccgcagcgtgctgtaggagctgagccacagcccccagggcatggcgctggggggcagccagggctccaccagctgccatggccacaatgtcgaaggcgtcaggagccaccacagctgggttcaggaagcggtagtacaggaggttcccgaccacctgagggcaaaggagactctcccagaagtgtccaggggccgccttgactggtgcggccccacattctcagcttgcttggctggaagggacacctgggccaaccccctcacttcaaagaaaacaggcccagagcaggcagacaacttgcttaaggccacacagcaaacctgagcaagagctgggacttgaacccagatctcctgacaagaagccagtgttgcccactctgttcgctcacaccccagcatgagccatctgccacctgaagccctgcgggtgagccaggctccatttatagggggcagcatatttccctccttggatttttatggcataggattttttgtgtttttgtctcagtctggggattgcaggtaccagcaaagcaaaggagggattgggaggtgggggtggggagacaacacttgccttatagacctcgctgtctgtggcgtcagggaatttctctgccagagttgccttcaggactttggccacatatcgcatcccatacctggggacaaagaaacaggtgcgcgtggctgtgcctctgcccatctctctctgccagagataagagcttgagtgcctggctgtctcttctcccccaggctcagccactccagagtagagctcaagcactgtccctccactagccatagccagctccctgctgccttcctccaaacgtctctgggccttgtcccttcctcctgccttatgtcagtagtcaggaccagggccctatcatctactaaatctctcacacagcctccaacctggctcgagaacctcttctttgagactctctgggtcccctgcagagcaccccagctcaccatagccatcccccatcccccagaggcaccattaacctaaagcttgggtatctgacactcacagccaaaaccctgtcctaggacagcctaggtggctccgaggtagtcaaccttgtcagctgtcacagagcatctgtgagtggcctagtctgggctagaggtagggccccaaggagatcagtgagccgggaggagaagctccagtttggactccaccaccaaccagagatattatcttagactatttccttctcctttgtaagtctgtcccctggtctagaaaatgggaatgatcattcttgccttctcttctcacagggctttttgaggatcaagtgaaattatgtctgcgagagtaacgtataatggtagagtactattcaaatgtgctagactgtattatcattattattcctattatggatgtgccacctacaaatgtaattaaattcatttaaaagcaatttccactcctagggtaccagagacagaagtttacagctcattgtgtactttactttcttaagcctagaacaatcttttcttactcctaattgtaaactcttaatccggttctccaggtttggggagcagggttataaactctgtgggttccccctttcaacatcctcatcttgccctgggcattccagcctgggcaatggagtgagaccctgtcttaaaaataataataataaaaaataaagaaaaacaaacaaaaaaagaatgaaagcctgtcattttcgacaacatagatgaacgtagaggttcgtgttaagtgacatacataagccaaacacagaaggacaaatactgcataatctcactcatatgtggaatcttaaaaaggtgatttcacaggagtagagagtagaatggtggttaccggagtctggggagggtaggagaaggggagagaggatggggagaggttggtcaatgggtacaaagttacatccaggtagaaagaataagttctggtgctctattgcacagaaggtgactatagttgataataatgtgttgtatatctcaaaatagctagaaggattttgaatgttctcaccaaaaagaaataaatgtttgaggtaatagatatgctaattaccctgatttgatcattcattgcacaatgtatacacgtatcaaaacatcacactataccctatgaatatgtacaattatcatgtgtcaaaaataaatgtagaaaaccaaacgtattgactaaattttaagaaaagagagaactataaagtactttatgggcttaaaatatttatttttgatattgggaactgaagagtcccattttctcctcatttgctcttagctaataaagtgtccctgagatcattttagggtccctcctctggttccactgacatcctaccaggccacacacagacttgcacgccgtctctcagctcagctctctagcaggagcttcgagcattccccacatctcttcaggaacccctctgagtacccctggctccatctccctccctgccttcctccctgcaggactatcaccctgctctgctccccatggtggcctggccctcttgaaatcccatgcgtaggctggggtggggctgttgcacatacggaatttggtccacagatgaggtgatggctaaaaggaacttatcagtcatggcgaggaggttgcgtagggcgatgtccagtcgtctctggacctcggggtggctcaaggcctgctccggggtgacatcatatgggagatggctatgagcagagagagacaaggtgtaagcaggagccccctccaatggcctccttccccaaggccctattccttaaacgcttgtctaacaacaagatctcatacagatgtgctaaggacagctcagcatgctaaaggagaaagggccagaatgagagaaaggactggagaaatgcagtcgggaggtaaagaagagttggagtatctacagggaagctggaagaatgtaggaaggaacagagaacgtggaatctagggacccttctaaggggaacagatgacaagcaggcggctgcgctgcaaatagtctttgggagtttggaataatggagaggctgggccagagccttatagttccctcacctaaagcctcctgtgccatccagagcagccaccaggattgcctgctcgcctctgtggctaggtttccctagcacctagggacctgagtaatgaccccaggctataagggcaacctatctctcccactatctcatttgcctattcatctgtaaatagaaatattcttctatacccctatcaataggagtccatatcctaactcccagcaaatttttttttttttttttgcggggggacagagtctcactctgttgcctagagctggagtgcagtggtgcaatctcggctcaccgcaacctcccaggttcaagtgattctcttgcctcagcctcccgagtagctgggactgcaggagtgcgccacaacacccggcgaatttttgtattttttatttttgagacagagtctcgctctgtcgcccagcctggagtgcagtggcacgatctcggctcactgcaagctctgcctcccagattcatgacattctcctgcttcagcctcccgagtagctaggactacaggtgcctgccaccacgcccggctaattttttgtatttttagtagagatggggtttcaccatgttagccaggatagtctcgatctcctgacctcgtgatccgcctgcctcggtctcccaaagtgctgggattacaggcgtgagccaccacgcctgacctacatttttagtagagatagagtttcaccatgttggccaggctggtctcaaactcctgacctcaggtgatctgcccaccttgagccccccaaagtgctgggattacaggcgtgagccactatgtccggccctactaccaccaaatttgacacatcatttgcaagcactgacatagcaattaagcacatttgcatattcatctgtactcattttatgttaagcccaccaggtctgaagtcatttacatcagtttcatgttaattatcagagggggtctaaaagactaccttattcatgcctacaaagctggtgtcatatttgcatagatcagcatgcccatttatatgccaccttcaaagtacacccaagcttccccagtagggtccaagacacagctgatcaagacacagctgatcaaagagagctcctccctctgcccatgtgctcacctgcgctgccctgtctgggcctcagtctggttgatccagttcttatagaggtggacagggtctgtgtggacgctgagcactttgtcttctagcacatcctggataaccttgcccagaatctcctgcagggcactctgtccccgcccattacggtagaatctcaccaccagcctcaccactgttgggttgcctgtcaccacgtcctggggctgctccacctttgacctgtggtttaagaggtcattgaaaccagtcttctgcctctgtgtaggacataccgttgcttttcctttttgagattttggctctcaaagcctgccctggtgtccccgctcttaaggaatgtcttgatatctctctcatcctttgtgttagcatgtcagcccatatcctcccactgtgctgtcccagatgttttacggtttctccacaggaggtagagaaaagaggtcttctgattccatttctacccttaggcctcaacaagttgtcaccttgtgaaggagccaacagggggatctcttaacccattctctccccattcctttgtgtctggagagcctacttgatttcctcctggagtgctgtcttgaacagctggagcaggagataggcctctcggcggctggaggcatagttgtacaggctgaaaatcactgcctccatgaacttggtggttttgttctgtggcatctgaaagatcagcttggccaggtagatgggctgagtctgcaagcaagaggggagacaggaatggctgaccatgcacttcaaggaccagtgataggataaggaaaggctttcccctgatggaaatctggaatggagaaagcactaccacactttctccaggtgctagtaacattccagacaaacaggggaagaggtagtctcctttcctggggataaggaattaagattatgggaaaggacaccttgcatggtgccaaacgcacagacaagaaggccttgaagtctcagaccctcaggagacgggagagacttctccttggaaagtcctctgctaacctggagcaggtagaagaggtgttggtatgcttctagtttctgccgtttctctttgctcagcgactttaaacccttctgcttgtccagaaccatcatatctgacagctgttccttattcctcttggtcagcttcttgcagtgggagaccacttcctgcaggggtggaggagcgggtgatacaactagcctaggccatcccagggcacagaacatacggtctagaatcagtgccttgaagagccagggctttctgctgttcaaggaacaggcataagctgggggacagaagcagttctagggtgaggaagggcccctccaagtgccctgagactccatctgtttcctctcctgtcatgggagtgagtccccaaagagaactggtttgccaggctgaggaattgtgtctatttggcttttgctatctcttcttattagactgctacacacatttgaggtggagctatcactatatcactattaccctgtcactgcatatttatatggtaatttatgatttaaacagctttcatatctgtctctatatttggcctggagaggtggacattctcattattctcagtttgctaatgagaaaacagacttagaagtgaaatgagcacccacagccccatccctgggaatcagcagagccaggcattctgattctaggtttcatgctctttctactctgtcatgggtcccccaaaatgatttattagaatggcagagggccactggaacaaggacctgagtcaggtgacaaaatccacaacattttgaaaaaaattgattagcaagcagagaatggtcagcatcacatctccagaggcaggcagatctcggggaggggaggactggtgggccccatacctgcagagtgatccggttcttcaccagcaggccaatcttgatgtccatgatgttgaggtcctgctccagctgctgattggatcggatcttcctaactacctcttcctggagcttcagcagctctgcctcagccaagaagtcttgctggctttgattcaagagatgggcaaatctgcgtaccacactgagaggagggtggggtgcatgcactgggaggaagggaggaggcatcaggattagccatgcctcatcagaggcctcctcaccagcccctgcccgagtcagcccaccccagtccccgttctgcttgggatcagcaggtccccaaccccagtcctcttctaactggttctgcttgcacttggagggcagtgggtagccttctagccaggcctgtccctgagcttcctgtcttataactggagatgacataatagctgctcttcccatgcctctgattcaccccagcctgggtctatcccagggacctctgacaccaaagccagagccacagctccctctgattatcctcccagacctccctagtctaccccaatctaccactcacttctgctgggccaacctgctcctcctcctcctcctacctgccagccaccactcagccctgcttgctcccacagtgctcctctgtcaggaatgtctgtacacaccgggaaggacaggtagacgggatggacagtgggctttataatttaggggaggtcagagctagctggtgattctccttgaatcacctttggaattggcatttgagcaaaaaagaaagaagcctctgagctaatttattggaaataacaacaaaacaactaatacatagaatgtttactatgagacagaacctgttctaagtactttacgtacttaagaccacctgtgaggtcagtacactataactatcctctcttaccgataataactctgagactcagagaaggtaagcaacttgccctatgttacacagttagtaataaatgaaggagtcagatttggaagatgaataaaactagtccctgtccctaaaggcagtctagtaggggaactagacaaataaaccacaattcactgcagtgtagttagcactttgagaggagcaagcatggggatctttgggaaaacaaaagtgggttgcccaaccccacctggggagtgaagagacactgcaaggaggaggtgagacaccccagatgtcggtgaaaaggaggcagagagggtgaatgtggggagtgctggaagtccactgtatctggaacacagtgcagaaggtgtaggtggtgaggggcaggtcagtgaagttagaggtgtagggaaaggctggatcacaaaaagccccaaagctgtgattaggaggttggactttatcctcaaggcaacagggcatcatgataagtcttaaggaggtgagtgacatgatcacatgtacaggtttaatggattaatctggctacagtaggggaacaaatctttttttatttttatttttagacagagtctcgctctgttgtccaggttggaattcagtggcatgatctcagcgacttgcaacctctgcttcctgggctcaagagattgtcctgcctcagcctcccaagtagctgggattacaggtacctgtcaccatgtctggctaatttttgtatctttagtagagacagggtttcaccatgttggccacgctggtcttaaactcctgacctcaggtgattctcctgcctcagcctcccaaagtgctgggattacaggtgtgagccaccaggcccggcctggggacaaatctttgaggagtgaagaagggtagaggccaagacaattcatggcatcttggattcgatgaaatacagcatattaactcctcaaaacaaccctacaagataggtattagcattatgtccagtttataaaggagaaaagtgggcaagaaggaagttaattggctgggtgtggtggttcatgactgtaatcccagaactttgggcagccaaggtgagtggatcacttgagcccaggagtttgagaccagtctgggcaaaatggggagacccccatctctacaaaaaatcaaaaagttagccagttgtggtggtgtacgcctccagtcccagctactcaggaggctgagatgggaggatcgcttgagcctggaaggttgaggctgcagtgagccgtgatcatgccactgcactccagccagggtgacagagcgagactctgtcctaaataaacaaataaataaataatcaattaaaaaaaaaaaggaagttaagtaacttgccaagggccacacagctagtaaatggtagagctctgagtaaagtctgggggccagtgaagtcaggagacagcactagggaaaagcaagttcttccagaaaaaccataaactgaagagaagaaaaagaagataaagaatggccaggacaatggtgttagtgtaaccacagagacaaaatagaatgggctaggctggggatagggaaggagagaaagaagcttgttgacaggaagcagatggcctgagtgtgcatggccagagaagggacaggcaaagcccctgtgggcaggacaggggcgaagaaggactgaggaggtgaaggagaggattcctgaacaggacatctcaccagaagcccaagagtgcagcctcaaggccaggaaggaaaggggcctactgcttcaggaacccaggggctagaggtgaatgtagaaatggactacttgtcaatttcacaaaaaggaaggggatgccatttgctgggcttctgaacttgaagaacaagagccagaaaggatctctttaaagctttaaatgagcacccaactaatggggaatatggagcaggaagatggcactcccttgggtgcttctcacattctccacaccacggaatagatgtactctgtgtgcctcaccaggccttgtttgtgctgggccacagaggactggagaggagaaggttgaaccctaagaaaagaagcaagatccttttctttctgctttggtggtagcaataggcagataatctaagcctgttccaaaaagagcctggttagaagaactttcacgtgacaaggctatctgtgattgggatgagcaggggggcttttgttacaactcctgttccatgctcctgcacagacaacttgtgactaccttccccttacctgctgtgcagtcgcagaaggatgtctagacctgcctggctctgtggggtcctctccctcccaacagctggggagggtggatcaggcagctcacctaatatcctgtagtcatcttgggctttcctggctcggaaaaatgcctggatcttcacaatggagttaacctgccacaaacacagattggaaaagggttgctggctgtccttgctctagtctcatgggcaaaggttgggtatgtgggcagggggaacaaggtgacactcacattcttctggaagtagtgcagacgcctcaggtattgcctccgagctgcccacatccgggcccaggcctggatctgggagaagaaacacactgcctcagctccagcttggggcccaccctcactcagtctcaggccaattcagctaaatctagaggtcacaagaaggtgacaagactacaagattgttctcagacggtcctttgagagaaaggagcctgccaaaaccaccgtagctaccttgattatggcatccaggtttgctttaaaatactgcaaccactccaggtaaatcttccgctgcctataaccccgccaatgagcctgcacatcaggagagaaagggaagtaactcaagcaggtctcctttggccagaaaggcttttaagaaaatctttgtcctgggccctccagggaatggaagggggcagttaaatagagggggaaggggaaagtggccctgttctcaaagaacttccaacttcatggggaagaccaaatggcttcacatagccaacaatgccctctgccatactccctggtcccagaacaaacacccacatacccacacccacacacctctaaccaacacctcttcacagaaactcaactataagatacagtcctaaaagataataaagcatacacctactcatcaacttcaccaaagtatgtaccatatcagcctaaaatatactcatacacccatatgcagaccacccacacactatcacacactccaccctccctcatgtgcacagaaagtgggcagagagcagtctggaaatgcatgcagttgtgtggatgagaagtgtgtacaggcacagagccgtgtgctcaccatctctgcccgcggccacctgggcagcaggtcactaatgctctcataactcacattctctttaaaacacaatccagctcctgaccctagttctcagcaaatcttcccaccaaggtccccagtaactcagctgtcaggctgatggcctctcccctagctgatctgctgcaaagggcccaaccgacgtctgcacaaatcatgcctcctttggtctctaaaatctcaaggccctcttccaatccagtctccttcctaggagacttttccctttccctccaagcttgtgtgggattaattttcctaaagtacctcttagactatagactatcccagcctgtttccagaagttctcaaccatctgacccaacactccctatttgacttgccactggtccccaccttcttaaggatcctagatgcatcagacttttcactttcttgtaaacatgccttatggttttctgtccctgaaccttttatactcacctttgttcccactgaaatacttcctgtcttttttttttttttgagacagggtctttctctgtcacccaggttggagtgcagtggtgctgtcatggctcactgcagcgtcaacctcctgggctcaagtgatcctcctgcctcagcctcctaagtagctggaatcacaggtgtgtgtcaccatgcctgattacttttttatgttttgtagagatggggtcttactatattgctcaggccagtcttgaactcctcggctcaagcaatcctcccacctcggcctcccaaagttctgaggttacaggcgtgagccaccatgcttggcccttcctgtcttttaggccccatgtccagcatctcccagtgcacaggccctgggagatactctaccactgacattgtctcagtttggtaagacttgggagcaactcctttcattcagttgcccttagcccttcctaaagccagttctgccagctttccctcaaggcttacacggcccctctgttgggataggatgtaaaagaggatagcttggtccatgatgccagctgtccatgttggagcctagaggtcaggaaggcccatttccaagcctgccctcaggactctttcctttcctcctccaggtactgactggaaagttgctgtgggaaaaggcagagtggtctgctctctgctcttactcactacccaacctccaccaggctccttaaggcctctgaattggtcagaattcaggatcctggatggggttctggccagggtcagagctttcaggagataaagtctcagcacacccaggaagcctcattttggattttcctttccccgggcaagaggctcaaggctctgggctacccctctctttctctgtctcccaggacccaggccagagcccacacagctttggtactagtgacaaatgttccctctgactccatcttctctcccactgttggtgtggtttttcatcgccttagtgtgaaattccagactgggctcaggagggagaaatccctatgattcagaccactaaatacagatcactaaagttctgtattgagttctgggaccaatgccctgaaaacaaaatctcataatggctcccatcaacggagcacttaccatgctaagtgctacatgtaattttcctactgaatcctcctaatcaacatatgaggtgagtaccatcattatgaatgaggaaaccgagtgctagagagggcataagtaaggtgcccaatgtcatatgacccagaagtggtaggaccaggaggcaaactctaccttctgaccccaaagcctgagctctcaattaccccccaacaccctcagtcataatcaagggccatttgccagtcctgatctgcacatctgtctcccttggtgtcctctggtgttgtcttcatgtccctcctatcacaatgtctgacatcaagtgtactccaatttctgtgaggggagagaagtgattactcacccgtgggccttgcacccatctcccacccttgcttagtgccaagtggcatgctcttggcattcaaagaagtttgtgaaagcatcttacattgccagcacctccacgaggccctccagatcacatctgcctgggaaggtatctgctcaattgccatcattcctggcttgcttgcacagtgtctctggctatcttccctaccagcctcatgtctcaattacttatgggtcagtctcagaggccacactggaccatccacgggttggaagaataaaaatgggaagggctggtaggagaggaaaggtagaaggctattctcttcctaaaggatattccaccccttttctgtttaaccaccaccacttcttcgagccctcctagtgtcctagccttgatgtcttactaaacacacagacacacagacacagacacacagacacacacacacacacacacacacacacacacacacagacacacacacatttttagagacagggtctcgctctgttgcccatgctggagtgcagtggtgtcattatagctcatttcagccagtacactgccctctagcctgggtgacagagtgagaccctgtcatgcaatcctcccacctcagccttctgagtggctggaatcacaggcatgagccactgcgcccagctaaatcttatttcactcttcccttggggaagctaagaagcagctctcactctctggatagtgacgataatgatataaatagcatggtaacttctaacatgttcttacctacctcccaggcacaatttataaacacttgagatattacctaacttaatcctcataacaactctataaggtaggtgctatcgttatccccattttcagatgaaaagactgagggaccagtgaggaaactgagggagagagggtaagtaacttgccagggtcacacagctaagaggtggtagagctgggattcaaacatacatggtctggctccagaacctatgcttttaaccactactattcagaggccgaaaggtcattcccatgtcagtaaaaaggaagcagcgtggataccctggagcccagataagcccaggccctgaagactgagaaagccagagcctgccacctggatcttgatgactgctgggagccaggtcctcagaaagtgggaatgctcagcaaacttctgccgaactaggaagccacggaggcgggcctggagctggataacaaagccgacgttggctttccagagctgttggcggtcataggcagcagtgaccttggtgacagctgactgtggaggcaggagagagacgctgtggtcttttggggagtgggagcctcttcttcaggacattcctatccaagatcccctacccttgcaggggctctgccaacctggatctcctcccgggtcaggtgagaggtgttgagggggcagccaggaggttgctcccagatcccctggaaggtctgcagatggaagtagtaggcagtgccatccttcatgtcatgttgaacccagaaagctgtgtctgctaagcagaaaccaagcaagcagaaaaggttcagagcaggcaaggggtggctggggcaggcagcgaagaggagggtcaggttggggccattacctggacgctgtttctttgccatggcactttccagggctcgctggtagccgttggcacagtcgggaactacccctcgaagggccactgcggggttcctcaacacccgctcagtctgggctgccttgccctccttgatggcttgattgatggcagccacaccaagagccactgacaggggcatcaggagagagcagtcaatccttcccccgagtccctcccatgggccttggccagtccactagggacagattccatgaaagaggacacaaaatcacccttctgaaggagtagacgggaacatcccaggatggacagagacacatgcatgaaaagcagcagcatgcaactgtgcttggagggaaaggcagcagcagtcaatgaagcactcctgagggaggcagcgtggggctaggctgagttggggcttgataaaaggaaaatcagcttgaacagaagcataaaggcccagagcagtggctcctgcctgtaatcccaacactttgggaggctgaggcaggcagatcacttgagcccaggagtttgagactagcctggccaacatggcgaaaccccatctctataaaaaaatacaaaaattggccaggcactgtggctcacgcctgtaatcccagctctttgggaggcttaggcgggcagatcacctgaggtcaggagtttgagaccagcctggccaatatggtgaattatatgtattatatgtgcctactaataatacaaaaattagccagctgtggtggtgggcgcctataatcccaactactcgggaggctgaggcccaagaatcgcttgaacctgggaggtagaggttgcagtgagccaagattataccactgcactccagccttggtgacagagcaacactctgtctcaaaaaaaaaaaaaaaaagaaaaaaaaaattagccaggtatggtagcgcatgcctgtcctcccagctactcaggaatccgaggtgggaggattgcttcagaggttgcagtgaatggagatcacagtacactgccctctagcctgggtgacagagtaagaccctgtcttaaaaaagaagcactttatgcaggatatgggcagaggaccctgggacagtttcttagaagagagcctaagaggtgggaatggctgctgtagcatctgccttccactcactagcagacagacagatggacagggagaccccagccactgagaactaacaccaccagcaccaaacatcagcacacccctgtctatttgcactgagtctgcctgttttcctcaaactcctgccaattcctcttctctcattccaagtctaaacattttctagccagagctgattgactgttggaacccaaactcaagctaccagcagaaatgggatttctgactaccgcatgatctcacatgcccacattacagggaaagtgttcacaggaaggcatagagggaggcagcaggtgaactatggattctcacctcctgagaatgtcctgccctgctgactgccaggaaatccatcctgcagtctgaacagcagccctcctgctctgactctggcctgcctccccacagaggttgaagggagagggtggtgaccagggaggctgcctgattatctgggctgctgctgagcccacatcaccatccctcccctcccagggtcccccaaccagtccatttacttctctgagctgtattagtgtcctggttggctctgaccactccctggcggatctcctcaagccacagcacagctccaggatcccctgtcacctggcagattgagggagaaaaaaaagatgtgaccccaagctagtctctctaggttcccaggccaagatgcccaagggaaccaaactgcaggcaggcattgggagccacagggacagtgatctccactcagctctctgccctgtgtgtgggcatgtgtggcatgtggttccctgggacgcggccaggctcagaaggctctcttatcctattgggctttcaggtctactcggcttggccacagcacctccagaaccacagaggctctgcatagctcctcaaaccctcagcatccaccaccttctcaacagctcaattccctgctcttatgcctcagccatgtccagggatagcctacgctggaggctccaactacctgcccccacgccccactcccctatgcctcattgcacaccttctcaggccaatcctgaccctgacccttaccttctctttccttttcttgctccacactcctctacccgacaaggtagtgggaagattacatgagcccacaggtcaagtaagcctatgcctgccacactgtcagactgataaaggcttgaacccttccttgcctcacacaaccccagattctactccttcccaactctcctcaataataatagactttgtaaactaacattttattgagtactgactatgtgccaggcagtattctaaagcactttcttatgcattaatacttgtaaagcacataaaatgatgcttggcacagagtaaggactcaataaatgttagccagtactactgtcatattatctcacttacaccccataactatgagatacactctttactgccacaagcttctaggtgatgaaacagaggcacagagaggttaagtaacacgtgcagggtcaggccgccaggatgtaggctccagtagtctggcccaggagtctgagctctcaaccactctctactgcaacatactcagggtgtttcaggttcagaaccctgccccatttgtcaattcatttgattttcaccctcattctgggagctgggtaggaccagcgtaggcagtactttacagatgagtaaatagagctcagagatatcaagggatttgctcaaggtcacatggtcactaagggtcagagtgggaaatccagcctgtttctctggctcccaggcctgtgcttttcccatggactgcccactgccctggcaacagggccatccttctttaccagattggaacacccccctcacccccacccagaagccattgtgtccatcagaatagagctctgccagactgggtacagtgcaacccacagagaatgttcttcctgctctgatgaccaacccaaccagccctaacttcacctgggccttctgccttttggctgccacaaggaggagatggtaccgaggggcgacagggaggctgacatcatctaggccagctgcaggaagcagtagggcagacagagtcttctcagggctgcctttgtccagagcctcattgatgaggctgactgcaaggacccctaagaaagagagatctaggtgggcagggggcccctagacttaatggctaagggacaggactgcctaagttgggccatctccacccagctccagactatacttacggtcagtctcttcctgggtctgtgcattgacctggctcacggtggcctgcaggtcattccagctcaggaagtcctcacccatcccacgctcctgtcgcaatttcagcagggcatcgaagtaactggcagtggggtgaagggcagagaggtgagtagcatgtgaatcatcagccagaagtcaggggaaacagttgaacgattttcttcacttgacctccaggacaccacactcttttagttctcttcttgcctcacaggctattctttctgagacacctctgctggttcctccctgacatctaaacatgggagcatcccaatcttcagtcttcagacctcttctctctccatacttacattgtagatgatctcacccaatctcatgactttaacaccatatgctcccgaaagcacacctccagcccattcatttatcccagccagctccttgtgatttccaagtgaatgtctaacaagcacctcaaacccaacagctcacatctgaactggttcccctgcttaacctgcatgtcccaccgtctctcccatcttgccccaaatcttggagtcatacctaattctgttctctcttctaccccatatctattatatgaccaaatcctgtcagtttgctttcaaaatgtatccaaaatctgactcctttttcccatctccgctaccgcccaaggccaagcccccatcatctcttgcctggattactccaatagctgtctaacaggtctccctgctttccccttgtactcctgcagtcagttctcagcacagcagccagaaagatcccattaagtagatcagatcgctgggcacggtggctcatgcctgtaattccaacactttgggaggccaagatgggaggacagtttgagcccaggagttcaagaccagcctgggcaacgtacagagatcctatctctacaaaaaattaaaaaattagccaggcatggtggcatgtgcctgtagtcctagctacttgggaggctgagttgggaggatcacttgagcccaggagttcagggatgcagtgagccatgattgcaccactgcactccagcctgggtgacagagcaaggccctgagctgtgattgcatcactgcactccagcctgggtgacagaaccagaccctgagctgtgattgcaccactgcactccagcctgggtggcagagcaagaccctgtctctaaaaataaaaaaaaaagaagtaggtcagatcaactccctcccggctcaaaaccctcccgtggcttccttcctcactcagagtaaaaaccagagtcctacgtggtctggcctcggctacttggtcttcatctcccactcctctttcttccttacttcactccaccacactggcttcctgatgttctttgaacacaccatgcacattgctttcttaaggcctctgccccagatagcctcatggcaatcatttatgccctttaggtctctttcaaaatgacctcctcagcaaagagatctacattatgtaaaacagaaaaactgtccctactatgtctctacccattacccactttgccctattttatttttctctatgtcttttcttcttttcttttctttctttcttttttttttttttttttgagatggagtttcgctcttgttgcccaggctggagtgcaatggtgcgatctcggctcaacacaacctccacctcccaggttcaagtcattctcctgccttagctcccagagtagctaggattagaggcatgtgccaccacgcccggctaattttgtatttttagtagagatggggtttctctacattggttaggctggtcccaaactcccgacgtcaagtgatcctcccgccttggcctcccaaagtgctgggattacaggcgtgagccactgcacccagccacctcatcttcttttctcatcatctgtctccctttactagcatgtaagtttgacaagagcagaaagtgttttgttcactgctgtttcccagcacctagagtaatatctggcacatgggtcagtactcaaacatctgctaggaaagaatgaatcaatgaagaaaaaaggaatgactgtgatcccatccactcccaggaagaaacacaggccaaggaactgtgaacagacccagagggtgggcctgggcccaagaatgggacatcgtacacaaggcaagtctccaacagaagagtgctgagtcttggctgcattcccccatccctcactcccaatgtgtggctaagcctttctcaccgctgggcattttctccttccacctcagccaggcctgtggcagggttcaccaggctgctccagaagccactggcatcccgggcctccagggcccggttaatcaggaccacagctgagagcatctccacagccacgaagagctcctcctggccaagctcctacaatgggtgggagggccaattcccaagtgggcaggtgaagggtctaaaggcctattcaccatcctgcccccaaggttcttgaatatcccagagtctctatcccaaaaccccagtggcctgattcactcactaataatcatcatacaaaacacctgataatacttactatgtgctcaattataagtacttcacacacattatcatttaattttcataataagccgacaatagaaccatagtaccattaacatccccatttcatggatgagcccacgaccaataatgtaagtcaaaactagctgtctgatttcaaagcccacacttaacaagtaagctctaccagctcccattggtccctactgcatatcaagaactgtattagccgggtgcagtggctcacacctgtaatcctagcactttggaggccaaggtggacagatcgcttgagctcaggagtttgagaccagcttggccaacatggcaaaatcctgtctctactaaaaatacaaaaattagctgagcatggtggtgcgtacctgtcatcccagctactcaggagactgaggcaggaggatcgcttaaacccaggtggaggttgcaatgagccgagatcatgccactgcactctagcctgggtgacagagccagaccgtcttaaaataaaaaaaaaaattgaactgcactaggccctgggtatacagagatgaagatggagtggtcgcctccacactgcactgcaccgcacacccaagaagctccggccccatttccctgccctgtccttcttctgcttttcaaacatctgcttatgccgtgccctttgtctagagcacccttcctattttcttctctgtttttttgagatagagtctcactctgtggcccaggctggagtgcagtggcacaatcttggctctcccgggttcaagtgatctctgagcctcagcctctggagtagctgggatttcaggcatgtgccaccaccacacctggctaatttttgtattttcagtagagatggggtttcgccatgttggccaggctggtctcaaactcctggcctcaagtgatctgcctgcctggacctcccaaagtgctgggattataggcatgaacccccacacccagcccccttcctattttctcctaacagaatgttgtgaatatcaacaacaataatattaatagctaaagtttactttcttctctaaggttcttactttcttctcttaggttcttctctaagcaaatatgttcccttatttaatcctatagcctgaggtaaatatattattgttcccattttatattcaaagaaattgagcagcagagaaagtaattaacttgcccaatgtcacatagctaagaagtagcagagccagatttgaactcacgcagcctggctcaaaagtccacaactttagtcacaatgctttacttcttagtacttattttatgcttccttgtacatagtcattcctatgttgagactgtgcctttcctgagggctgtgcctgtatccaagtcatgctgggagtagatgctctataaacacctgctgtgggtgtagttctctattgattctcttccaggaagacttcccggctctgcttcctccatttccttggtctgaagacttcttccacttatgtcatctgctcttctctccctgtgtgtctctatttggaccttcaggtgtattctaactcctccaacagacagaaagtccctaagtgagggccctgtcgtttcactgtcagagaagaactatggattgggatgaggtgggacagtgaagtgcttcaaagcatgggcttctgcatccactcccagcactggcactcacagctgtgttgggcaagtgacttaactctgcatctcagtttccccatctctaaaatagaatgcctccctcatagggtccttttaaggattaaatgagtatgtaaagcagtgtttgctcaaggtattggctattaaaatacgctcagtaaggcagggatggtagctctttccccatcctaatctcgtgccagcatctcatatcgcactcacaagagggtggcctgggctgcctgtcctgatccctccagctgcatggagactgcagagctagacccacatttctggggcttaccccctgctgctgctggagcactgccagctccagctggtacatagacgatgcaacagggtacactggaggcagctgggcctcagggcacatcagctccttcacagtgtcagccgccactctcctccggatggctttgttgatccgctgcacagcgtggagcactgcaaggcaggagagcaacaggttgtactggccgggcattcagtggcatctccactctcctcaccaactaggctccgccgggggatcttggtggggaaatggctttccaactgctctcaaaaatctgctaggtttaaaatgcatttctaagtgttcaggaagaaaaggggctgggttgctttaacaagaggctctgtaagaagcaatttgtcaggcctagaaattgagtagctcagcctctgccccgccgccctgtctgggatgtgaggagcacctctgctgggccgcaaccctgtctgggatgtgaggagtgcctctgcccggccgccccgtctgagaagtgaggaaaccctctgcctggcaaccgccccgtctgagaagtgaggagcccctccgtccggcagccaccccgtctgggaagtgaggagcgtctccgcccggcagccaccccgtccgggagggaggtggcgggggggtcagccccacgcccggccagccgccccgtccgggaggtgaggggctcctctgcccggccgcccctactgggaagtgaggagcccctctgcccggccagccgccccgtccgggagggaggtggggggtcagccccccgcccggccagccgcccagtccgggagggaggtggggggtcagccccccacccggccagccgccccgtccgggagggaggtgggggggtcagccccccgcccggccagccgccccgtccgggagggaggtggggggggtcagccccccgcctggccagccaccccgtccgggaggtgaggggcgcctctgcccggctgcccctactgggaagtgaggacccctctgcccggccagccgccccgtccgggagggaggtgggggggtcagccccccgcccggccagccgccccatccgggagggaggtgggggggtcagccccccgcccggccagccgccccgtccgggagggaggtggggggggtcagccccccgcccggccagccgccctgtccgggagggaggcgcgggggggggtcggccagccgccccgtccgggagggaggtgggggggtcagccccccgcccggccagccgcccagtccgggagggaggtggggggatcagccccccgcctggccagccaccccgtccgggaggtgaggggcgcctctgcccggccgcccctactgggaagtgaggagcccctctgcccggccagccgccccgtccgggagggaggtgggggggtcagccccccgcccagccagccgccccatccgggagggaggtgggggggtcagccccccgcccggccagccgccccgtccgggagggaggtggggggggtcagccccccgcccggccagccgccccgtccgggagggaggtggggggatcagccccccgcctggccagccaccccgtccgggaggtgaggggcgcctctgcccggccgcccctactgggaagtgaggagcccctctgcccggccagccgccccgtccgggagggaggcgcggggggggggccggccagccgccctgtccgggagggaggtgggggggtcagccccccgcccggccggccgccccgtccgggaggtgaggggcgcctctgcccggccgcccctactgggaagtgaggagcccctctgcctggcgagccgccccgtccgggagggtggtgggggggtcagccccccgcccggccagccgccctatccaggaggtgaggggcgcctctgcccggccgcccctactgggaagtgaggagcccctctgcctggccagccgccccgtccgggagggtggtgggggggtcagccccccgcccggccagccgccccacccgggaggtgaggggcgcttctgcccggccgcccctactgggaagtgaggagcccctctgcccggccacgaccccgtctgggaggtgtgcccagcggctcattggggatgggccatgatgacaatggcggttttgtggaatagaaaggcgggaagggtggggaaaaaattgagaaatcagatggttgccgggtctgtgtggatagaagtagacatgggagacttttcattttgttctgtactaagaaaaattcttctgccttgggatcctgttgatctgtgaccttatccccaaccctgtgctctctgaaacatgtgctgtgtccactcagggttaaatggattaagggcggtgcaagatgtgctttgttaaacagatgcttgaaggcagcatgctcgttaagagtcatcaccactccctaatcttaagtacccagggacacaaacactgcggaaggccgcagggtcctctgcctaggaaaaccagagacctttgttcacttgtttatctgctgaccttccctccactattgtcctatgaccctgccaaatccccctctgcgagaaacacccaagaatgatcaataaaaaaaaaaaaaaaaaaaaaaaaagaaattgagtagctcagcatgtaacacagagtggctgtcatagcagagggtgagttcctaaggtggtgagcacaagattgacaggtggctatggaacgtaactaagatgaggttagtcagggggctctagggaccaaggcttgatgacagcacagaggaataaggaaccagctccaaggtggagccgtttgctgcaaagggcagtagtaagcttaaaaggggctgtggtgcctcaatgtagtctgagtttacaaactctgtggcttacaaaatgcttagcagatacgggcactgacatcaaggagagcacaatctactgggaagaactaaggataccaaagtacctacagtgcactgctgtcaatgtcatgttagaagtccacctcccgccacccccacacaatgctatggcagagcaggggaggagggattctgcctgggagagagcagaagacttcacagaggaggaagccttggagacagctctggagaatgttttcacccgctcatcaacaggtgagaatgtgggagaaatgtaacccacaggaccagaagcccggtgatgggaaaggctggagggcaatctagggagaatagattgtttgctcggctgaattggatggaatgtgaacagaagagctggggatgaactctggaaaggtcttatctgccaggacaaggagataggactaaagtgtgggctaaataatggaagaacccatgaaggtctgaagatgttcaacaagggagataagatcagatctgtgcttcagagattactctggcagcagcaatcgggaatgaactgagtggattaggaaagcagccagtcaggagtggcccgggggctactgaaagctagtgaatgtcggaaagctctgttagacaaaggtaaatggttactgagcaacctctaaacctgacagcaagtccagactaaggcaagcaactgtaacaggcctagtgtccacaggctactgcattttgcctcagcactgtttctcttcatacttgcagtgcagatagatctcttggaggaagacaattactaactcacattcttgtaataaataattatatttgtggccggtcacagtgactcatacctgtaatccccagcactttgggaggccaaggtaggcagatcacttgaggccaggagtttgagacccacctggccaacacgaagaaccctacctctactaaaaataccaaaattagtctgccatggtggcaggtgcctgtcaacccagctactcgggaggctgaggcaagagaatcatttgaacccaggaggtggaggttgcagtgagccgagattgtgccactgcactccagcctgggcaacagagtgagcctctgtctcaaacaaaaacaaaaacaaacaaaaaagaattacatttgtatataatgtttttaagggaaactgagaagatgagttttttgctcatattctggaaaattactacatttccgaagccaaaggaattcaagcaggttgaaactgtcaaaattacaggcaaactgcctggaagaaaactgcctgccccaggagaacagcccagtgcagtattggcatgtcattatctctaaggccttaatgaacttatctgtagtgtccccccaggcagcaggaataaagcagattatgtgaggggagaagttcctagccaggctggaaacagcagcagtgtgtactgcccaatacagaagccagcaaagaggtgggatactcttctaagagtcagagatacgcacagagcaggcctcagacctgcagatgacttactggcttgttcctgatcaccctttgtgttggctgcagccacaccagcctggacttcctccttttccagaagctccaccaggcccagctcctaagagagggaagagatacagtagaatggagtccttccggggccatgaccatgctttacgagttgccagcatgagctcccaggtctacccagccacctaccctcaatcctacctctctccgttaggctggctcactcatccctattaaccgtttttttttttttaagatggagtcttgctctgtctcccaggctggagtgcagtggcacaatctcggctcacggcaacctctgcctcccgggttcaagcgattctctgccgaagccttccaagtagctgggattacaagcgtgtgccaccacaccagctaatttttgtatttttagtagagacagggtttcactatattggccaggctggtctcaaactcctgacctcaagtgatccacccacatcagcctcccaaagtgctgggattacaggcgtgagccacagtgcccagccctattaactcatctttaatctttcttgctcagcaagcatctaaaataacaacatagacaacacgaatgtgtcaggggaaaagtcaactactttaaaaacaagattgctaagtggaggcaccagttcaacaatgggggagcacattactgcctatgggactgtccttgggttcctcttggtcagcctgggggactctcagggacagaagctgatcaatctggtctactaggccttggggtgatttaaccatttaaacacgtagtcagcacttacagaatacaaaggaccaacagtggtgatctttgagtaagaggccctctcctatcctatagtcacatacagggggtggcaggtaatagacagaggctaacctgtgccttctgctctctgtctgagttcagctgctccaggtaccagtcagcaaagtctctcctcacccctcgcagggccagggcagggtcttgaagggccttgagcaaggcttcagggctctgtctttccagggcatcatcaacaacttctagagccccatggactgaaaaaaaatgactccataatggacagtgtgagaaagccacctctcataatcccctagtccagccctaggaatctaccctcttcttgcctgcccggaattacccccaccctttcccccttggttcctgggcccatttggttcagcccaaattcttcagcttggtcttcacagccttctcacttcgccgccccagaccccaaggatatcctcacccaaataggcaaatgcccacccatcctgagccttcacacggctcctacccagatccccccatcctcatgtattctccacattgcccctctcgaaggaccccagtccaactgcccccccggcatcaagagctgctcctctctatggttctccagtcagacagaagcttcccggacatggactacttctctagacaccgatggccagaaagcagtgcacatactccttggactctgatctttctccgaggcaagagttggcccaaatgagaccatagggctttctggcttgagaaaagctatccccaaacctcccagtgcaggggcttaccctgaggtcacccccaaaccactcctgctcgaggtctcttaccgttgacatggttgatattgccctggatttcagcctgagttaggtagtggtcatagatgtcctggctttctctgtcatcctgcaaaaactccattgaaagggaacctgggaaacccaatttaatctccttgtcctgctcttccctgcctggctacacttatttcttcttctggggaccttcccaaggccaaagttcagtctgctcagaattcaggaattgtggggtctaaaacacttggcactgacataattaagccaaaccaacctttggaacctccagtccaatctcattctgttctacattccagcacccctctcaggcttccctgaagatcatcccccaagaacctcttctccagtcttctcttcggaattctcatcattcttccaagttcctttcctatttctctaaaatcactgataaattatggtttctctaagaagcaattttggatactagagacatgacagataggagtcccggtttcacttgagactttccagccactcaacttttcggtccctgcaacccaagactactccttacatggttcctggcattggctgccttctccatcttggcctgggccagcatctcttggtagacggctgccagaggctctcggagattctccagaagagcactgggattctgcaaggcagccagggtgtcctccaccacccctcgctccactgcttcattgatggcaagaacagctgcatggactgggagagggcatggaaacaaggtcaggaggccagagtgaatcccagattggagcgcaaccagtagcagcccactctaatgtcatcctttttcccaccctcaagggccagacaaaccaggtagcctgatggccctatctgtggatgagagctggccagaacccatccaatggctgtgaggcttggagccctcccatacgcattgagcctactcctggcagggcagagcctagtccttacctgcagcctcatccaccgagagctcattggccaagatgcccccgatcttgctgaaggcaggcagctggaggccatatttggccagttcggacgccatgttgctgagttcctcagctgcaatgatgccacaggtgcccttcatcaggcccagaacccccaagaccctgcccaggctgtggtggtcagggaaggagctgggcttacctgtgaatttcactttcccgtatagatcatgtatctgaggggccaatcccagccggaagaggaagagactaggaaaaaacggaaggcattggaaggcactggggcctattcattttgacactctgcccacgatgggtttgaaggggatactatggggacctagagatgaagaccactcagcacctgccctcaagtcatccccaacccacataaagaaatatgaccataaatcagcccaaggaaagtgctgcagaaggtaaataagatggtgttgggggtctgaggggattaggaaggcttcacagagaaggccacattgcagtagcaggtcactcaatggagagagaggacaggaagggcgcagcaagcagatacctgctgagctaaggcacaggggcacaaagggacatgggaagtggtcagaaagagatggcatggtaaacacaaggaaccggtcggtcacttgctgtgatttagccaactggttgctgatggctggctgtaagtaggaccaaagagcctacaccatccatactaagtgtcttgcctgtgttgctctcaataggtcctgttctgattcctttatacccagttacaaactgaaggccctaccctgctactttcctatctctggtaccctgcctgcccttccccttcacccacacaggccatacataaatgtgcccacagacatgcacaaaaatctaaacacaactctgtaaatctgaaacctcactctcctgagcagtgctccctgtggtctacccttcatccttctttcttgctgagtttgttgttgttgattgttggtcgcatccacctagaggaacctggatgataaaatttgaggtctctcacctgagagcatggatgcagtagactacccggggcatgttctttttgtcatagatgtccgtggtctctgggaagaaggtctagaggagaaaccagccagttactgccattgggaacctttaagcaccaccaaatgcggagagggggtgccgaggaatgggtcttcctctccaacctgaggtgtgtgttcccttgttacctggggtgtctaggtcagtctcccccaaccatttctagtcagcctagtataaaagaaattcactgaggatgcatactaagccaaggctcagccacagacacatagtcctagggtgccctggattaaccaaacaccagataaggccatcaaggctacaggatataagccatatcctccaaaaacaataacagcaacaacaacaaaaaaccaggcccccagttgtcttccagatgtctatagtgagcctgcatgcctcaccttagacccttgccagagatgtggtatgctggagagctggcctactcccatgcagggcccaatgaagcatatattgccaaggaccacaaaagtgtcaggctgttatccctgtctccaagccagcggcttctgatcaatgagagcccttctaagaaccgagtggcaccaggtatggcttctcaatgccacctgacaactgtaatgaggcctaacctcaatatatcttggttatatttagattcacaataaaagaccaaatttagagacctagagtgttccagtcccactgaagacacatgacctctattgcttctgcctcccatcgaagtgtctttactgctgtttcctgtcttatagtgcctttctacagggaagaaaaacaaagcagaaagaaaccatacattgtagaatcctatcatgccttcatttgtatagctcttcacagttcacaaagggagttcacacagaccatgtgatcttcctgacaacactgtaaggtagacagggcagggctcactatccccattttacagatgagtaacaaattgaggttcaaagagtgaaatcatgtgtccagttggggttttggacctaggcttctaactcaaagtctgccacctagggatgtgtatacccttgcttcacactgtgaaatttggtggagacaaggctggccaatacgagcatgacatagcagcctcccaccccctgcataatgggaaccgtgccactcaggccagggaaacttcacctcctttcatccacagggaagaggaggcagagaaaaaaataacctggttcaaagacacacagctgcaaggaactgttctcttagattaagttagtttagaagacacatggaaatagggctaaagggtccagggagataaagcatgggattgtgggaggtggctggtaaggagtaaagatgaataccaatcttcaggcccagtattaccgaaggcagaccgatgtgggctattgcagatagccaaaagttgatgttgtctgtgtgacggaaatgtaagccagttgcctgaaagggaaggaaaaagaaaatctatttccacagttctcagcactccctatgggtaaagcccagactacagcttaaagattcaggagagatgggcagaggggaaccagaggaccacatcctgtggattttccatccctaccaggacagagaaacatagattaataacactcccttttatccagatttggacaataagttatatggtcactctaccctcacagctttgaggagaaagcatagtttgaggggacgaaggtagaaggtggggtccaatcctcccacctggtaccgcagctgctccacatcgtagatcttcttcaagggaaccacggagggtgcaaaacagtggcctagcttggccagcagcactccattccgaaggctctcctccagctccaccggggaaggaagctcctccttcaggcaggcctccatccagctatgaacatgagaacaccttctcacgcactctggcagaccacagtgatttattctaacaacaggaacttccctctgtccctccttttaagtggcccctgaccctcctctgcttcctgttcctgctctacctccaactcccttctctgcccattgcctggctgttcccaccttctcctaggttgccccaaatatctggactggccaaccctcagccccacccaccccagcaaatcttccttgacagatcctgaacctgcccatcttcagtgaggcttaactgttacatagcttctcactcagtctagttacatgcttttttttttttttttttttttgaaatggcgtctcgctcttgttgcccaggctagagtgcaatggtgcgatcttggctcactgcaacctccgcctcccaggttcaagtgattctcctgccttcagcctcccgagtagttgggattacaggcacaccccaccacgcccagctaattttgtatttttagtagagatagggtttctccatgttggtcaggctggtctcaaactcccgacctcaggtgatccgcccgccttggcctcccaaagtgctgggattacaggcatgagccaccgcgcccggccctagttacatctttgactgctaaacaaaatagaacgtgctcacttctttcattctgggttgttctctgagaacctgggtgcagaaaggtcatgtctgcctgaatgatctacatggctcataacccagctttgatgatgatgagagtagtggggctggtggaaggggagcagcacaaagggacagaacgaccacagctcttggagtccgaaggccccctttccaaccatcttccctacttcacctctgtgagcctcagttgcacaatttgcaaaatgaggataatgccacctgtatttccttcagtgggcagctgccaggatcaaatgagctaatgaatgtgaaaacactttgaatataaagtattattattactgatggttgtatgagggagagattaaagtctactcagatggaatctccaaacttccctacatattggggtctaattggaaagtatctgtttccaaaaagagagccagttacacattgttccatgtcttccctgccttagacacctgatttttcctgattgccccatcctcctgactcctttaagaacattaaaagaatcctgttgattaaaagcaaagaattaagtacgtatcctgcttttcctgtacagattgacttttagagtaaccgaatagtcctaagatgatgagggaatgttctttaggatttcagctagtaaatatggaagaaatgacagaactagaaaatagtcattttacacccttgataaaataataaattctgatgtagaccaacaatgaatgaaggcattagatgaaagttaatgggaaattttatgatgtgtaaatcaggttggtttcacctaaactcccagattgaacttagcatcactaaaagtggaacaagcagacattgtattctttctataagatgtgatatggaacatgtatcttacatatgttaaatatcacatattttagatatatgtattgcagtatataaggggtaaaaggatctgagtgggggaaaaaaaaccaccaacactaatgaagtcttcttgtcaaaaatggctttttgtttttgtttttttttgagacagagtctcactctttcacccaggctggagtgcaatggcatgatcttggctcactgcaacatctgcctcctgggttcaagcgattctcctgcctcagcctcctgagtagctgggattacaggcatgcaccactgcgaccagctaatttttgtattttttttgtagagacaggatttcaccatgtcagccaggctggtctcaaactcctggccccaggtgatctgcccgccttggcctcccaaagtgctgggattacaggcgtgagccacagcgcccatccaggtttttctgtttgtttttggagacacagtctcactttgtcatccaggatggagtgcagtggtgccatcttggctcactgtggcctcctcgacctcccaggttcaagcaatcctccttcctcagccccccaagtagctgggactatgggcacacgccaccatgcctggctaatatttgtattttttgtaaagatggggtttcgccatgttgcttgtcaaaaatgttgaacccaaatctaattaagccaacattcatttataggaaatacagggtatacaggaataagctgaatgacacaagaaagcaaatagacacccatctctaaaaaacagaaggaaagaaagaaaagaaatagagacaaaatgtaggatgtacttcaggaaaatgacccagttttcttcagcaagtcaataagataatgaactgaaaaaaggagatgggctgctctggattaaagaagacatacaagcagatgtaattagtgagctttttggatccttatttgaataagataactgtaaaaacagattttttttttaagacaagcaggaaaatttgaaaatggcttgggtattgatcttccaaggatttaaaataatttagttggatattataatggcattgtggctatataagcgaacgtccacatattttggagatacatattgcggtatatagtgggtaaaaggatgtgactgggatttgcttcaaaaaaaaaaaattaaaaagctatttcaactcgccctttcccacaggatggactctcgatctgttgcatttgctttagcggcagatgcctagggtggggtggtagaaagggagagcagaaagagtccatcttcctggactccgctcaccgcttggcctcctccagccggcacaggtactgataggcaacattctgccgcctctgctcatccatctcctcagctgtgaggcgttcatctgaggagttaaacgggataaggtcaatgaagagagcattagaggtgccttagcactgaagggtcttttttttttttttttttttttttgagacgcccaggctggagtgcagtggcccaatcttggctcactgcaagctccgcctcccgggttcatgccattctcctgcgtcagcctcccgagtagctgggactacaggcgcccgccaccacgcctggctaattttttatattttttagtagagacagggtttcaccatgttagccaggatggtcttgatctcctgacctcgtgatccgcccgccttggcctcccaaagtgctggcattacaggcttgagccgccaccatgcccagccgaaacatcttctcaacagacttgtttaggcaaccctgctcagagacctgaaacatctcccatgtgtccctccttctcttcccaggataccctttaataggcagcctcctcctgtgctggaggcattacttctctttcctctgtagccatcttcctgtcctcttcctcctcaagtctactcatggaacttccctcagtacctcccagctgggacatccagagccttccttggcttgaaacttaactccttttcttatccctaattagactgagttctccaagaactggacctgtgtcatcctcgttggttactctctcagaggtgaggtaatagaaccaaccagaattcatcattcactcattcattcattcatcaatacctcctttatgccaggcactggactagcagacccctactcttaagaaatgcagagataaaggcctgcatggtggctcatgcctataatcccagtacttctggatgctgaggtaggtggatcgcttgagcccagaagtttgagaccagcctgggcaacatggtgagaccctgtcttgacaaaaaatacacaaattagcctggtgtgatggtgcaaacctgtactcccagctactgggcctagacctgagcccaggaggtctaggctgcggttagccatgatcgtgccactgcactccatcctggacaacagagatattggtgggtttgttttgtttttgaaacagggtgtcactctgtcacccaggctggagtgcagtagtgcagccttgacctcctgggctcaggtgatcttcccacctcagcccccccaccaccaaatagctgggaccacaggtgcgcaccaccatgtctggctaattcttgcgttttttgttgagactggttctcaccatgttgcccaggctggtcttggactcctgggctcaagtgatcctcccgccttggcctcccaaagtgctgggattacaggcgtgaaccacagcgcccaaagattattatcagaagagaaaaacatctgaataaattaatctaacatgataagtatgattatagcccatgcataaaatctatgggagcagcagaggaagcaaaggattctagctatgaactagatcttaaggaataaataggcggaacacagggaaaggcagtccaacagagggaaacatgccactcacttgggattaagtggaaggacaaagaaaattttaaaagatcacaaaggtatcttcactatcctttttggtataggtcacccgaggaggaaaagaatcttcaagctaaataaaatacagagtactgattccaaaactcaagaatagagaatccctcaagtgagacagcaatcataatttgccttagttacagtctcccttaatccttctcccttctctcccctctctctattctccttagaaacacaatacaaaatcaaacagaaagagtaagagaaagctacacacacagtaagaaaataaactcagagagcttgaaaaaaggcagagcttagccaatctgtctttgactcagcacttaatgtcattcccggttgttatcctatttccttatattgcatattctgcaatgattcagggaagggcagagcttatatgaatgagcagttaagtaaattaaaacacatgcgtgcacacacacacacacccctccaaatacagatttgaaaacactggccaaccacaggaaagccatcagttcctccaagggggtgtacaaggaacaagtgttggttgttaagcatggaaaataaaccagtaagtgaatgacatcatctcagagttatgaactgaggactgtgggcgatgggagggattttgtacatacacatgctgtctcaaaaaaataaaaaaccgaaaaacagttttcctgtccttctcaggtctggaactagttttcctttaacagaagactggacatggactttgctctttgaatcctaatagaaaggaagggagtggtggaaggagcaggttttcctttcattcagaaaatcagatagaacctttctgccccacccatccttccagctccagtctctctctctaaaacagtgtctttgaaaatgtggcccagggactaccttcctcacaatcacctggggtgagggaagaagcacagcagtgcttgttataaatgcagattatgggccccaaaccagaccttctggaactgaagctctgggacaggtcccaggaatctgcatctcaaacaagcttcccgggtaatttcaccccctgtttgacaggcattgtctgaaagcggcatctcaaagcctaagagtcccccagatcccttgaggcgtcttgtccggtggcatcgctgggcaagtttggtagccagcagtaactgctgaatttcaaggagccattaggatcacctacattctcccgactccggaaccccagaacttggaaataggaagaaagttctttgtaagctttaaagcgcagcacattagtcaggggacaatgcgccgctcacagttccactcgggcccacggcgcccgggctgaggattcccgtcccactgagcagtcccaccgccctcgcccctcaggcttcacgcccgacacacgccccaatctctcccgggacagccaagcccccgaccagcggcaccactgcgagacccttctctgaccctctccgcactcacaggctgcccagcctgggcccgctgctctcctctccatgttcctccttcttccaggtttgaatctcccgccgttgggccaccgcccctcaccgtcggcaccgccagacaggacacttcccgtccacaccgctgagaatcctgggatttgtagttcccggccgcggagccgggccgcccaggtgctgggagaagaggcgccccaggccggggcagtaccgctccccttacagcagttcctcgtcttgttccttccaggctccttttctgcttaacagtcttattctagctgctgcccctgccattgcctctgtcatctccacctagtattcccattaacccctactctgcttcctatgtgttcccgagtccggctaacttgtgggcctacttggcgctatgcactaagctaggtgatgcgaatgcagagatgtatgagggcagtgaatgctctaaaagagtttgctgttctggcacaagtgatagacatatagtcaaataaattagaggtcggtgatgcacagagggagggggtcattgctgtgaataagagcagcgaatgacagggaagacgtcctggtggaagtgacagctgatttgggttgagaagtgaaagagaattcatcagattgaagaagagaggcagtgcagtcagtggagacagcatgtgcaagaacgaggaggtgagttcgggaacttaaacttggttcagttttagaggagaacaaagctcagccagggagaggccagaagggatcctggaggcacagggccaggtccagtagcaccttgggcaccatgctagggccctggcatggggtctggtgagcagtcaccagccaaggaacactttagacataggtcagagccagatttgtcctttaaaaagagccatcttatagcaggggattggaagggggtgaggctaggggcagagaccagttggaaggctactgcagtagcacagaagagagataataagagcctgaactaggccaggcacggtggttcacacctgtaatcccagcactttgggaggcggaggcgggcagattaactgaggtcaggagttcaagaccagacaggccaacatggtgaaaccccatctctagtaaaaatacaaatattagccaggcgtggtggggtatgcctgtaatcccaggtactccggaggctgaggcaggagaatcgcttgaacccaggaggcagaggttgcagtgagctgagactgtgccactgcactccagcctgggcgacagagtgagacgccgtctcaaaaaaaaaaaaaaaaaaaaaaaaaagagcctgaactaataaaaaataattatgacaccaacaactatgctgaaaaaatattatctgataggtttccccatcttgtatttctccttttaccctttccccacactccatccaaacaaccaagcagcctaggcttatagcttgggcaggtaggagaggagaatgtgaaagaacagaaaacagaaatccatacctagagccttcagaggaacagaggagactcaggggctgagacaaaactgggaaaagtgtaatttgaagagtggatgcccccctgaagatctgagggattccccttacctctcaccagctgggggagacagaatctagatgttggtggctcctggcaactggggtcccattctctgcttcctggaaaggaccctaggtgtacaggaccctgagaaagaacagttatataattagccaggcagacaatagacagctttgcagaaattcctgacctagacagaaaggaagtatccgaatgaattactcccctcttctgcttggaccctgggcttgaaagggccaggcagatgagaagaaagaaggtgtcagtggacacctttgtgaatagacggctgaggaccagatgagcctcatcttggcctcatatacctccccctacttagactccaccctggggaaaaggagggggcaaatccccagacttgttcacattgtttccatcatcccagtggaatcagggcttgaaacagaagttgagtagagattaatttcttccacaccagagttatggaccaacacacctatagtgtttactataggatgggtactatatttagcatgatcttacaataactatcttatttaatctttacaatacagattagaaactgagacttagaaaggtcacacagctaataactggtagagactagagctaaatgcagatagtcgcactccaagcttgagttcttttttttttttttttgagacggagtcttgctctgtcacccaggctggagtacagtggcgcgatctcggctcactgcaagctccacctcccaggttcacgccattctcctgccgcagcctctcgagtagctgggactacagatgcctgccactaccccagctaatttttcttttttgtattttttagtagagttggagtttcaccgtgttagccagaatggtctcgacctcctgacctcatgatctgcccacctcagcctcccaaagtgctgggattacaggcatgagccaccgcgcctggccttattttttattttattttttatttttttgagacaaagtctcactctgctacccaggctggagtgcattggcacgattttggctcactgcaacttccacctcctgggttcaagtaattctcctgcctcagtctcccaagtagctgcgattacaggtgcccactaccacgcctggctaatttttttatatttctagtagagatggggtttcaccatgttggccaggctggtctcaaactcctgacctcaggtgatctgcccgcctcagcctcccaaagtgttggggttataggcgtgagccaccacgcccggccccaagcttgagtttttaaccactatatactataccacctccaaggcatgagactgcagtacaaagggtatactagaggaggatttcaaaggtagaatcaacaggctgagattgagagccagagaaggagtcaagaatggctcctcggtttctggtttagagactgggttgttggtctactattaacactgagaacgctggaagggtagagttagggaaatgtgagtttcccttggacaagttacatctataggtacacatttagaaattatgagtctgtcagtggtgttaaaaccacaggagtcagtgaaatgttcttagaagagtatataaagtaagaagagaaaatagcaaagggcagcatgttgggggacattagcatttaagaggtagacagagggtccagcaaaagagatggaaatggaattttcagagaaggacagagagagccaggagacagaacgttatggaagccaagtgaaaagagagtgcaaggatgtggtgggtacagaaaggaatcaaacaagaaaatgattcagaaatgatcactggataattgggaggtcattggagccttggtgagaacagtttcagtccctgccctctccctaaatcatcctcccttcttaagggaagcctgctgagtgaaggacaaactgagctgcatatttggccctgaccaggctgtggtagcaccttaaaagcccagctgtctgcagaagctgcagacagctgggttagcctgccttgggcatgggactcaggacacaccaccccaaaatatgactgtaggaaactagaatatgccacctcaaaatatacttctttggcatattttgagcaggttattctgagaaactgcagacacaggagtagcgctgaaaagttgtcctttcgtaaaagaaatttatatctgtaaaggaaatctacattagtaaagtacctgtatcaggaagagggctgctctgagataacttctgtttgtcctagctggacaacctctgttcaccatgcacttgctcccctcaccctccaataacttggatcagcaccacccccgagatgccccaacccctattcctttctgtagctggggatgctgtataaacgtcaatcgtctgacttttctttgagtctcatgtgttacgggactcctgtgtatatgcacatatgtcatgagcctcataacaacgttttggtcaacaacaaatcgcatatacaatggtgatgccataagattataatagacctaaaatattcctatcacctagtgatgttgtagccaccctaacaccttagtacaacgcgtcactcacatgtttgtggtgatgctggtgtaaacagacctaccatgctgccagtcatatatacatgtatagtaatgtcctaggctggatgtggtggctcatgcctgtaatcctagcactttggaggctgatgcaggaggattacttgagcccaggagttcaaggtcagcctgggcaacatagcgagatcctgtctctacaaaaaaaaaatttttaagttagctgggcatggtggcacacacctatagtcccagctagtcaggaggctaagttgggaggattacttgagcccgggaggtcaaggctgcagtgagttgtgatttcaccactgcactccagcctgagtgacagacagagactctgtctcaaaaaacaaaaacataaacaaaaaacagtaatgtcctaggccttcacattcactcaccactcactcactaacttgcccagagcaacttccagttctgcaagctccattcatggtgactgccctatgcaggtgtaccattttaaatctccctttttttttttttttttttttgagacagggtctccctttgtcacccaggctggagtgcagtggtgtgatctcagctccctgcaacctccgcctcatgggttcaagcaattctcctgcctcaacctcccgagtagctgggattacaggtgcgcgccaccacgtgcagctaatttttagtagagacagggttacaccatgttggccaggctggtttccaactcctggcctcaagtgatccacccacctcagtctcccaaagttgtgggattacaggtgtgagccaccgcaccccacttaaatctcttataccatatacttagggtactttgtttagatatgtttagatacacaaataccattgaatgacatttggtgacagtattcaggagagtaacatgctgtccagctttgtggcctagaagcaataggctataccagagagcctgggtgtgtagtaggctacaccatctaagtttgtgtaagtaaacaccatctatgatgtttgcacaatgacaaaatcacctaatgatgcatttctcagaacatatccctgttgctaagcgaagcatgactgtaattaaaatggtttttctcctgctaatctgtcttatgtcaatttaatttgtagcccagccaaagaatctagaagggtagggagaagccattttttcactctgccacagcaccatctgtagcacccagcactatgcctgcacatagcaggcatttagcaaaggctgcaggccaaacgcaggtgagccccgtcacttcataatttttgtttctggcaaaggcctctttacttaaaagaggcctttccctaggcaatgaggacattttctttctgatgcaggccacccttggtgagttggggcattatattcccttcgtcctggggcctgctgtcctctcattaagcagaaactgtaggtcacagatcagtggagttggaaaaaggagtcttgggggagtctcttctgatctccaggcctttcctgactatcaatctttcaccctgttcccaaatgtgaaaccaccacacagaagcacagtatgtaagagagagagagagagagagagagagagtgtgtgtgtgtgtgtgtgtgtgtgcgcgtgcgtgtgcgtgtgagagagagagagagagagagagaaagggttcacttccaggacagctcaagccccattaaagcttgctatcacaggtcatgccgggtgcagtctgtaatcccaacacttcgggaagccaaggcaggagaatcatttgagctcaggagtttgagaccatcctgggcaacatatcaaaaccccatctctataataataataataataataataataataataataattattattattattattattagccaggtgtggtggcacatgcctgtggtcccagctacttgggaggctgaggtgggaagatcgcttgagcccaggaggtagaggctgcagtgagctgtgatcatctaggcacttcagcctagatgacagagcaagattctgtctcaaaaacaaacacacaaacaaaaaaaacaacttgcaatcacacagtgtagtggaagggaccctaggctactcaccttgaatcaaaaaacctagagttggctgggcgtggtggctcatgcctgtaatcctagcactttgggaggcagaggcaggcagatcacctgaggtcaggagttcaagaccagcctggccaacatggggaaacccagtctatacaaaaatacaaaaattagccaggtgtgatggcaggcacctgtaatcccagctactcaggaggctgaggcaggagaacggcttgaacccaggaggcagaggttgcagtgagctgagattgcaccactgcactccagcctaggcaacacagcaagattccgtctcaaaaaaaaaaaaaaaaaaaaaagacggggtgcagtggctcacacctgtaatcctagcactttgggaggccaaggcagccagatcacttgaggtcaggagttcgagaccagcctggccaacatggtgaaaccccttctctactaaaaatacaaaaatgagctggttgtggtggcgtgcacctgtaatcccagctcctcaggaggctgaggcaggagaatcacttgatcacttgagcccgggaggcagcggttgcagtgagccgagatggcgccactgcactccagcctgggtgatagagtgagactccatctcaaaaaaaaacatagagtctaaccccagctacgtgactgctctgtgaccttagttaagtcacatctgctgtctgaggcttggtcccttcctctgtgaaatgaggggatgaagtagatgatttctgagggtgtaactagtaagcgcccctctgatgccttgattcatttcttgaagtgagggacttgagggggtgtgtctgcagcactaccgaggtttagcactaagatacggcttcagagctgtcactcaaataattccctacgactggagggtggtacctggttgtctagtaacctctagggctttgagctaacagcttgggaggtaacccaagccagaggggccattccagagagccagctgcggagaagacccaaggaggtaaggtgtcctgcagtggggatccccacactggatgggggtggtcaggaatgccctggagtggaaggccttgaaaaggcaggatttctgggtgttcttagaagcagggggaatttcttttaaaagagactgcttttcctctgcctgcccctcctaaaaaaggggaaaaaaaggataaaatgggaggggtcaagagcccagggcctgggtcttttccactctttttcccatctcctgggaggagagttcataaaaagcttttgcccttcaaggggaaaaatacaaacaggatatacaagctgctgagatgcttgtattcaggtttaagagggctctggagaccagagcaggaggctgggggcctagaaccagccagcagacagaaagcggaagaaatggagagagagcttccccttgagctagggaaggggcagtaaatgcatgttctgtcccacaccacactccttttcagaaaatccttctctcctggaggttcgctccttgccaattcaggagcctcctcaccctagggtccccagtgcctagtgtggttcctagcacatagcaggggctcactgagtgcttgttgaactgacctgaactacgtcttgagattagatagcaggagtacctagatgatgagtgaggggggtgtctgtggaggcacagtgtgaaggaagttatggaggagaggccctgcatatgcggttccttcatctatttatttgcagctttttttgagacagagtttctctgtcacccaggctggagtgcaatggcgcgatctcagctcactgcaacctccacctcccgggttcaagcaattctcctgcctcagcctcccgagtagctgggattacaggcgcccgccaccacgcccggctaatttttgtatttttagtagagacggggttttaccatgttggccaggctggtctctatctcttgacctcgtgatctgcccacctcagcctcccaaaatgctgggattactggtgtgagccatcgcacctggcctatttgttcaatccaaaaacactcgtatggtggtaacatatacataacatacaatttaccattttaaccattttaaaatgtgcagttcagtggcattaagtacactcacattattgtgcaattaacaccactatccatctccagaactttttcatctcctttcataaacatttattgagaatctactgtgtgccagaccctgcaagttgctccaaatctagtagtggggggaagacaataaagtcatcagctctgacccagtgtgataaatgctataaaagacataggcatcaagtgctatgggaccacaggagtacccagttggttgagaagaaggtgcgttctgaagtaagctgttacttgacttgagtcttgaaggaggactaagaattagtcaggaagttagagtgagagtggatatggtgcccaatgggacagaagaaacaaagtgagagatcagagagcaatccttgaaaccctgagggtcatgctagggcaggggtagagctgaattgccctaagggggtcctgctatctagaggaagccaaggctgacatactgagccctctgttcccctttgtcagccctatgtcttcccccaaccctgaggatgtgccccggaggccagaacctgagccctcaagctccaataagaaaaagaagaaaagaaagtggctgcggcaagaagccagcatccaagccctcaccagggctggccatggggcccttcaggctggccagaaccatgaagccttgaacaacttccagagggccttccttctggcctccaaggccccacaaaccagggatacccctgtgctccaggcctgcgccttcaacctgggggctgcctatgtggagactggggacccagccagaggccttgagctactcctgcgagcccaccctgaagagaaggcacagggcaggcgacacggcgaccaatgtttcaatgtggctttggcctaccatgccctcggcgagctgcctcaagctttggcctggtaccacagggccctgggccactaccagccacagggtgaccagggagaagcctgggcaaaaatgggagcctgctaccaggctctgggacagcctgagctagcagcccactgcctgcaggaagcaagccaggcctatgctcaagagagacagctgcgggccgcagccctggcactgggggctgcggcaggatgtatgctgaagagtgggcggcatcgggtgggggaagttgtgcaggtgctggagaaaagccggaggcttgccgagaggagcactgagaggcgactgctgggtgagaccttcgggcagggaaggcatgggatctggggagacacagagcctgatgatactcagagggctgggtttggggaaccctggaggagtcgataggggctgtaccagcctcatttatatctggtctggctaccagtgaccctggctattccctctagggcacctctataacgatctaggcctgggctactcccagctccagctgttcccgctggccgtggaggccttcctgcaggccctgcccctgtgctgggtgccaggagagcaggccacagtgctaagaaacctcgggatggcccacaatgccctcggcaactatcaggaagctcgggagtttcaccagaaggctgctgacctacacggtgggtgcctggggccggggaatgggactgggactaagacactaagaaggggttccaaaaggggcccaaggcttaagggtggatggccctttgggaccacttatggagcctgaaaatccagaaccagtgggggagagctggaagtgcaggagatgggacagccagacagg

SEQ ID NO: 460 - DNA, 81859 bp, Homo sapiens
gactgtctctcaatttggtatgtctaaaatttcttcaggattagattcaagttatccttttcggggcaggaatacaacagaggtaatactgtgtccttctcagtgtatcgcatcaggaggtacagatgttaatttatcccatcactggtgattaacttggattacaagattgtgtctgccaagtttctctgctgtaaaattacaatgtttccccttttgttaaatgtcttgtggggatacttcacatacttgagagtatgcaaatatattgttttccatcaaattttcacctgctaatttaagcttccctcaatgatccttttgcaagacttacaaaaatttttttaattaatctttttttctgagacatggtctcactattgcccaggctggagtacagtgacaccatcttagctcaccgcagccctagacaacttgggctcaagcaatcctcccatcttagtctcccaagtagctgggactacaggtgtgtgctactgtgtctggctatttatttatttattttgagagggaatttcactcttgttacccaggctagagtgcaatggcgcagtcttggctcactgcaacctccacctcctgggctcaagcgattcttctgcctcagcctcccaagtagctgggattacaggcatgcaccgccatgccctgctaatttttgtatttttagtagaaacggaatttcaccatgttggccaggctggttttgaactcctgacttcggatgatccgcctgccttggcctcccaaagtgctgggattataggcatgagccaccgcacctggctttatttatgtatttttaaaaactttttgtacagatgggttttcgccatgttgcccaggctggcctctaactcctgagctcaagtgatctgcctgccttggcttcccaaattgttgggattactggtgttagccaccacatccagcccctgcaagacttttaaagcactcctccctccctgttatttccatgtttctctaaaaaggattatcacaaaaaccattagaattaaaagagattaagttagacaagacactaggctgtgaggaaacaagctgtttcatcctttgctcttcggggtacaaagtgccataagtctttgtaggtgctttgtagggaaacatggaaacaccaaaattacaaatgcatgtaccctgtgaatcagacattccacttcaggaaattcatcctacagctacacctgcatgggtttcagcaaggttagctgccatgacctgattcataataacaaaaagttggacaccacttccatctgtaggagactggttaaataaaccaaggcacatccccacaatggaaaactgtgccattgtgtaaaagaatgaggatgctctatatggatgtactgatatggaagggtccttaggataattatgtggggaaaaagcaagctgcagaaagtgtttatagtatgctgtgctttttgtaacacaaagtgaggatgatggggtgaggggtggctagagacaagggtaggagtagacttatcaatatgtaccatcttatttagttttctaatgttgaacatgtcaatgtatcacctattcaatatgtcttgactttatgacacaagggtgtcagtgttgtattcacacagaggcttggggagagaagaggagcagggcaggatgagggcagtggcagcaccaaagaggaacctgaggcaggctgagtgcctggctggtgacaggggagaaaaggagaacgggtctgcaggtggaaagaggtgtttaggtgtgccctgcctgtgaaagtagtttctaatggctgtataatattcagtagtctagaacttaaccattactttagtgttagacattagcctaggtcagactctttaaaagtttgaatatgatttatgatcatataggtgccatcttaataggtgctatttaaaaacactatatatcagggtctatactaaatgcttcccaggcattagcttatataattctctcatcagctctaccagaaagatactaattatgcccagtttacagatgagaacactactatttacaagagttatttgccccaaattgcaaagctagcagagctgagattcaaacctccctctgcttctctcaaagcccttgtgtcccagcacgatagatatgaaagaaatgcccaggacttcccatgttacaacccacagtgtccaactgcttttcatctggttctcctctggatagtctctgtcaaacttgttcacaattccctccaaatccagtgcccagaaatgaacccagggactaccacattttcctttgcctctatctctctctctcccccacccctctctctctatatataatatctatatataatatagatataatatatatacagcctccacagctgggactacagtatgctccaccacacatggctaatttgttttttgtagaatcgaaatcactatgttgcccaggctgctctcgaactcctggtctcaagcgatcttcctgccttagcctcctaaagtgctgggattaaaagcatgagccaccacagtcggcctgtctatccatattttatttgatgcacatcccaaatgagcatactcacaactcagcctgggcattcagcacactagctctttctttttccacaggtcggtctataagccacatgatgaagatgagactgatcctaagccctggaagttatcagcccaggtattccctgcctctcacctcttggacccagcacatttgggaaactgagatcccatgccctggaatgaaagaaacggatctataatcatgtttccggaccgagaagccatgtgcctcattctgtcctatccaacattgccatcagtggtttggaggaagacacagtcaggaaacagtcaagggatagtgggtgcagtgatcatctgctggatcccgggctgcctcgccctctccactatgcttctcctgcaggtctcccaagagttctcattggtctctgggagactttaccaccagcctagtctctggtactcactgcacacagctccccttggcttttattatactatcaaggtttggatgatcccagatccatttcctcttggttcatcttagactgtttagactgggaaagaaaaaaagagcttgtatgctgggcaaactaatttgtgactgtgtgtgtgtttacacacacataggtattctgaaaagtattttttgtgtatatttaaatataataaagatattttaggttgggcatggtggctcatgcttgtaatgatttgggaggctgaggctagaagatggcttgaggccaggagttaagaatagcctgggcagcatagcgagatcccatctttacaaaccatgaaaaaattagccgggtgtggtggcgtgcacctgtagccatagccacttctttttttttttttttttttttttttttgagatgcagtctcgctgttgctcaggctggagtgcagtggggccatctcggctcactgcaggctccgcccccccaggttcacgccattctcctgcctcagcctcccgagtagctgggactacaggcgcccgccacctcgcccggctaattttttgttttttcagtagagacggggtttcaccgtgttcgccaggatggcctcgatctcctgaccttgtgatccgcccgccttggcctcccaaagtgctgggattacaggcgtgagccaccatgcctggccagccatagctacttcttaagtccaggattttgagtctgcagtgagctatgatcacactactgcacgccagccttggcaatagagcaaggccctgtctctaaaaaagaaagaaaaataatttttctttaaattaacgttttcatggaaatttctaatatttctagaactggaaatattagaaagagatagacatcttaagaacttttatcacaaaaaaatcagtttttgaaaaggactccctacttctgtgtggcactgtttttctcaattctgagtgaaaagattggaaggcttgtgctttgctgtgttaggagtaggttcaaggaaccatgaagaggagagaacatagcagttgattaccctctctttttttagtacttccttcaagatcagtgataaaattcctctttccctagccctgcttccagttcagtagtaacttccatgagcaggtaattcagcaggtccatgtccattgcctcataccctgggctgttctgttctttcctttggactcaagaataagaccttggcagggaagagataggacccagcttctgctgtggttactgaataactcaaagcttaacccttccatggaaatttggcaaaacatttagcacaaaaagcagtctccaactcccttgggttcccagtttactaggtgaacatgacattttaattaaggtgaaattaaacttaccaaaataaatcctacattatcatttagcagcatttagctgaggctctcaaggcatctcactggaatttgcccaaatcctcctgttagaaagttcagttttggcttcagggaaaccaaatcaaaacagcaaatatttattgaacatgtcctgttgaatgtaccaagtacttgataaacattcatgtttgaaaaaatccaggtccagagtagttctgctaacttaataacaggaaatatagcactttaaattcctcccaaatagaaagtttagattatcaagtaaggtgaaaaatgcttactcatccagaagaattgacaccttgtatgaacagaaacattggacaaggctattctttggaggctgagcaagagagagttgtgtggggtcaaagcttgttgcttttatattagtttgggaagttgtaggtggtgaaagagaaacagcaaagggaggctgggtgcggtggctcacgcctgtaatcccagcgctttgggtggccgaggcagtcggatcacttgagctcaggagttcgagaccagcctggccaacatggccaaacaccgtcactgtgaacaaaaaagtagccaggcgggtggcgcatgcctgtagtcccagctacttcaggaggctgaggtaggaggattacttgagcctgggaggttgaggctgcaggaaattaagtatgggttaaggagatgcatcactggtgccaggctgacaataggtagacttgtggacttaatttaggtatcaccttgactggataaagggatacctagaaacctgataaagcattattttggatgtgtctgggagggtgtttcccaaggacatttgtgtgtgagtctgagtggactaggtggagaaatctctgagagccgtgacagacttttcttctgctgccttggacattagaacttcaagctcagtggggcacggtggctcacacctgtaatcccagcactttgggaggccgaggggggcggatcacagtatcaagagatttagactatcctggccaacatgctgaaaccccatctctgctaaaaaaaaaaaaaaatacaaaaattagctgggcgtggtggtgtgcgcctctcgtcccagctactcagaaggctgaagcaggagaattgcttgaccccaggagtccgaggttgcagtgagccgagatcgcaccactgcagtccagcctggtgacagaccgagattccgtctcaaaaaaaaaaaaaaaaaaaaaaaaaagaacttcaagctcacaggcctttggactccaggacttaaaccagagactcgccaggtcttgaggctgtcacttccctggttctcaatgtaaaaatgtttaaacttcttcaataaatgaaggggtttttttgtatgtctgtatttatgaaaggtaaaatttctcaagatctcaggttttgggacgactgtatatgcagtggtgacccattgtgtgtgtgtgtgtgtttgaagcagggtctcactctgtcatccagactggagtgcagtggcaaaatcatggctcactgtagcctcaacctcctgggcttaagcaatcctcctgtgtcagcctccccagtagctgggactataggcacaaatcatcatgaccagctaatttttctattttttgtagagacgaggtctccttatgttgccacactggtctctaactcctaggctcaagtgatccagctgcctcagcttctcaaagtgctggaattactgatgtaattctgcactcagcagtgtaaaactgcactcagctcattgtagtttttgattgatttcatcaactcttggagttgtctgccactatatttcatatgactgcgattataatgctgggtacaataaccaaccacagtaatatgcatttatacattttgctttttgacctacttataaatatggtttgtctgctcttaactgttacatccatgtgactgttattatatccgtgtttgttaaatacaaatgtatcattgcctattttattatgtaaattggcctatgaagtattgtctttttttttttttttctttttgagacagggtctcagtctgtcgcccaggctggtgtgcagtggtgtgacgatgtgatcatagctcactgcagtttctatttcctgggctcaagtgatcctctcgcctcagccacctgagtggctgggactacagggatgcaccacactatggtttagtagacacaggtcttattgttgcccaggctgtcgtgttttcctgtttctcaaataaatcttttattatttttttttttgagatggagtctcgctctgtcgcccaggctggagtgcaatggcaagatctcggctcactgcaacctctgcctcccgagtcaagcgattctcctgcctcagcctcctgagtagccaggactacaggaatgtgccactatgcccggctaattttgtatttttagtagagatggggtttcgccaagttggccaggctggtctcaaactcctgacctcaggtgatccgcccgcctcagcctcccaaggtgctgggattttaggcgtgcgccaccgcgcctggccctaaatctccttttaaaaatttaaatagggccaggtgcggtggctcacgcctgtaatcccagcacgttgggaggccgaggcgggcggatcacgaggtcaagagattgagagcatcctggccaacatggtgaaaccccgtctctactaaaaatacaaaaattagccgggggtgatggcacgtgctccgggaggctgaggcaggaaaactgcttgaacccgggaggtggaggttgcagtgagccgagatcacaatactgcactccagcctgggtgaaagagccaagctccgtctcgaggaaaaaaaaaaaaaagtaaatgccttttaaagaatttacatttttttccccaaaattataactttggaacttttgtctttcagaatttcaatatttggggttgtcttttgggattatgatcagctcccaagaagcacaaatctggtcccttcattccactgcttactacccttctttgcattccgtttactttcagaataaaatccaaacacttaagcacggtccacaggcttccatgatctatccggctgtgcatctcaagccactgtgtcactccttttcctctagtcttaatgaactccttccagtttccacacctcaggctctttcttcccttagagaattcacacgttctattttctctgaccaagcctcttgtctcccacacacctttctcccgctcccccatgatttttcaagttttatcttcaatgcaacttcctcaggaaagcctgaccagccaggcaaggttaagtcttccttggataccatctcactgctccttgctcttctgaggacaagtatggttgaaaaattctttggtaattctgtttagtgttttgtcaagttccagaattaaagttcattgcgggtggaggcagtattttctaactctttgtcctctaccgggctgtgcatatgggaagtactcaatacatttctttagtaaatactcaatgggtattcagtgggtatttgacaagtccactttttatatggtaggtgttccaaataagggtggcagccatttactgaatgagtcatcttgctggagggcaaaggggtttactaattgatcactgaagattagctggttattgggattgaagcactaatgggcataaaaaccaaatttctattggtatttttgtttcagcccaagaggtcagaatgtaccctattgcttgtgagcagggtaggcctaggtaggtgattaagatgacagggctagttttgtaattcccagtccagaatttataatcattcagggatggctgcagcagttaccactcctcataccctaagctttctttactatggtcccttcccttgaggtcagatataccaatggacacctaatcgctaattgttggtaggagaagtaaataaccttcactggtaatgtgcattattgattttttttttttttggagacggagtttcactctttgttgcccaggctggggtgcagtggtgttagctcaccgcaacttctacctcccgagttcaagcgattttcctgcctcagcctcccgagcagctgggattacaggtggccaccaccatgcccggctaatttttttttttttttttttttttttttagtagagatggggtttcatcatgttggccaggctggtctcaaactcctggcctcaggtgatctgcctgcctcggcctcccaaagtgctgggattacaaggtgtgagccaccgtgcgtggctgcattatttactttttaaaaatatttagttcctactttaaaggaaattgcagctattgtgttatccatctttattaaaaaaatggattttttacataatcatgtttcacaatgaacgaaaatgccattccttggtatcatctaatgcccaatacttaatcaaattttcctgtatacaaaagtcttttgtgtatttggtttgctaaaatcacctatgctgcatttgatttttgtacttcttacatttcttttaatctagaataatagagtctcattccattgcccaggctggtgtagtggtgcgatcaagcatcatagctcattgtagctttgatctcctggactttagcaatcctcccgcctcagcctcctgagtagctgggactacacacacgagccaccacacccaacctcctcccttttcttcttcatgccattgaggtgttgactaacgtatggtctctattagacaaacttacttatatccactaacttcgaggaatgactaatgggtggggatttcaggacaatcagaagtcagcaagaatgggaagacaaggctgggcatagtggctcatgcctgtaatcccagcactttgggaggctgaggcgggcagatcgcttgacatcaggagtttgagaccagcctggccaacatggtgaaaccccatctctactaaaaatgtaaaaattagctgggcatggtggcgcaggcctatattctcagctacttgggaggctgaggcaagagaattgcttgaactggggaggcagaggctgcagtgagctgagattgtgcccctgcactccagcctggacaacagagcaagacaccatctcaaaaaaaaaaaaaaaaaatggaaagacaaaaaaacattttgcatcaggaagttaccatgacaagtccttttcacttaagcataaagatggtcctaattttcagaagcgccataaaaaccgagacactggatgttagccattgaatctcattgaattgatgctagtatctcagaaccactaccctcactcctaatgtgcaatcactgtgtgacaaatgaaggaatatgactgtagcttatttaagattggactaattcctgtgatgtccacacaaaattggctactccaagtatgtgtttgctcatgcagattagccatttctttatttttcacctaaaaaagccccctccattaaaaacgtgtaagaaagtaatctcaagattagaataagatggcacacactcatttacaaaatacacacgttcctcattaatttatcatttaatataaatgctgacagaaagcagataaagaccttgtagacattttcatatatttacaatccaaaaggtgaatcacctccttctacttgttaaaataaatcattttatctgcaactcatgggagccttaaacactaattaggagcaacatgaggctgagtcagtttccaaggtaataaaggaaatagcattttaacaaaatgggcatctttgatataaacatgcacacaaataatacaaaattgagaaagatggccctagtactctcaaaaatcggcaacaagtgggaacatgtacttatttagacccagagttctgctgccctaaacatcttcctactactatttctttttttccaccacacttgttttgaaagctgcttaaaaatcagaaatattaaacagattaaaaacaagagaaaaacggtctatttcaaatagggttctttttcctactccaaaagaactctcaggagataaggtcttcaaataagacttcacggtttgccagatcctaaggaattattcacagcctgtgaaattccaatccatttgtcttcaccattccaacctatttgtcttcacttctctttttaaagttggaaacacttggaaaaagtaaaatttcacaaaattcagcaattaaaaaatcagctgtcactttaaggctcaatttttttttttcctgaacaggggggtggaggcaggcaagaaagaatagggagctgtggcaataaaaaaacaaaaaaatgcaagaaaactttaaaaaatggtaagtctaccactgatttataagagcaggagtataaattctatccaaaagtgtaagtgatttcacttacaacctgactcaaatctcatgggctcctttattaaccaagattatttttgtcttgttaaatatacctctgcagggcacaatcacttacaatcaatacgattggtaaattacacaagctctatcccaagcaaatatgcaccaatgttaaaaagttatttttttaaaaaaaacaaaataaaacaaaataaaatccacccaaaaaggtgataatgactgcagaatgtctcggggagactgatatgagcctaaagaccaaattaccatagtcagagaaaaagggcagaaggggtaacaaggggaagacaccacaaacacgaagaggaatctcaaaactggaaaatgtttaagtgggtgaaaggttttgttcattaccttaattcactttttccattgttcttgtaccaaaaagtcatagattaatcataaagaaagataatgagacctgtggactaattaatttttttaaaaaagttccttttattcccaggaagcagggaagaggaaaaaggatgaacaggggagaagtgtgaaaatttaggccaacgatccatctggaaaaaataactctcaagacagtgtcttagttgaatagaggatgtaaaaacgataagcaaaagctaaatgcctttaagtcagagaattattttatggggtagttcagatattataagaatgacagccaatcaatggagaaagattacacaaataaatggtgattaaaaaaaggcaaataataataataataataatagagcaaccaattattcacccaatagtttgtttccaatctttttcttgactctttcatacactcactggggtgggggaccacctgacagtttccagttataagatgactctgagtgtacaacctaaaatggatgccaaagacttgtgagctctgtctgcttagagttagaacagaaacaaaaacaaatctgaaacagtaagacctcaatacaagaaaacaagtcaccttatctagtataaaataaacattaggataacaaactccacaggattttatttttctaaatacacatttttggacacgatattatgttgaggtttaagttcttcccccttattgtgccttattttcttgtgaaaataaagttcgttctctagggatgtttcagggataaagtttaggagaaattcagtgtttggctgaaaatccagaggctctgaaaacaaggattccagtggtgaggtaagtccctttattacaataagatttcaaagggctctttacccactttgttcagtgcagtattgaaaacatacctattaggaatagatttattattaaaaggtgttacttattcctggtggtgatagtcttactctttattaacactatagctagtattacttatcaattataatctattacttgtggaaagatctttagtgaacacagaaataaaatcttaaaaattcaaatcttaagatttacttgctacaattaatagtaccttttgacaaaaacagctttcttcttgaagtggctcagaaaagctaaattgagaaaatgtttaatagtaactataatcaacctacaactcccaataagtcatttcagcaggaaaatttcataaacctgagctgaagcaacaaataaatataaaaatcatagctgtccaaggtagaaaggtatgaatgtggatcagcaaaatgggcactcaggtaaaatgatgacagtagtagactgcttgcttgtttaggtgctaatgatgaaagtaaaatttgctttagtttagtaggtctaatttttcttaaaaggataggcagatttttcaggggaagagatcaccttgcaacactgtaaccatatcatcagttaaaaatttaacacacttagactcttattagggggaaaaaatctaagtaaacactgcagttaatttccaggtaggttattaatctctcctaaaaagtaactgggccattcctttcaatgacatataaatcgttacaggtgctttttacagatagattttacaaataaaacctttactcaattatttaaaacgagcaaaaagagagtagaaaaatggtgagactgctacccaccaccatttgtatgtaagtgacagcaactgaatacttctttactgagacgaatccttttttttagtgaaagtattttgtcttgaattttaacaatctgtacatgtactgactatagttagttatttctcaccagtcacatactcaagaattcttttactcagacccatgacttgaccacagtgatagcagaagctggggtgggcacaaatgcttatacacaatattacaaaagacgacattcactggcttagagaaactgatgaattttcattacttttacattttataaggctagctaactttaacagttaactttagataaatctacttacacagtacaatcaactcacaaatactaaaaggtttcatgatcaaaatggctactacttcccccaaaaccaaaacagagtaaagcacaagtctttggctctcctttaaagaaaacagcaggttaccattcttaaccagacctttgtttgcctaccagtagggcaaataccacatttgtgcatcactgagtaataacaccattagaaaaggcaacttcacagaagttattggctaagcgaattcatttgaatgctctgttttgaggcagcaaactgtcactgttgcagattggggagggcagtgggtaagtcaaggggaaattacagggtggaaaaaggtcaagaaaaaaaaagacatatatggaaaaatgtaaactttgagctccatccctgaagaactctggaaagtctgatggagttatatactcaaagtagcaaatgagaatcataccaatattcttttaggcaaaagaaatacatgggaaagaatagaagggaagggaaataagatgggagaaaggaatcaccaacattaatgctgtaccaaacaattttttaaatacattctgagtagttgaatatttgtagttggcattaggaataatgtcttatcaatatctagaatactactactagaaatctagctaactcttcttttaattagaaaagtaataaggaatggatctttggtcacttcagcctctgtacgttatctaagacaggacagttactggacttatcttatgacaaaattatatataaattaggcaaaagagctacatataaaccagaaatggaatctagatgtcttattctcagttcttctaccctttcctagcgactccttgaaaaaagagtaagtcaaaatacttttatatttctcgctataaataaaattccctcacctatgtatgagtgaacacaatgcttattactcctaccttaacccattcaaaattgttcatctcagatatctgatttttgctttggaatttagtgaaatacaaataaagtaatatttagaagaaactaatattttagtaagtagaaaacataaaaactgtatttcctatctggtttcatctttgtctctaaaaaaaaaaattaaaaagccagaagcaattaataccttttcaattttgattttaaaaaagtagttacagagtcaagcagttatgcccaaatatgccatttgtccttacaggctcatgatatcacagagaaaaggaaaaggaaaaaaagcaaaaaacaaaaaacaaattttgggggtgttagtgaattcctaaaaccgctgatgagcactaggaaagctgcaagaatttccattaggtaaggtggaatgaccaatttaaaatacattataggcacaatgggacaatataccatccttctgcctttctgcccaaccagattagctctagagtgtaggaccatggaggggtacagcttgaattcaggttacaattaaagagattttttttcccccaaatgaaaatacatgaaaagagaaagatactattttaagtcaagtttatacagtgacttttctggttttgttcagaacaggaatactgtataaattaatccctgctcctgcctacttcacagaatcaaaatggcaaaagccaagaacaagtgtatttaaaggaaatgagaacaagaataacagaaactgagttactaaggggtttcaactgatatccaaaatgaatctttacttttattttaaacttaaacaaaaattaatacccacaaattatcttctaatacaagaatcattctgaattccaaagtgaatcaactgcttctaaaatttaggatgatctgacatacccaaaggagaagatcagtccaaatctgcttataagaaggttgtagtacaaaaattagctggacgtggtggcgcgtgcctgtagtcccagctactcaggaggctgaggcaggagaatcgcttgaacccgggaggtggaggttgtagcgagccgagatcaacccactgcactccagcctgggcaacagaagcagactccctctccaaaaaaaaaaaaaaaaaaaaaaaaagaaggttggaggccaataatgttgccttttactgttatgcagagaaatgaaaaatcttgggactctgtcagacatacaaaagtttctttccttctcccaataaacaataggcatttaaagtggaaatgtaaaagggttttaagtaaaagtcaaaaagcaaacaaaagccaaaaaaaaaagaaaaagcatacatatatatatatatatatatatatatatatatttttttttttttttttaaaaaaagaagacaaatgtataagaaaactggaaaaaaaaaaagcctcaccttcattcagtgcttctaccacctcccaatcggtcaatttatcgcaacagctgcgctcatgcgaaaaaatccttaaaacatacccaatatatatacagatatagctatgtatatatgtatatatataatatatatataaatttttatttaaataaaaaagaaagctcgaatcccaagccaatatgtgtatatcaaatccttgaccagccaggtctgtagggcataatcaaattcaatgtgaaatagtatataaacacggtgccttgactgggcaaattaaataattgctactcaaaagagtgttctgtttggactctcctactggtaggcaatggcaggactgtattacccttcccacccccaccacccatttgtttaagttaacagtatgatggacacagagcttagactgaggttgttatgacctcagcaggagttaagggttaagaaaataagaaacaagaaaaatataaactcttgtttttactcaaccaaagcaatgtagtaacttattacataaccagtgctttctaatttagtagtaaaatacagaaagggaaactgaaaaaaatcaggcaaatagaggaatggagagggcaactatatcaaacagtccccactaaacacgttttatagggtcttagttaattaagcacagacacatggcatcagaatatgtgcagcagaattaaaaaaaaaaaaaaccttactcttttcaatattttcatgaagaaacatttgcaacattggacagttaagtctatgaaaaatgacttcaaactatttcctacctacttatactaatgattctgagcaacaagtgatcaattcataaactatccttaagactcaatcagttcacaagtaaaacaaaacatccattaaaataatgtggctctattcattttaagttcaaatcaaatgttgcagttttaaaacatagttgattgtccttgttttttagcatcctatgatgtcagcaaaagtttaatttgaaaagcactgcttcaaatttccaaccatgagctgaacgcaggcgaaacaccaaacatgtattttcagtgctagtaagttacagttaattcttgatcaacatttaaatctaattaaacactgaatcagctttctgattatattaagagaatgcaaatgatccttaatatgaaaatgaggacttcaaaattggtaattctatttgaaaagttgaaaataaaaacaagaaataaaaccctcccaaacaaacaaaaagcttcaatgtcaagaaaaatatacgtatccaatgaagctagtgatctagaaagggataaagaattccaaataacagctctgggaaaagttggtttgctgcacattttctaataactcagtctagtactgtctgtttctcaagcaccacagaattctctgaaagctgacatttttggtctgttttaagtttatggggtggtgagaattgataaggattgggggtgaggaattatacaaattatacactgggtatgtaataccaaaatacaagaaaacctacttcattaagatcatacaattaatcaaacagagtgtatatataatatcttttttttttaaagccctggatccaaggcgtccaaagttattaaaataaagttcattcacagaacaaaaacaaatttaatctgaattgcttgcagatactgctaattttctttttctttaaattaaaaaaatgcattaatgtgaactatgtgcagggtttgtttttagtagtggtgtttgtgcacattgcctctggtgaatttcctggatttctctgaccgctcttaagagaaaaagtttagaagttatgcgttctcctacccctatgcccgacaaactgattaggagcagaagataaaagtaggactcctcatattttaaggagcagaactgggagtaactcctgatctctgggagtcattattatcccctcctccctcagggtcctctgacaggttcagagagctggtcttgtttgataggaggctgatattctcttgtgtcaaggctgatccatttggtacatcactgctgacattttaaaattttgaaaaaggagagagagaaaaatgattactacaataaaatcaacaggggatataatttagcatgattgaaaatatataaatggcttccacattttaatctacagccccttatccatgttttagcacacagttggcaaactaaagctagccaggtgcgtattttttttttcaggtgcatatttttgtaactaaagttttattggaatatagcctggtcatttgtttaacgtattatccactgctttcaaaccacagagcagagttgagaattgcgacaaaaactgtaaggcccgtatcttaaaatacttactacctggcctttaagaagagtacttatccctgatttagcaggtttgctactacaagaaataattttgagctcatgcctataatcccagcactttcggaggccaaggcaggtggatcacttgagctcaggagttggagatcagcctggccaacatggtgaaaccctgtctctactaaaaatacaaaaattagcctggtggtgtgtgcctgtaaaaacctactagggaggcagaggcacaagaatcacttgaacctgagaggcagaggtttcactgagccaagatcgcaccactacactccagcctgggtgacagaatgagattttatcaaaaaaaaaaaaaaaaaaaaaaaaaaagccaggcatggtggctcatgcctgtaatcccagcactttgggaggccgaggcgggtggatcatgaggtcaggagtttgaaaccagcctggctaagacactgaaaccccgtctctattaaaaatgcaaaaactagccgggtgtggtggcacgcgcctgtagtcccagctactcgggaggctgaggcaggagaatcacttaaatccaggaggcggaagttgcagtgagccgagatcatgccattgcactccagcctgggtgacggagtgagactccatctcaaaaaaaaaataaaaaagaatccaagatagtgcatgaattaaaaaaacagtcaaaatccaagtctgaaagcattagaaatttttgttatatatcatcaggggggcaacttaggactatgcattcaaaagcctcaaaatagccttagaaaataatttaagatatgcaaacaaagcattaattgtaatactgtttattgtagggttgttcatggtagttgatatgtatctttccgtatctacagaataatactggatgatataggatagactgaattaaaaaccagggagatggagtgctgggtttgtaaaactagcaagaggctaaatgcccacacactttaaaaagactggaaagagccgggtgcggtggctcatacctgtaatcccagcactttgggaggccgaggcaggtggatcacctgaggtcgggagtttcagaccagcctgaccaacatggagaaaccctgtctctactaaaaatacaaaattagccaggcatggtggtgcatgcctataatcccagctactcgagaggctaaggcaggagaatcgcttgaacccaggaggcggaggttgccgtgagccgagatcgtgccattgcactccagcctgggcaacaagagtgaagctccgtctcaaaaaaaaaactggaaagataatataatacaccaaaatgttaacaagagttatctctgaatattggaattacaggcaattttaaaatttgcccttttctaaaattttccatttcctaaagctaattttttataatatatttaagatgggggagtgactttattttttgttttttctttttttttacattgagcatatagtatttttataatgtaaagatataaggctgtattcgaaataaatttaaaaacaaggggaagatggaaacataaccagaaattttcctttgttaggtattaacagataattcaaccttggatctaagttttgtaactccagatttatgcaaaaatattctttttttttttttgagaccgtgtctcactctgctgccaggctggagtacagtggcacgatcttggctcactgcaacctcctcctcccaggttcaagtgatcctcctgcctcagcctcccgagtagctgggactacaggcacatgccaccacaccaaactaatctttgtatttttagtagagacggggtttcaccatgctggccaggatggtctccatctcttgacctcgtgatctgcccacctcggcttcccaaaatgctggattacaggcgtgagccactgcgcccggccgcaaaaatattctttatgtacacagaataatgatattttaagaatcaaattatatttatgagggtatttctgatatgactggataatatattagtttctcttttgtgtgtaatttaatatggctacgacaatctccttttctttacctgaatgtcaatgtaaggtcctcagccggaaccttgttttgtggttctggttgtccattttctgcttgtttacttgtattcagtttgcttttcatgtccagagaacactggttttcctttgaaagagaaggaaataaaatcagttatcatctatttaatggtgttaatgggagagaccaaattacagataatacaaagtgatgatccagaaatcatattcaattttgtaaaataaccaaagaaactggcagactaaaagagtgacatacataaaaacataacagaatacaatccacttgctcactaaccaagctggacaataagacagacaatgcctcaagctaacatgaaaaaaaatttctcagaaaaaaacaatgacctagaaaggcggccaggcatggcggctcacgcctgtaataccagcagtttagggggctgaggcaggtggactgctgaggtcagtttgagaccagcctggccaacatggcgaaaccccgtctctactaaaaatacaaaaatcagctgggcgtggtggcacacgcctgtaatcccagctactcaagaggctgagggggagaatcacttgaacccagaagacggaggttgcagtgagctgagattgcaccactgcactccccacctgggtgacagagtgagactccctctcaaaaaaaggaaaaaaaaaaaaaaaaggctaggcatggtggctcacaccagtaatcccagcactttgggaggctgaggtgggcgtatcacccgaggtcaggagtttgagatcagcctggccaacaaggcgaaaccccgtctctactaaaaatataaaaaaaattggctgggtgtggtggcaggtgcctgtaatcctggctacttgggaggctgaggcagaagaatcacttgaacccaggaggcagaggttgcagcgagctgagatcgtgccactgcacaccagcctgggcaatagtgcgagactccgcctcaaaaaaaaaaaactaaaaaaaaaataaaatacaaaacaaaaactaccctggtgtggtggcaggcacctgtaatcccagctactcgggagactgaggcaggagaatcactggaacatgggaggcggaggttgcagtgagctgaggttgggccactgccctccaccctgggtgacagagactcagtctcaaaaaaaaaaaaaaaaaaaaaagaaaagaaaaccaaagtacaataaatatctttaacatacttactgaaagcaaaaaaaacctgcatgctcaatttatttgcttagaaagattatgaaaactggctgggcgtggtggctcacacctgtaatcccagcactttgggaggctgaggcgggcggatcacgaggtcaggagatcgagaccatcctggctaacacggtgaaaccccgtctctactaaaaatacaaaaaattagccaggcgaggtggcaggcgcctagtcccagctacttgggaggctgaggtaggagaatggcgtgaacccgggaggcagagcttgcaatgagccgagatcgcaccactgcactccagcctgggcgacagagactccgcctcaaaaaaaaaaagaaagattatgaaaactaagcaacaaaaaaaatcatatcatgcaacctgaggaagcccctaagattcaaaatttactaaaatgaatgtctgtgcactatgaagcaaatcctaagcatattaatggatatagtttttcctaagcatacataatggatacaggaaacaatgtgcagattgcatatcactcatagcaaaaataggtcatcattataaaggctatgaaactagaatgttatttggtgaatacatctttatataacatgttgtcattgcaaaatagtaaacaccatcctatttgcttccctaatcagtatgctaaacagaaatttaagacttccattaagttcttaaattacagaagcattaaaaccttgttttccctaaaagttaacgaagaattataagacaaagaacacacccaaaccaagagaatgaggaagggaatgataaaatcggaaggtagcccacctgcatgagaattattttaaatattaaccactcatcagagtgccttgaagtgatgattctgtgcctctagataattctagagccacatgaaagatttcatttcaccttccctctctttccccaccataacactcaccatactcagttcccgtgttctcttcccgatttccctttccacctggtgcagttccaagctcaactgctcacttgagatcatcccaggccattttggaggtggcggtggtgggggctgtgactggcctgccagggtgtttgcctccctctgcaacaccagcctgttactaacagcctagtgcataaagccaagcacacagaaaactcaacacacttcacaccatgcacagaataaccaggctcaattccagaccacagccttgagtagcttatcacccagccatttgcaacaaaataatgcaactgtaaggtgctgttctctttgagtaccattcaaacaaaaaaataacaaaatagggacatttaaatttagtaaacagtaatttcatcttatgtataaattgctccttgtattttctgatttgaaagagaagttggctacgcatggtggcttgtgcctttaattctagcactttgggaagctgaggtgggaggatcacttgaggccaggaatttgagatccacctgggcaatatatcaagacctcgcctctacaaaaaataaaaaataaaaaaaccaaaaaattagcctgggatggtggtgtgggcccgtagtcctagctactagggaggatcacttgagcccaggagtttaagattacagcgagctgctatgatcatgccactgcactccatgcactccagcctgggcaacagagtgagactttgtctctcaaaaaaaaaaaaaaaaaaggaaatggaagaaaaacaagtcaactacagatgtgcatctttccccctctgtttttaatggtaattttctctgaagtaaatcctataacttatttcaatgaaacctcagtaatggcaaggacttttaactgtactgagttaaatatgtggcaagtttctaaataatactgatagtctttttggacagaaaatgctcctggaaactttaaaacaaaaaatcatgcatgtggtggggggaaagcggagggatagcattaggagatatacctaatgtaaatgacgagttaatgggtgcagcacaccaacatggcacatgtataccacatgtaacaaacctgcacgttgtgcacatgtaccctagaacttaaagtatataaaacaaacaaacaaacaaacaaaaaaccatgcatttgaagatatggagtaatgccttattgggttgaaggtctgaatctttaaaaagttaatgaacgaaagattgccataagcaaacatggcattctgtttctatgacaggaatcggcaagacgttctgaatcaatgtaaataagcaatggcgaaagcagacaaaatctaagtattacatagatttttaaaattcctaaatctaattgcgtacataggggcacaagccagctatatgttccaaaaacaatctcctactggtcttcctaaaaagaaagtctactaagaaagtctgtcttataactttttttcccccctaaagtgatggcttacttattattaaagattatggtagaaagacagactaatgttctaacagtaccattttttcctccagaaaggacaatatatttatcattagaatgtcttcagttttccatattcaaagaatatgttccaacgtaaaggatgatgtataaacaaaacctagtcttccttatgtggcacttaaaagattttaaaaattccttttttttttttttttgagacagagtctcactctgtcactcaggctggagtgcagtggcaccatcagggctcactgcagcctcaacctccctgggctcaggtgatcctcctgccttcagcctcctgagtagctgagactacaggcgtgcactaccatgcctggccaatttttgcactttttgtagtgaagggattttgccatgttgcccaggctggtctcaaactcctgagctcaagcaatccatctgctctggcctcccaaagtgctgggattacaagcatgaaccaccacgtccagccagattttaaaaattctttagttttgtttttctaagtgtcaggcagcatgatggaaagaacactgaatctggagtatgaagacttgggttcgtgtttcaacttctgagaaactcatatacttcaatcaaaaaaggaggacaataccacctgcctaaaatatcagggatattctaagggtcaaataagataagtggtagtgatttttaaatggtacagaactacgtaaatgaaaagtgttattattcttattacaccggaactatgttttactttttaagtcaaagttctgtttttttttttgagacggagtctcacactgtagcctgggctggagtgcaatggcgcaatcttggctcactgcaacctctgcttcctgggttcacacgattctcctgcctcagcctcctgattagctgggattacaggtgcacaccaccatgcccggctaattttttgtatttttagtagacacggggtttcactatgttggccagactgttctcaaactcctgatcttgtgatccacttgcctcggcctcccaaagtgctgggattacaggggtgaaaccctatctctactaaaaatacaaaaaattcgctgagtatggtggtgtacatctataaccccaaccactcaggaggctgaggcaggagaattgcatgaacccaggaggtggaggttgcagtgagttgagatcacgccacctcactccagcctgggcaacagagcaatactgtctcaaaaaaagaaaaccaaaacaaacaaacaaacaaacaaacaaaaaaaaccttaaatgtgccatcagggaatataagctcctgttgggaaattttacgtaatctgttttctatttttaggtagcagaaattttacgttttctgttgtcccagagctaaatccagtattgaattctttgaagaatagaaacctatactaactcctaagaaatagaccttaaagttttttgttcacagtgcctcaaaagttcctatttaaaatctctgagaacccttcaaaaattggaataaaatggctctctaggctggtacctctagtccacgtagctgggtctgctggctaatctgatggttcaattgctgcaattctagtcgtagctgttctctctcagcagatggaaggggttttccatgactggccacttctgacatagatattctctccctttggttagaaagaaagtgtgaatcaaattttaacatttcattttgttaacatattactgaccagaaaaacaaaaagaagttgcctaattttaaaggtttctacatgtttgttcaagtaaaaagaatgactcatacctctcactgaagtgtccctgagaaggtatgttttgatgaggtgaatatggagaagctccccagccaccgtgggttccatatggactataatctgtaagagaatgatttattatggtataattcacagatttgattcttcttttaaggtattcataatctgaaagacatcagcgtattgcatacacaggtatctggtatctaccctaaatgtccagatttttaaaattctttaactttgtttttctaaatatcaggcagcatgatgctgggtgctgatatatgtttgtttcttccccaatgaactttcagtctttgtagtttttcttccaaattactgtataatgagaatgttattcccccaaataacaattaagctatttggggtgggggtggagtggggaagaaacattaggaaagcttcacatatagacatttaatttcagtttatatacctaaaattctctgggttatattacctttcttacagggatgattccatggaaagtttgaaaattactgccttgcaagattactaaaaacactgatagtaaatggagagcaggggtaatgctgaaagtcaagattatgaaccctttaggtcagcttacctctgagattcttacctgaaatgttaatagattttgtaggagctccctgaggtgccatagcctgcattggaccagcaccctgatatatagttttggaagttcgtgagatggcaccaaaccgagacactgttggtcggtctccaaatgggatgaggtcatcatcactggtttctgctgctcttctctgaagatctaatcgctggtccctcattcctttactctccacattctgataaaaaagcaaaatgagaaattaccccacactcagatcgctctgtaacctaattttttctagatctgtaataaggttaaagaagagtacagcactcttactggtaagactaaaatcattagttacctttggttgtttttatgtaacactggtttttaaacctctgaggtgaggggcgacagggtctcacaccgtggcccaggctggaacgtaggggcactctcatggctcactgcatcctcaacctcctgggctccagtgatcctcccacctcagcctcctaggtagctgggactacaggcatgtaccagcacacccagctaattttttttgattatttatagagatgaggtctccctatgttgaccaggctggtctcaaactcctgggcttagcttgcctcaagctcagcctcccaaagtgctgggattacaggtataagccactgcacctggcctaagaaatatatttttaaaatttatgggaggccactgttttggactaagctcccgcactaagccccaagacaccagatcaaagcagaatgtaatcacttatgctagatgccacaaaatcaaactgaacttgaaaatgggccagttttccaaaaaacaggagattcacagcaatcaatcataagaggaccactcaatttgaactggtaagtcccttctgctttagtcctataaggaaaataactttgaaacaactaatctgagttttgttccttttctctgtttagctcattagagcatctttctatttcacagatgaaatgcttcctgattaatcaatcactaataaaagccaattcaatcttgaagaaatatatatatatatataatgacctagtatatatatatgcatacaaatatatatttatccctatataatgttacacatatatatagacacacaaatatatagtttgtatgcacattaacatttgagaaatactaggttagacttctttcacctatttgggaggttttcaattacctctagattggattgcaactttttgtttgtttgtttttgagacagggttctgctgtcaccaggttggactgcagtgatgtgtgagcctcaacctcctgggctcaagcgatcctcctgcctcagcttctcaagtagctgggaccggcgtgcaccaccacacctggctaattaaaaaaatttttgaagagatggggtcttgctatgttgcccaggctggtcttgaactcctgggctcaaacaatcctcccaccttggcctcccaaagtgctggggttacaggtttgagtcaccatgcctggcccaaactttttaattctttactgatttaagaaaatgagttttattttgctaatactcgtgttactttaatataataaccctttccttttgaaagccaagtacaaggcaaagattcctgcctaatttcccctcatttcgttccaataagagccttactacagcctaaaaacaatgcttctgtaattctactgcaaaaaaaaaaattttattttgctttttcttcctctaaaactctctatttttttgggggggggggtggggctggcatataattgtatttatgctattagatatcacttcactcatttacagtggttatcagcatccaaatctttttttattgcaaatattggtcttttcttaaccacctggaaaagtatttatctatgaaaatctatataataacctaggaaacctctgttagagttaataaggacaaatgggttaagaataatagtgaaggcatacctttcagcaataccatttctttttttttttttctgagatggagtctcactctgttgtctaggctggagtgcagtggcgcaatctcggttcactgcaacctctgcctcccaggttcaagcaattctcctgcctcaacctcccaagtacctgggattacaggctcctgctaccatgcccagctaatttttgtgtatttagtagagatgaggtttcgccatgttgcccaggctggtctcaaactcctgacctcaagtgatccgcctgccttggcctctgaaagtgctgggattataggtatgagccacagtacccagccagcaataccatttctaagtgtaactttcacacacgtgaagacatacataagaatgtttgaagaatgtttgttggagtaccatacctaacagtgaaagatcagaaatagcctaaatgtccaccaatacaaaaaataatcattgtatggtatcagttacacagaatatctcgtaaaagcagctaaaatcaataatcctgagctacagatataaatacagactgggcgtggtggctcacacctgtaatcccagcactttgggaggccgaggagggcagagcacctgaagtcaggagttcgagacgagcctgaccaatatggtgaaactccatctctactaaaaatacaaaaaaattagccgggcatggtggtatgtgcctgtagtcccagctcctcgggaggctgaggcaggagaatcacttgaacccagaatgcagaggttgtagtgagctgagatcatgccactgcactccagcctgggtacagagtggaactccgtctcaaaaaaaaagtacacatcttaaaagcaatgctaagtgaaaacatgaaaatgcaagctgaagtgtacaatttacataaggtctataaacatataaaacaatattgtttaggaatagtataaaattatccatggccaggcatactggcacacatctgtaactacagcactttcagaagcaggagaatcgcttgagcccaggagttcaggaccagcctgtcctacccaggcaacatagcaagacctcatctctaccaaaaaaaaaaaaaaaaaaaaagagctgagcatagtatcacacatctgtgtcccagctacttgggagggtgaggtgggaggatcacttgagtccaggagtgtgaggctgcagtgagctgtgattgtgacactgtactccagcatgagggagatcctgtcttaggggaaataaaattatccatgaaaatgataaatactaaactcaggatagagattacttagagggaatgaaacagggagaaaaatgagacttgggggatttatacagggggatataactacttcttgaaaattttatttctttaaaaaataaaaagggaattaagatactatccaggtagggtagctcatgcctgtaatcccagcattttgggagggagaggcgggaggatcacttgaggccaggagtttaagatcagtctggaaacatagcaagaccccatctctacaacatttttttaaaaaaattagctgggtgtggtagcaagcacctgtagtcttaggtactcaggaggatcacctgagttcaggagtttgaggttacagtgaaccataatcatgttactgcactacaccctgggtgacaaagatcgatcctatctctataaaaagagataagatgaagccaggcacggtggctcacgcctgtaatcccagcactttggaaggccgaggcgggtggatcacttgaggtcgggagttcaagaccagcctgaccaacatggagaaaccccatctctactaaaaaatataaaattagctggccgtggtggcgcatgcctctaatcccagctactcgggaggctgaggcaggagtatcacttgaacctgggaagtggaggttgtggtgagccgagatcgcgccattgaactccagcctgggcaacaagagtgaaactccatcccccccccaaaaaaagagataagattttgataatattttcaacttggttattagaaacactggtgttacatgatttttcactaaagaataaaataacccaagtattaaatttcagtatctcagcattcacttgaagctgagcagctataattctgactcaaatactacttttgttcactagattcaactttgttatttaaacttcagagctgtgaaaaaaaaattttttttttttgagacggagtctcgctttgtcacccaggctggagtgcagtggcacgatcttggctcactgcacgctctggcctcccgggttcatgccattctccgtgacaaagaattttaacttatttggtgaagaagtccaagatcttaattaattatgtaaaataatttaatctgggttataaacaattgttgagaaattgctatttgcacagaaatataataaatgctctgtctcggtaagtattaaaatatttttatttacacctaaatgaatcaaaaacctatactgtttaaagataactcaactgcagagtatagaatatggtctgaaactcttaagcaaagctgaattatttgtgcctaaatggtaatgggtaaaaatttatttggtttatcttaatttgtattaattattgcttagctattacacataccatcatttccacactccctgctgccacaacatctttgggttttgcatctttggttccaatgtaggagccgatggtgtcacatgaccagggagagtattggctataatcatttcctttgtatttcccagctaccttcaagtcttcatccaaaaactacagatggagaaagaaaaaaaacaaaaaaaaaaaaaagagaaagaaacaaaacaggaaatgggtctatgagtaacaagacagagaaagcagggaatttcttagaacatcgtgctgaagcaacataatgatgattatttgatttttaagtgccacaatagaagatttttgtaaactactatgaaaaatataaaataagtgaagagtgatttttagctttcaggttttttttttttgttttttttttttaccttagcagaaggtaaaaaaaaaaaaaaaaaaaaggtatttcaatatccttccaggaatcaaactaggattttatgggtttgctcatccttttcttcattagatcagtaaacatttaagcatatatgtaccaagccatagttttgctagaccctcctcaacgtttctttcaataaaatcaaggtaaacaagaacattaaaaattttgatttttatagtacatgatgatgtagtaactttttactgaaatctctttaatagcaataattcatatcttgaataaattctgttccttaggttgattcaatgagatgaaaaggatgtctaatttttatcttctcaaggtaagttctccagtctaataacagaatagctattctaaggctaatgtattttcactaaaattgcaacattcacatttataaaatgttttacattttcaaagtgttttcatgtatactacctaataagctcctaaatccatgatagacaacacagatgatatgaccaaggctataccagtatagggcagtgctaggactataactttaatgtttctttcattttatcacaagacatacatacactgatatctaggggtatcagtgttcatttgtattggttcatttaagtggatctatgcctcccgctatactaaaaacatctcttttctgagtcatcattattggccttctgcattgacatagggtctgctgctcactaatatcactcattgtcaatcactcttctgtctctattattcataacctcttcccttttctttgtcctactactatttaaaaaatttttatccttttttatttttcttctacttactaactttagatagaacagccaacttttaaaccacatgacctaccaattacagtgctccttttttttgagatggtgtctcgctctgtcacccaggctgaagtgcagtggcatgatctctgctcacgcaacctctgcctcccaggttcaagccattctcctgactcagcctcccaggtatctgggattacaggtgcatacctctacacccagctaattttgtatttttagtagagaaggggtttcaccatgttggccaggctggtctggaacacctgacctcaggtgatccacccacctcagcctcccaaagtgctgggattactggcgtgagctaccatgcctggccaagagtgctccttttttaaatctctgtagtgtattatatgtagctatttaaatgaatgagataaatttatatactgacatacaaagacggccaggagaatggattaggtaaaaacaaaaacaaaggcaagacagacataaaaccaagatgtatttactaaatgatcctattaaaaaataataatgaggctgggcaaggtggctcacgcctgcaatcccagcactttgggaggtcgaggcgggcagaccacctgaggtcgggagttcaagaccagcctggccaaggtggtgaaaccctatctctactaaaaatacaaaaattagctgggcgtgttggtgcatgactgtagtcccagctactcgagaggttgaggcaggaaaattgcttgaacctgggaggcggaggttgcagggagccaagttcatgccactgcactccagcctgggcaacagagtgagactccatctcaaataataataataataataatacagagatccaacaatcccactactgggcattcattcaaaggaaaagaaatcagtatatgaagggatatctgcactctcatgttttattcccaatagccaagatatggaatcaacctaggtatccagcaacagatgaattgataaagaaaatgtggtatatatacaatgaaatactattcagacataaaaaaataaatcctgtcatttgcagcaacatagatgagcctagaggacatcacattaagtgaaattggtcaggcacagaaagacaaatatttcatgttctcactcaatgtgggagctaaaaagttgagtcacagaagtagagagtggaactgtggttatgagagactagaaagggaatggggggagggaaggggagagagcttggttaacagatacaaaattatagctacacaggaggaattacttctagcattctatagcactgcagggtgagtacagttaataatttactatatattttctaaaaactagaagagaggattgtttttcctgatttgaaaaaattatgtttttttgaagaaaacttttaacatcataaactgatctttatatacaattttatccattatttctatagaccaattccatccaggtttatttacttatttacaaatgacataaaaaatttggacggggcatggtgggtggattgcttgagcccacgagtttgagaccaccagcctgggcaacacagcaagaccctgtctcttttttaagaaaacagaaacatttaaaattttctacttaggatcttgaaagtcaaaataaaatggaaagtatctaggatagattgacaaaagaaaggaatatcaacaaaatgattttcgatttgaggaagaaagaaaccacaatcttaggctgggtgtggtggctcacacctataatcccagcactttgggaggctgaggcgggcagatcacgaggtcaggagatcgagaccatcctggctaacacggtgaaaccctgttcctactaaaaatacaaaaaattagccaagcgtggtggcgggcgcctgtaatcccagctactcgggaggctgaggcgggagaatcgcttgaacctgggaggcggaggttgcagtgagccgagatcacgccattgcactccagcccagacgacagtgtgaaactctgtcacaaaaaaaaaaaaaaaaaaagagaaaccacaatcttcatacaacaacaacaacaacaacaacaacaacatcacgtttgcagtaagagatgttggcttttttttttttttttgagaaggagtcttgctctgtcacctaggttggagtgcagtggcgcgatctcggctcactgcaagctctgcctcccaggttcacgtcattctctcacctcagcctcccgaggagctgggaccgcagatgcccaccaccacgcccggctagttttgttttcgtatttttcgtagagacagggtttcactgttagccaggatggtcttgatctcctgacctcatgatctgcccactgtagcctcccaaagtgctgggattacaggtgtgagccaccgcgcccggccaatttataaaggaatcttgagataaacactatgtcaacaatgttgtagatacaaaaagcaaggacaacagtagatctacccagcatttttccttgaaataaaatctgaaaatcataaggagatatttatttagcccacaggaagaatgttattcctacaatgttacataatacaaaaatttacaattaaatgtaacactgctctcttcttcaaagaaaagttggatgactggccaggcgcagtggctcatgcctataatcgcaacactttgggaggccgaggtggctagatcatctgaggttaggagatcaagaccagcctggccaacatggtgaaaccctgcctctactaaaaatacaaaaattagcctggcatggtggtgcatgcctgtaatcccagctactcaggaggctgaagcaggagaatcacttgaacctgggaggtggaggttgcagtgagccgagatcgtgccactgcactctagcctgggcaacagagcaagagtctgtctcaaaaaaaaaaaaaaagaaaaaaaaaagaaaagaaaatttggatgactgttctgaatgacttaaatgctacctacctaccagtcaaagggtgacctgaaactctctggaagcatcctgcatttctgtaaccttgaccttccagcagtgagtatcacatacacaattgtccaaggaagagaggattttgaatgttcccaaaataaataaaagataaatgtttgagatgatatgctaattaccctgctttcatcattgcatattgtatatatgtattgaaatatcactttgggaggccaaggcaggcggatcacctgaggtcgggagtttgagaccagcctgatcaacatggagaaaccccatctctactaaaaatacaaaattagctgggcgtggtggtgcatgcctataatcccagctcctcgggtggctgaggcagaagaatcacttgaacccaggaggcggagtttgcggtgagccgagatcgcgccattgcactccagcccgggcaacaagagtgaaactccacctcaaaaaattaaaaaaaaaaaaaaaaaaagaaagaaagaaatatcactctgtatcccataaacttgtacaattataatgtgtctactaaaaagatgttagttcatgcacagaaagaaggtgaaatatatataagaagtttaaatacataataaatggttatagaaaatgagattttcgagaaacttctctttctatatcatgtatttctataatgtatgaatttagtacaactatacacaggttgttttatttatttatttttaaatttttgttgagaacgagtcttgttctgtcatccaggctggagtgcagtggtgcgatctcggctcactgcaacctccgcctgctgggttcaagcaattctcctgcctcagtctcccgagtagctgggattacaggcgcccaccatcatgcccggctaatttttgtattcaggttgtttataatcagaactgaggtttaaatatatgtctttgcatctcagtaactaaaatgattctagataatgttccttaatactcagacattattataatttttattaggagtaaaaataacaataataaatatgaattatttactgaatgcctgctacataccagatgccttatgtttcatcttcaccacaccactatgaggtaggctttattatgtttgatttataaatgaagaaacgtgcacctcaggattcagggaggctaagtaattttaaaaagatcacacagtgaaggacacaactgaacctcaaagtttagaatgtttgataccaaaaactgctcagtttttacaatgtcatattgttttccatatttcttataaaacaatatggcataacaaagttccagggtgtactctaataaagaatttttgaaaaaatatcacacctgttttcttccccccctctaatttttctgagacagggtctttgttacccaggctggagtgcagtagcacaatcatagctcactatagcacggacctcccaggttcaagcgatcctctcgatcttcccacctcagcctcccaagtagctgggactgtaggcgtgtcccaccacacctagctcatttttatttttaaatctgtagggatggggtctcactatgttgctcagactggtcttgaactcctgggctcaagcaatcttcccacctcagcctcccaaagtgtgggattacaggtgtgagctaatgcacacctggctgtttttactttacaaataaaactacattaatagaagatgttgtgactttactaataacctacatttttgtggaaaactcatccaaagtgtttagatgagaaaactagatattgtgaacaacttctatttagtagacttccttcatatacccaacaagatactatttactatgtgtgatgtacttctcaattttcatttattattcatgatttgtcagttagcaatgtttagaatcataattctatacataaaggatgcaagacaagttccttacatagtatcaactgtaatcctgagaaaccttacttgattattaaaaaaaaaaatacaaactataagctaaagcagtatgtacaatcaacaaaacaaatacgattactttaaagttggattttttgggcagggcacagtagctcacgcctgtaatcccagcactttggaaggccaagacgggcagatcatttgaggtcaggagtttgagaccagcctggccaacatggtgaaaccccatctttactaaaaatacaaaaaaattagctgggtgtggtggcacatgcctataataccagttactgggggaggctgaggcaggagaatcgcttgaacccagaaggcagaggttgcagtgagccgagatcgcaccactgcactccagcctgggcgacagagcaagactctgtctcacaaaacaaaaaaaaaaaagttggctttttgaaagacaaataaaattgataaatccctagcaggactgacaaaaaaaaattaccaatatagaaatagaaaaacgaacatcactgtagaccatctagacattaagataataagacaacacttattcactataactactagcattgtcatacagaaatacaaagaagttgactccccaaattatggttattgccctgtgatacattaaccagttttttttttgagcaatcttatttgactgttttttttttctgattttcactatctatatttacctgttttttcctattcattaaaccaacttttctggctggtttcctcattactgagttaaataaatctttgatattctttcttatttaaaataaatctgaaactaggattagagaaaaccttcataaatatgataaagattttctaccaagaagcctacagcaaacatgataatggtaaattattattaaaagctccatttactcaaagattagaaaggagtcaagaatatgtgttatcatcacttctattcagtattatgctggagtccaaaataataagacaaagacaaaacaaaaggattaaaaaggggaaaaagattattcagaggacataattgtgtgcacagaaaattcaaaagaatctactaacattattatgattaataaagaaatttagcaagcctgctgaatagaagggtcaatacataaaaatctatttaatttctctatattaataatagaaaataaaaatttccaaacaattctatttaaaatagtttcaaaaaacattggttatcgaggaataaaattcaatgtaagacgcgcaagacactgaagtatgaagtataaagaaaatccaaataaatgaaggggtatatcatgttcatagagacttgatattagaaagatgtcacttctcagccaggcgcggtggctcatgcctgtaatcccagcactttgggaggccaagacgggcagatcacctgaggtcaagagatcaagaccatcttggccaacatggtgaaaccccgtctctactaaaatacaaaaaattagccgggcatggtggctcatgcctgtagtcccagctacttgggaggctgagataggagaatcacttgaacccaggaggcggtggttgcagtgagctgagatcgcaccactgcactccagcctggcgaaagagcaacactctgtctcagaaaaaagaaagctgtcacttctcatcatattgatctaagacaacactgtctaggcccggcgtggtgtctcatgcctgtaatcccaacactttgggaagctgaggtgggaggatcacctgaggttagcagtttgagaccagcctggccaacatggtgaaaccgtgtctctactaaaaatacaaaaattatagtcgggcgtggtggtgcgtgcctgtaatctcagttactcaggaggctggggcaggagaatcatttgaacccaggaggtggaggttgcagtgagttgagattgcaccactgtactctggcctgggcaacagaatgagactccgactcaaaaaaaaaaaaaaaaaaaaaaagatacaaaaattagctaggaatggtggtgtgcacctgcagtcccagctacttgggaggctgaggcatgagaattgcttgaacctgggaagcagaggctgcagtgaaccaaaaatgcgccattgcactccagcctgggtgacagagtgagactctgtctcaaaaaaataaataaataaaaataaagcaacactgtctaatagaaatatgtgatccacatataaaattaaaacattttggtggccacattaacaacaaaaacaggtgaaattaattttaataattttatttaatccaatgtatcaaaaatattaatgaattttacatttttggtatgaaatccttgaattcagtgtgtatttgatgactatagtacatctgaacttaaactggccacatattacatgttcaacagccacatgtggctagtggctaccatactggacagcacagatttacagatctgatgtaatcctaatcaaaattgaagcagatatttttgtggaaatcaacgtgctgattcttgaaaaataacaatactagaaaatataaccaccacatattgagacttattataaaactatacgaagagaatgtggcatcggttcaaggatagaaatagactgacggaaaagaatagggtcaggaaacacatgtgtggtcacctgattatgataaagcaggacaccagggaaagcatgctgatttcattaaattgtgccgagtcagtgccttacaggaacaaaaaaaaagatcttgactcctaatgcattacattacatacatacaaaaatcagttctagatggattgtagagttaaatgataaaaaacctttcagaggaaaacaggaaaaaaaatcttcacaccattgggaataggcaaagatgacttaaaccggacacacacaaaaaaacacggataaatgagactaaaaatgatttgcttacttcttccggatgaaaggtaggaggcaaggttggtgaaggtgcaaaaggaggtggagagataacctttctttcctctagctgggccattatttcctttcgtcggcgatgtagttcatctagactaggatgaggctggggaggaggaggaagccggctataaggaggttcctaaaaatagaaagattagttaaaattgaaagagaatttcaggacagattaattcatttaatatactcagcgtatattttaagttatgaaacagcttgtatacccttcttaacatttggaaacaccaacacttaacagaacaaagtaaaacaaaaccccccaaactctcaagatcttccaaatagctaaatttaggtttcttttatttggtcataattaccaagtagatctagaattgttaattaaaccatctaaagttcagaaactaagaaaggttaattgtggggaggaggcagatttttttctcattatatagtttaaaaaaaaaaaatacccaaattatgaaaagatttaaaaaaaaaagaagctctcttataaaaaagaattcatcaaagggttattgtcattgcataaaaagtaaggaatcacagcaagcaacagtcaaattaagtctatgtaataaaaaaaaatacagcatactctgaggtacgaaggtctgatctgagttggatgaggagccactggatagtaactctcgatctgttggtatctttctctggattctggtacatacgatggtactgctgcaggtggaatctcaatgggtatagggctttctcggaatatctcttctcttgtgtaagacggagcagggtacactcgacggccatcatagtgagatgggtatataggtgggtactgctgtggctgtgtgccatactgagagtttacaacacgttcttggaggtagggtggataatgatccaagtagggaggagcaggttcaggagcagatggtggaggtcggacaaagcgggacacacattgtggtggtggagtataatacatacctgcacaatacaaaagaggacccaaaagcaaataatgagccaatttagttttctatgtaagattttaccttttaaaatactgaaacactaaagtattgataatctacttatttctttacgagttttccatctgcttatataatcaggttagctttttaaaaaataagcaaaaattatctgtaaaagtcattgaaaaaactaccctacttataatctataatagtagattggctctcattgtttgaccctctttctggtgtgtcttaatgcaatgaagacactggaaaacaaaaaaactacatttcccagatatccttgaagtcaggttccacaaatcaatcacttgcatgagttttgaatttgaaactgaaataactgggaggagacatggaacacaaaaggccaattttgctggcgcagattagtagctactgcttggctctacagttcttgagacaacagttgtggcaatagtttctcagttttccaacttttgcctcaaatgacgtgatcttggaattaagcagttaggacagaagtttctacttctactgcttcttcattgtaacaagttctcttggcagctaactctggagcactgtttgcttctttagtacctccaccaatatggcaggcacctaactcctgcactaaatctctttctgcttaatatagctaaaataatttacctaaaattgaaaacaggctacaaaaagagttgcattttttcctataatggatggtcaaaggaagatacaaatcacgttttatcatattttgcatgaattagtaatgccatatcaattaaaaaacattctcatgaatgaatgtagagaagacaacatgattcaaaattaaatgacagactcggaaaaagaagacagcacttttaatctattcccattttaaaaattatagtactatactgcttctgacagagagatccaacacttaaaatcattcagtgtttattttacatataaactatatatgtaaaacgttagtttattttctttccttcattctccatacctggtattatcattaaagctggctaattttcaaatttgtctatttttgaaatcccttcttctcctttcccaccacactaattcgtcagtactcacaccaggattaacagcctcctaactcaactctcatttttccaatccattcataacttttttttttctattccaaatacctctagggcatttcttccattaagtctttttgattcctcaagttctcaatgatctcccttgagtctttcagtcaatctctatcaagctaatattaaccacaacagatcacttaatttttaacacatacataaacaccacacacatgcatctactactcatgcatatagttttctattctttaccattatttattctattctgtaaactctctaaaggtgtgtatgctgcattttttcatatatattacagggcccagaaaaataataattaaaagaagaaaaatgtactgtgggtgtttaatttacacacactataatattaattcttttttcatgcttgaagaaaattttggtcaggagaatatatgctgccttactcagcaaatttccattgcctacttgtgtaacttgttatttccataaatattatatatgaacacatgtattatgcaactgcttttagtagatatggcggtttgatttttattactttgtttcatttatttcatagtatttagttaatcataaaatctcaatttttccaaagtattaaaaaatgcatttatacatttacttatcttaaagaggctactgtgtaaatgatcactctgacctgaagaacagttctgataattcctaagaaaagttagcaatataaatttaaaatcgttaccctgctgataaggtgctggttcaaatggcggagctgctcctcgaggatcctgataataaacatccgtctgttgtgctggatataactgagaacctcgaggtaccatctgaagtggtttggtaacaggcattggaggcagatctgctggcccccttggaggtatagaatgtggattcacaggtaaggcagaaatactcttaggaacagattctagcctaagggaataatattatggaagttgtttaaaaaatacttctcatgtgcataaattgttacaagtaaaaaagattgctacaatttgggaaactcacttattctaatagtcctcccttctacaaaatttgcaatttttaaatcttatttcccctatgttaattgtttcttttcttttttttttgagacagagtctcgctctgttgctctgtcgctctgtcacccaggctggagtgcagtggtgcaatctcggcttactgcaacctccgcctcctgggttcaagcgattctcatgcttcagcctcccaagtagctgggattacaggcatgtgccaccatgcctggctaatttttgtatttttagtagaaatgggtttcatcatgttggccaggctggtctcgaacttctggcctcaagtgacccgtccacctcagcctcccaaagtgctgggattataggcatgtgccaccatgcctggctatgctaattgtttcttaaaaaacactagcatgggaaataaaaaagcaacaaaataaaggccaaaaaaaataatcagggttttttttttttaaatcccaaacattaattattctatcttccttcgactttatgaagaagaaattttgaaataagagttagaaaaatgacgtacaggtcaggaggggatccaggagcactactgctcagatgatctatttttcctggtttcagactagaatcatagctggggtctgtccctcgcggaataagctgtgttactgtattccctgttgatacaattccatttggcagagcaggaggttttctgctagggagatccactgcaccttcatctggaaggatagctgctgaaggcaggcccacctcattaagttgacccaaagaggcactcaagggtcttctcggaaccaggcgcttattcattttacgaaatctatataaaaagcataggcacatatcaaaaagcaaatataaaagcaaaaccaagaactaaaatgtacttaatattattttctagaaatattctctcttgaaacattaactctatcagtgtgtatattttgcataaaatctctagcagcaagacatattaagtataaaattcctcataaaaatgtgtaacataggccgggtgctgtggctcatgcctgtaatcccagcactttgggaggccgaggcaggcggatcacgaggttaagatcgagaccagtctggccaacatggtgaagctccgtctctaataaaaatacaaaaattagctgggtgtggtggcgtgtgcctgtggtcccaactactagggagactaaggcaggagaatcacttgagcctgggagacagcggttgcagtgagccgagatcacaccactgaactccagcctggcgacagagcgagattctgtctcaaaaaaaagagtaacatttgtcatattataaattatgctattaatatttttgctataatatatttctgtggacatttgtatttctaaaacttattggagaagctagtagaaaaatctttagaagatagtttctgaaatattttacttcagctctccctcaaatgccttgggatacaatgagccaatgttaaaaaattaggaataaaagaaaaacaaagccagtatgcactgtgaaacatttgtcatttactctgttaaaaaatttaagcagccaggcactgtggctcacaccagtaatcccagcactctgggaggctgaagcgggcgaatcacttgagctcaggagtttgagactagcctgagcaacatggtgaaaccttgtctttaccaaaaatataaaaacttaaccgggtgtggtggtgcatgcctgtggtcccagctactcgggaggttgaggcgggaggatcacttgagcctgaggcagaggttgcagtgagccaagattgcaccactgtactccagcctgggcaacacagtgagaccctgtttcaaaaaaaaatttaagcaattaaggatagtgacttttattagaactgcttcagagatgctgatgttatgtatgccaatacaaaattaaagttattttaaaagtaggttaatggaaccaatacagaataattgcctgggtttaaagagatgctgtggtacaacaagcacatcgattctgaaatctaaccaaaggaaaaaatataagccatcagactccaggatctttgttcctcaacaatgaaagcaagtccatttacaactgctaatgcatttttattttgaaaaataaaacctcggcttggcgcggtggctcatacctgtaatcccagcactttgggaggccgaggcgggcagatcacctgaggtcaggagtcaagaccagcctgaccaatatggtgaaaccccatctctactaaaaatacaaaaattagctgggtgtggtggcaggcacctgtagtcccagctactcaggaggctgagacaggagaattgcttgagcccgggaggcggaggttgcagtgagccgagattgtgccactgcactccagcctgggcgacagagcgagaccctgtctcaaaaaacaaaaaaaaaaagtaaataaaaaaataaataaaaccccatcagagtaataatgctatttttccacgtttcccaaaactgacaaatttctgaggttggggagaaaactacccctcaggggtaattattgttgaaagtctagtgtatcattatatggaattgttcctttatacattagctttatattcatataagattattatttgcagcagttgagtcatatattactgctaatttttccctccacttaataatcttagacatccctttatgtcagttcattttaggctggttgggttttttttggctattaaaataatgtgctgggcacaatggctcacgcctgtaatcccagcactttgggaggctgaggtgggtggattcacttgagctcaggtattcaagaacagcctgggaaacatgggaaaactgtctctaccaaaaatacaaaaattagctgggcatggtggcatgcacctgtggtcccagcttctcgggaggctgaggtgagaggatcattggagcctggaagtcgaggctgcagtgggccatgattgcatcactgcactccagcctgggagacagagtaagaccctgtctcaaaaaaaaagtaacagataattatgaacatgtacttgcaccctgtgtgaataaccaaataagcaaaggcagaatgaggtcaaagagcacgcaaattagaaatttttatgtcatactgctctctaaaactattttaagtcctactgatcatgaagaaaaacgtctttcaaaacctcatcaaatactgggtagcactggtcttgttaatttggtagtccaaaaatactaagttgctttaatttgcatttctttaacaactagtgagattgaacatagtttcacaggataattggccattagtatttcttccgtaaactatgtttatgatccataaatctattggttcctctccttcctacagacttgtaagagctcattttatgttaggatatcagccctctgtgtgtcatttcctcaccaagctttttataaaaaactgtatttgtaccatatcttagttttataatttttatgtaatcaaatttatcaatcttttcctttatggatgctgggttgcagttcttaaaaaaatcttttccttctttccttatttaacaactaaaaacaaacaaacaaaaatcctcttaactactctgtggtttcttgccttcctaaatatttaaatctcttatacatctagagttcattttagtataaagattgtggtaagaatccagctctatttttcaaataggtgacagttattttccatcattcatttggtcactgatgtgaaatgccacctttagcacatatgctaagctcctatatgcatctcaaactcctcctagattctctattgcatttcattaatctatctattcctacgcaaaagactaaagtcttttattcactgtagtccataatacaggtaaatagttattagtctagttcctgtctaaaacttccagaattttcagaattttccttgctatttgtacctatttattctttacaaatgaatttttgataggatcttaacatcatcatggtgagatttaaattcggatttcttggaatttgttgtttatgggaaaatgaaacttttatagcatcaaaccttatccaagaacacagtatatttactcaatatttctcttatgttcctaggtaatttattggttcaatttatatacaccctggaagagatccttaattttaacttatttttaaactggttatgtttctctttttagtttacacgagggcaattcatgtttgtgatttttaaaatttgccatcttactaaattctcatttcttttgtttctagtactaaagtttttcccaataattttatggctatgttattctttcttacatacattagctactacttccacaatgttaaataacagtggtagaaaattttactactaattactagcagaaaattttgctttatccttgactttaatgagagtgaatcgaatattttactaattaagcatcatactattatgttggcttctgatttataatataatttattaccatgctgagaaagtatggcatttctgttgtattaaggaattttgatttttttttttttttttttggagacagagtctcgcactgtcgttcaggctggagtgctacggtgcaatctcggctcactgcaacctccacctcccgggttcaagcgattctcctgcctcagcctcccgagtagcttggtctacaggcgcatgccaccacacccagctaatttttgtgtttttagtagagacggggtttcacaatgttggccaggatggtctcaatctcttgaccttgtgatccgcccgcttcagcctcccaaagtgctgggagccaccggcgcctggctggaatttgatttttaattgacattcaattttattcaaaggcctttggcattttttggatattatcatgttattttctaagttgtgataattatattgtactacttttgcagagtcatggcatctattttcttttctttaaaaaaaaattatattatttatattaaaaaaaaaaacctacagcacccaatattcccaggtagtctcccatccaagtactaactgggcctgaccatgcttagcttccgagatcagatgagctcaggtggattcagggtgttatgcccttagacatggcatctattgtaatgtattactgaattatatttaaatttttgagatttttaatattaatacttgcagtagatttgcagttttaattgtgttatctttgtcaaatttaatgaaagtgttacattggatttataaataaattaagaggcggtgggtgtggtggctcctgcctgtaatcctagcactttgggaggccaaggcaggaggctcccttaagcccaggagtttgagaccagcctgggcaacatagggagaccctgtctctatttttaaaaaataaaataaaataaaataaaaataaaaaaaattaagaggtttttcctttctttcttcaatgagctgaaaaatttaacatccctgaaattatcttgtccttgaagtttaaaagaatctgttaaactgagccaagggcaaaattttccactggaaatacatcatgcaattagttaaattaagttaaaattgattaaaattattataattttaattttttttgtagtgaaaatgacccacttttagatttagctaatcataaaatagtttcctatctataggcatgatgcaataaaagctgaagaaactgcttttcatttttaaaaattatgtacaggttgaatatctcttacccgaaatgcttgagaccagaagtgtttcaagatttggatttgtcttggattttggaatatttgcatatacataaggagatgtcttggggataagacccaaatatataacatgaaattcatttatatttcatatacatcttttacacatagtctgaaagtaattttatacattattttaaataattttgtgcatgaagttttgactgctatccatcacaaggtcaagtgtggaattttcaacttgtggtgtcaagttggctttcaagcatttttggattttgaagcatttcagattttcagaataggaatgttcaagctgtgttacattctaaaaatgtcctattcatttaagataaagcagctactctttctgtatttctgtatgtcagcgaattattccacttacaccttattccaaagtctcctgactttcacacttacttttccagttcctcctgtgagtgtgcaaatgtacagctggccccacgagggcatcctcctctctgcttcatatctcgacacatgtatgttttgtatttgctatgctgtggaggctaaaaccaaaatcaaaacattagatgtgtaataaccccccacaaaaaaacataaattttgtgttgtcattttaggatcttgataatctagataagtaattcacatatttatttagattaccaagagcaaaagtgctggaaagtcattctgtctgaagtttcaaagtccaaatataaataaagcaaaaacaaagaaggtagtcctaatttttctgatatgttgatattaattctcaaacaagtagcataatataaattcttgaataaatctcatgggcattcttatacttgtattatatggaaaaagaaaaagctcatggggacactatgatctcatttccactttttttttttttttttttgagaaggagtcttactctgttgcccgggctggagggcagcggcgcaatcttggctcactgcaacttccacctccccggctcaagcgattctcctgcctcagcctcctgagtagctgggattacaggtgtccaccaccgcacctggctaatttttgtatttttagtagagacagggtttcatcatgttagccaggctggtctcaaactcctgacctcaaatgatccgcctgcctcagcctcccaaagtgcttgggattacaggtgtgagccactgtgcccagcccatttccacattttataatgaaaaaacaaaccactgtagtttaagactttcaaatatataaattatcttctaatatttgttttgtacaatgttcaatatagctatatgtatgtttccatacaacataccacaaaaactacaaaaggccctataatcaaagaatattctgtaactaattcttcttgacatgcagaataatatatgaagaacttaaaatagttccaaaagtacaaatgacacttattatttataactcaaggataaggcaggaggatggatttgaaagttaatgaaatatgagacacaacactaaactggacaaaatttagtgtattttatcactatatggcagactttaaaggttagtctcattactcttgttattttcttcaagatgtctaatgaaacagagagttaaaaactgtaggttctcctttcttttatgcctattcataaataaagctttgacctgtgttagataggttaggaaaatcatatccagattattttacttagcaggataatttttatatttcttgcctcttaagcaaaaaggaatactgagtaacctatttatatttacctgaaccaggtaaattaagagttttacgttcacaggcttactactgcaaaataaaagatctaatgaacctaatataaatcctgagagcaaaataaaattactgggaataaaatttaaaactctagctataagaagttattatattctaccatcgtattttcatctaaaaactttgagggagatttggcccaatggcataagacattatgaatgaaaaaaatcttaaaatattaataagaaaatctatagaaatttgaacagtattggaaagacacagtattagcactaaaaagtgatacttattgtcaaaccaaaatgttaaacaaactaaagagaataataatcttatataaatggaataaacttcagcactgaatccattttctccatcaaatgctgccatatccaatgtgaagactgaccccagcatgacatcagatcaataaggattatttaatgtcaatattgtcagataaagttatcagcctaatgcagtaaactgttaaccatgccaaggtaatttacagtttctatactcagagtctcaaaatgttcatgttatctttttggctttgtatctgtaggtatacccacagtggtttacctatagttttaaggcatatccacagtgggttaactctaagttttaaacagcttccttacctgctgctgatctgctccttttttgctgtggttctggatataatcaaccagcccatgtaccactgtacgcacagcaaccagcccattttccagctgttcccaagtaggaggaggagcatctatacaaccaatgataatgttttaaactctaatgttactcaaaattttccctaatatcaaattaataaaagagttacttgaaaacatttcagtgaaatcaagcttcacaccttagctttttagataatagcttattcacctaaccatcattttaaaggaatggacatattctttcaaagctggggttgcaaactgaaataaccataggaacaagaaaggtaacatgaaagaggtaaataggccacacaatagtggtaactgtcattagactctcagtgttgaggagacaacaacgagtgacagggactgctgaactggggagcatgtccctcatctaagagtatggttataactcagctttagatgattgttgttatgtgatgatgcaaggctggcactgccagatacattcactgtttcccagggaaacctgaaacttgagatttttaagtaaaaatttcccagttttaaaatattggcatctaagaaatttagaccattgctcagaccaacactgtgtggattaaacaaaactgaggactgtctacagttagtcaatttgcatgtttattttgaacttttatataaataaagttttggtaaacaaaaagcttaaaaagtttaataagccgggcacagtggctcaggcctgtaatctcagcactttcgcaggccgaggtgggcagatcacaagatcaagagatggagaccatcctggccagcattgtgaaaccccgtctccactaaaaatacaaaaattacccaggcatggtggcacgcgcctatagtcccagcaacttaggaggctgaggcaggagaatcgcttgaacccgggaggcggaggttgcagtgagccgagattgcaccactgcactccatcctggtgacagagagaaactccatctcaaaaaaaaaaaaaaaaagtttaatagaagaactatcatataaagtaactctgctacatgttttcttcatttagtaggtatttgcccagtgccagcactatgatttataaaagaaaaattaactataaggctaaatatattctttaaaagaaatatgtaaaatgaaacaagaagagagatgtagagataacttcttgctcagacaccctgaaagaattctaggggatggcatttgaactgggctttgaaggacacatggaatctgaaaaggaaaaaaggtgaagaaaacaagtattcaaaaaagtagtttttggaacacttgctaaatctgagttattgttctagttgttgggtaagcaatagtgattaaaacaaaaatccccattatattcaaggagaagagccagataataaccaagacaaataagcaaaatatacagtagtatttagataatgttgaattcaaaaaatagagctaagaagagaagtggggccaatgtgtaaaattttagacagaggcaatccacccatcttggccttccaaagtgctgggattacaggcatgagccactgcgctctactaaaaatacaaaaaaattagctgggcatggtggcacacgcctgtagtcccagctactccggaagccaaggtaggagaatcacttcaacctgggaggcggaggttgcagtgagctgagattgcaccactgcactccagcctggtcaatagagggagactgtctcaaaaaaaaaaaaaaaaaaaaaaaaaaaaatttagacagaggccagaaaagtcctccttgagaaggttacatttgattaaagacctgaaagaagggtttaagtgtgcctactggagactttcaaatatataaattatcttctaatatttgttttgtacaatgttcaatacagctatatgtatgtttccatacaacacaccacaaaaactacaaaaggccctataatcaaagaatattctgtaactaattcttcttgacatgcagaataatataccaagggaaaaacatccaagttagagggaagaataagtgcaaagtccttgatgtaagaagtgtgcctggcatgttgcatggaggtggaatcagagaggagggaattaagtggaaaaaaagggtaggaaatgaggtttgagagaggtagtagaagaccagatcacatgaggccctatagatcatgggaaggatactgggttttactctgagttgatagaaagccacaggagaatttatgagcagagggtgacagggtcgctccggctcttttgttaaaatcagacagacaacaggaggctattccataatcccctgagagatggggatggtagcagtgaaggtaaatggattctggatggattttaaaggtagggcctacagaatttgctaatggatcagatatacattatgagagaaagaagaggtttttggactaagcaactggaatgacagagttgccacaaacaggatggcaggggagagctcatttttagatagattcagtttgaaatgcttatcagatataagatgatagatgctgagaaagcagttttgttttgtttttttgatggagtctcgctctgtcatcaggctggagtgcagtggcatgatctctgctcactgcaacctccatcttccgggttcaagcaattctcctgtctcagcctcccaagtagctgggactacaggtgcctgccaccacgcccagctagtttttgtatttttagtagagacggggtttcaccatgttggccaggatggtcttgatctcttgaccttgtgatccgcccgccttggcctcccaaagtgctgggattacaggcgtgagccactgcacccggccgagaaagcagttttatatacaagttcaggaaaaaggcatgggctggatatatatttcaaattctaaaagactatcaattgtaatacgtactactttatgtgccaacaaagaaaaaaaaggttgttaattataatatgtcttcatacaaatgcattccaatttcagaaatgctaagatctgaaataattatgaacctcagaactgataaaaatacagtaaatttggccgggcgcggtggctcacgcctgtaatcccagcactttgggaggccgaggcgggcggatcacgaggtcaggagatcgagaccatcctggctaacaaggtgaaaccccgtctctactaaaaatacaaaaaattagccgggcgtagtggcgggcgcctgtagtcccagctacttgggaggctgaggcaggagaatggcgtgaacccgggaggcggagcttgcagtgagccgagatcccgccactgcactccagcctgggcgacagagcgagactccgtctcaaaaaaaaaaaaaaaaaaaaaaaaaaaaaaaaaaaaatacagtaaatttgtgagttacataaattatatttgaagctatgggatagataagattatctaggaaacagatataggattaaactctgagaacactccaaagagtacaggatatgaagatgagaaagcagaggatgctgaggagagtccaataaagaagagaattagtagcctagaagccaagaaaaaagcatttcaaggaagagagagtacagaacaatggccaggcatggtggctcatgcctgtaatcctagcactttgggaggctgaggcaggcgggtcacctgagttcaggagtttgagaacagcctggccaagatggtgaaaccctgtttctactaaagatactaaaaataaataataagaataataagaataataaattagctggatgtggtggtacaagcctgtaatcctagctactcgggacaagaattgcttgaaccaggcagaggttgcagtgaaccgagatcttgccattgcctccagcctgggggacagagtgaaactgtatctccaaaaaaaaaaaaaaagttaaatgctgctaaatcaagtacagtaagaactgagaactgacttttggaattagctacatggaagtaatttatgaccttgacaaaataagtttggatagagcagtggagataaatgcctgactggagttgagttcaagagtgtgccaaaaaaagaaatgaagtggtaggtagatgagaaatggggtcaaaaatggtttaggaacttgtgaaagttctcttttgactgctcaggatgatcaaaggacagcagtcagggaaaaaaatcactatatattctagtaacattgatctggtttactaagcaattttgggagcaaatctataaaagtaggctgataaaaaactaagagggctctgaatgccatagtcaagagtgtcaaaccttattccgtaagcaattctacaaacaatgaaagtttatgagtgtggaaggaagatcagggatgtgatttctttttttttttttttttgagacggagtctcgctctgttgcccaggctggagtgcagtggtgcagtctcggctcactgcaaactctgccgcccgggttcacaccactctcctgcctcagcctcccgagtagctgggactacaggcgcccgccaccatgcccagctaattttttttgtatttttagtagagacggggtttcatcgtgctggccaggatggtctcgatctcctgacctcgtgatccgcccgcctcggcctcccaaagtgctgggattacaggcgtaagccactgtgtcaggccagggatgtgatttcttttacagcagtaagtagactggattggaggaactcatagtagaggaacttggaagacattcagtctcaggaaaaaggaggctctcaaaggaattaattataagcaggggatataggggtattgtgaaagaagaacagataaatcccattgtatgaaacagtatgtagaacaagtgaaaggaaaagatgagacaagacaaaacattaaggttttaaacttacatacctcagagaatgaggtcattatcagaaagaggaaacattaaaggaagagcaagtatcaagaaatgatgagcttgctttgaagcactcagaggacacgatggggaatctcagcaagcactgggagatgtatctggagtgatgcagagataatagtgatagagatatttgggagtctgtattctacactaaggtaatacctgatgctaagaatgaataaccaccatcagagcatgtagagaaaacaaaattccaagagcataacctgcctactctttagtgggcaggaggggaaggcatggtacaaataagacagaagtagcactcaggtcagaagagaactatgagatcacagaaagatatcaaaaaagtgctcaacaacattatcgaaatgctgaaaacaaatgggagtgatttaaagactaagacaaagcttttggaatcagagactgggaatctactagtgaatattaagagagcttcagatcagtagtaggaataaacacagagaagctaaaataacttagatgtaagtgcaagttgaaaaatgaaggttgggtatattttcaggttacggagaaggagcagaaaaagcctaagtaaagatatacaagacaggatacttgaaggaacaagatatcatggagagggcaaaaacaggatcaaggaaatgcaactaaggatacataatacagaaaaaaatgagaaaaacgagatttggaagaggtaagaatggtaaaatacaacacaattttgtgacgggagaaagaagaaacataaagaagcccagagaaatctattttcctgatgaaatgagcaacagtataaaaagtattaaataaatattaaagtgaactaacctgagataaagagggaaaagatttaaaatggaaacttaaaatactgtaaaaaagatctggagtaactactttgggaaaccctagaggaacaacaaaagataattaaagaatcattgagcagcacgaaaggcacatataagatagtccattaatttcccgtgggtttacctggactagggtcaatgtttgctaacagctccaaatggggtcttagtcggttcaagtttgctgggtctccagttcgctggagagcaattgttagttcctgaacactctgtgcaaaagaggctggagtctgcaacttaaaaaagataaatgttaactttcccaaaggtcagataatcctttaaatataaagattatttatatcacaatcatttttgcgatttattaaatttaatttttatcttcccatataccctacactttggccagagtagattacttgctacccaaataaattctgtacttctctgcatccagagcttggcacattgtgtactgtattgcctctgctgtcacattcttcaaatgtgagacctctctcaattcagcctaccatcaattagatatactgatgagtcttctttgtgaattgttaattcctgtttctctccccattaatttactagaattagtgctttcctcatcgcttttaataaattctcttttctattatccaatatggtgaccttggcaatatgtggctatttaaatttaagttaattaaatgaaataaaaatttcagttcatccgttgcaaaagtcacatttcaaatgcttaatggccgtgtgtgactagtgatcaccatattggacagtgcatacacagaacattttcatgattacagaaagttctattgctctataaaatatcacacacactgcaaagtttaccagtttgttgtgcaaaggtctctggatattaaatttaaagcactgcgtgtgatatgagaaaattactgtaggatatacacctagttacacagttcagttcagacaagattaaccaccttgtagaatctttataaaagacaagccaagccaggccaggcacagtggctcacgcctgtaatcctagcactttgggaggctgtggtgggcagatgacgatgtcaggagttcgaaaccagcctggccaacatggtgaaaccccgtctctactaaagatacaaaaaatttgggcgtggtacagggtgtggtagtgcgtgcctgtaatcccagctacttgggaggctgaggcaggagaatcgcttgaacctgggagacagagattgcagtgagccgagatagtgccattgcactccagcctgggtgacagggtgagactctgtctcaaacaaacaaacaaacaaaaaaagccaagtttctcttcagaggtagaaaggtactcctctaatagatcattactaagcgttaagcgtttccgtaaattataaatgagttgcaaaacttccgatacaagctcctgtccaaacctaagagttgcaggtaaagtctggttaaaggtatccagggaagacttatagagcagagcaaacaacctacattgtaactgaaaattatgtaccgcctttttatcccccctaaagagacagggtctcactctgttgccgaggtgctaacatagctcactgcaccctcaaactcctgagctcaagggattctcccaccatagcctcccaggtagctgagactataggcgcctaccaccacacctggctatttttttttttttttggtagagatgagtgtcccaatgtttcccaggctgtgactgaactcctggcctcaagcaatccccccaccttggcctctcaaagtgctgagattacaggcatcagccactgtgcccaccctacaccaagcatttaaaaaacatatttcccaattctcactgtattacccattcaaggaattctatctttagaaataggaaaaaaaaaaaaaaaaaaaaggtgggggggaatagtctggtaaaaggttagtgtactctacactgagaatggtcaagttcaaatccacttctgtcatttattatctatgtgatgctggaaaaacatattaacttccctttgtctttgtctaaaatggataatacagggctgttgagaggattaaatgaattatttaaaaccactagatacatattaagattttagtaaatgttcattattttttttttaggttactcttactatttgactctatttctctaaattaaatgtagagtggtctctagagttggccttcatctctgtgattctagtaaaaatacaataaaatataaaataagtaaaataaaaaatataaactaatcaaatctttaaatgaacaaagtggtattataacgtgattggttatgacatgacactggctataaatacaatttacaaaagctatacagtattcactttaatatacatttgttaaatgaattaccaaaatgccaagattagtctaagaagtaaggaacaaaaaaggtcctaccttgtcaataatggactgcatatgagatttgtgagactggtctccataaagcaaagaggaccactggtccggtgcaattcgtaagcctgcttccatagcaatctgcactatctgggagtcatgttctcgccgcagagcttcataggttctaaattcttctttcagctgcatcaaagaagagtcttcatcacgtttggtgacctaataagacacaaataatctcataatgaagtcaaaaaaatgagtttatgctttatatgaacatataatttttaatgtaacaaatttagcatcaacagcaagattaaatgaatataccatttgcctgcaaaatattttctccttaacttgttgaggtaggtatattgctatcatcccattctgagtcaagttggatttaggccaacattttctggataggtctttcagaaagaataaatacaggctgagaatctcttacccaaaatgcttgggccagaagtgttatcagatttcagattttttcaaattttagaatatctgcattaaaccacttgagcatccttactctgaaaatctgaaatgccccaatgagcatgtgagcatcatgttggtgttcaaaaagttttggattttggatttttgtatagtcaatctgtatgtgctggaatgaaatccaaagatttgacatactttaacatatacattcagtttaaggtgtatgtgtgtgtatatgtatttttgaaaagaaaaaaatactaatacaattctatattctgaaaaacaatatgtttcttctccataaatgtggattatgactcttgggattgcctgacaatgagctaggtgggactgatgactgtagagcttcagatgctggtgtaattctaaaaatgatttaatttgtacttggcttaattcttcatggagttttgtgggatgggctactaccagaaagtgtaaagtgtgagatgctagactagaataatcataatgattatgattagaaggctggaggcaggagaattgcttgacccagaaggcagaggatgcagtgagccaagactacaccactgcactccagcctgggcgacagagcaagactgcatctcaaaaaaaaaagtcagaaaaataatactggatgtacaataaatgatacatagtgagtagcaatgtttgaggcggtgcttattcaatttgggataagagactatgtccagcattaccatataaactgaaatggcaaatggaacttcattattgtatatgtggaattacactaggagaaaatctctgaataaaatttatttggctgggcgcggtggctcacgcttgtaatcccagcactttgggaggctgaggcgggcagatcacctgaggtcaggagttcgagaccagcctggccaacatggcgaaaccccgtctctaccaaaaatacaaaaagtagccaggtgcagtggccctgcctataatcccagctactcgggaggctgagacaggagaatcgcttgaacgcaggaggtggaggttgcagtgagccgagatcatgcactgcactccagcctgggcgacagcaagactttgtctcaaaaaaataaaaataaataaataaaatttatttgtgcttcaataactctctcttcagaccaattctgcacagtcttggtaagaaattgatatagtttcttagtctcttcaaatacaaaaatctataaaccttgacttgatctatgttgttcaatattgaacatacaaaaattcaatataatagtatttaactataataagaccccatctacattctttaaaagaataaagaaaaattgctgagattttctgaaaagatacaggcaactttattaaactcaaagttttactacttaactttggggaaagaacaatatttcctttcaagctgagctttaatgtaggttcataccttgaaacaggaggctctataaaggagctgaacaacatgcccaatgctagttttagaggcttgaggaaaccgtggctccaatctttgcaccacaaacagaaccaatacttttcttgacaaagcagaaccatcttctaaggccagcagaaccaactttaaagcttcctcctgcattgctagggaaagttgggcaaaaccaaaatttatcaagtacatagataagataaatccatttattagaaggggaatatttaatcatttctgcagctattcaattaactggcaatacagttaagattaaccagcaacacacttttacaccatttttgtgagcaattttgtattacattctatatattttataaagaaaacagataaagtgattaataaatttaagaaaaacttctatcaaaatgaatgaacttcctgctacaggtgtgaaaaaaaggaaaaatcaaaaaattaaaaaaagaaacaacttttggcattaagagaaaagttttaagttcactaagttcacctagtaagtccactaagttacatggaattgcccaagccatgaacatcaaacaagatattagttggtaacaataaaatactgcaaagaactaggctttgtacatcacttataattcctacatcatacttttagaattaccagcagaataaatacctaaagttaattatgtacctggtccaaggaactggcatcccctagcccttactgctgcccaaagattggaagagagttgctgaggattctggtgctggagaatgagctctgtaactgttcgttcacctaaagatcgagctgccctcatggcacgaatcctgccttcttcttctactagttgacagtggactagagtcacaagcttcctctgcattgggcgactcagaacactctgagtagtgctgttcagacccactcctttaaaagagtaaagaagttattcctaggttcacaatgcaattttacagtccaggagcaattcttctgttgggttaacttgtgggtatgtgactagttctgggactactagagtatttaaaataagcaacaaataaaaccacacatgtaaagcttacttaagtatacatttttaaagtatacaaatgtatacatgagttatctcatgtgcacttagcattcattatgacattaaatataccattactcattttaatcatagaggaagaaagaaaaaaggactagacaacattgataattagtttataatgtaaatcttgaagtcctaagagttctggtatattatttgacagtggttaaccttattttcctaattaaatagcaagccctttctgtgcagtaatggcaacttccgtattcattataccgcctatagcatagcatataaaactggatagaaggcaaaccattcagaattgtcaaatgatggaaagcactgctgaagtaagtagttatatttgctattatcatcattcgaataatgtttccatcatcacataaactaaaaattcactattttatttgatgtggtttgtgtcatgatatttagcacaaaatgagtttagtttacaatagataaatttcattaacatttgcttaatagctcacaatttttatggtaacaagtctctttagtagacatttacttagtatggataattgcatcaaatttacctctagttaggttttttgggaattcctcaggacttatataggattatgtactgagtatttaaaaaagcagttttactctttaaataagaaacaaaaacaaacttacctctagcactgctgagcggttttaagtacaatgctaattcttctacacatttcttggcttcctcataatgctttgtgtcttcaaccccactacacaaagtaataggctgctgctcagggacctggaggccaaaagaaaagatctgtatgagtgctcaattcattaattgttttatttagtatagtttatgcactcataatgctgacactggtaacatcaaaacgcccactaaatttactgaattctttcaaaagatctttcctattaacatgtatctttgcattcctttgttttgtttctctaacagcctaattaagatataatcgacataccatacaactgactggtttaaagtacatacaattccctggttttcagtatattcacagttgtccaaacataaccacaatcaactttagaaccttttcattaccccaaaaagaaacacagtacccttttaacaattaccccttatttcttcccaaccatccaccaacctttggaaagacgaatctattttctatggatttgcctattctggacatttcatataagcaaaatcaatacaataaatagtcttttctgacttacttctttcacttaacaatgtgttcaagggtcttccaggttgtatcagtacttcattcattttcatcactgaataaaattccattgtataaatatatcacactttatttacacaatcatcattgacagacatataggttgtttctatttttgactactacgaataatgctgctatgaacatctgtgtacaagtttttgtgtagacaaaagtttttgtttctctttggtatatacctaggagtctgtatttaaccttttgaaaaactgccaaactattttccaaaagcagagtagcattttatatatctaccaggagtgtataagggttccaattcttctacattttatgtagaaagataattcttctactcattatctttttttattatagctatcctgttgggtgaaaagtagtaattcattgtggtttgtctaaattttattttaaattaataataattgcatatacttatggggtacaatgtgacgatgtgagatgactaaatcaggttaattaacaaatccatcacctcactttttttttgtagattttaaataaaatctactcttttagcaattttgaaacatacaatgtattactatttatagtcactgttctgtgcaatagatcactaaaggcattcctccagtctaactgaagctttgtattctttgataattatctcttcttcccatctaccttcctcccacttccctgtggttttgatttgtatttccctgatagctaatgatgttgaccatcctttcatatgcttattatccatttgtatatcttctctggaagaatatctattcagatcctttgcccattttgcctagtaaactttattttgtagaacagttttagatttacagaaaaatggcaaagatagtacacagaattctcattatcctgtattcagtttcccctattattattattattatttttgagacggagtctccctctgtcacccaggctggagtgcagtggcaccatctcggctcactgcaacctccgcctcctgggttccagcgattcttctgcctcagcctcccaagtagctgggactacaggagcaagccaccacactcgactaacaatttcccctattattaacatcttacactggtatggtacatttgttaaaattaatgagccaatatcaacatattcataattaacaactaaaatccatgttaatcagatattagttttcacctaatgttctttctcagtttcaggatcccatccaggataccatattacacttagtcttcagagaaagagtctcgctctgtcactcaggctggagtgccgtggcagcatctgggctcacgccaccacacccagctaattttgtattttattgtagagatggaggtcccactacattgcccagactggcctcgaattcctgggctcaagccatccacccaccttggcctccctctctccctccatgtctctccctcttttttttttcaaagttgagacaaagtctcactctgtcgcccagattggagtacagtggcacaatctcggctcactgcaacttccacctcccaggttcaagagattctcatgcctcagcctcctgagtagctgggattacaggcatgcgccaccacgcctggctgattctgtgtatttttagtagagacaggatttcactgtgttggccaggctggtctccaactcctggcctcaagtgatctgcctgccttggcctctcaaagcgctgggattacaggtgtgagccactgcgctagcccttcaatatctctttaagctcctcttggcttggacactttctcagactttccttgttttaatgaccttgacagttttgaggagcactggtctggtatgttgtagaatgcccctaaactgggatctaggatctgtcatttttctcatgagtatattggggttatggatttttggaagatcataggggaaaagtgccattttttatcacatcatatcaaagctacacaccaccaacacaacttattattgctgatgttaaatttgaacagctggtttagtcagtgtttaccaggtttctccactataaagttacataatctccacaaactgtactttttggaaggagtcactatgcgtagcccacacacattctacatccttgagagcagaatatctatgtaattaatttggaattctgcacgggagatttgtttctttcttccatctatttattcaatcatttaattgtatcgtgtagactcaaggatatttatcttatacctgggttatgatccaattccatttattttgttgttcaaactgttttagctttggccattgagagctctttcagttggctcctgtgtgcctttgatatagcccccattactctgtgtatgtgtctgtgtgtgttttgaatacttctctatactttccagtgctacaagctactccagactcatttcgtgtatttcctgtcccagtcttagaattagccatttctccaaggaactctggttccttttattggagaatggtattagaaaccaagatatgaatgctatgtatgcacattactattggggtgttgttccttctaggccatcttagatgacagaccaaggaaatatgtcactgtaataacccgagatatacattgtaataacccgagatacacacgagatatctcgtatatctatttctgtatataaccatctgtatccatatcaagctaaaaatgagttcatactgatgcctccaactccaatccattatcacatgaatcactctaacctcttcctccttgtttatctgttaactggctccaatcatttcccattcacttacttaactgttcaattctaatatgtattatacatacagcagtatcagaattaattcgtacccccatgggaaaagactagagtacactgcttatagataatatctttctctatctttaatcttacacaatctacctttctcctacacccctttagtgaaattgtttcatatacttcagattgtcttccataatctttgtaaagttctacagtttttgacaaattcagagtgtcatatagccacaattacagaatcataaagaactgttttactgccctaagaaatactgtttcaccaattctatcctccctccctactcctgaatccatggcaaccactgatacttttattgttgctatggttttaccttttacagatatcacataattggaatcatacagtatgtggccttttcatactggtatctttcacttagcaatggtatacattgagatatatctatgtctttttgtgacttgacagctatgtcttttcattatttcattttatacaatgtgccattgtatggatataccactgtttatccattcacctattaaaagatatctcaactgcttccattttttggcaatcatgaataaagctgttataaatagtcatgtgagggtttctgtgtagacataaattttcaagttaactgggtaaatacctactatgttaagcttataaagaaactgccaaactgtcttccaaagtagctataccatttttcatttccaaaaagatgagagtttttgttgctccatatcctcaccagcatttggtgttgctaatgttttggattttggccattttaatttgtgtgtagtggtatctcacttgttttaatttgcaattacttaaagacaaactgctgagctacttttcattttgccaattttccaactgtataatctacttgacgaggtgattgttcagctctttgtccattttaaaaactgggttgtctttttatcactgagttgtaagagttccttatatattctacatataagtctttatcagaaataggattttacaattgttttctcacattctgtaggttgttctttttgctttcttgttggtatctttgttttttgttgttgctattgtttttgagatagggtctcattctgttgcccaagctacagcgtagtgctgcgatcgaggctcactgcagcctccatcaggtgatcaggctcagatgatgctgccacctcagcctcacagataggtgggaatacaggcatgtgccatcacacccagcaattttttgttgttgttgttattttctgtagagatggggttttgccatgttgcttaggctggtctcaaatgatccatccatcttggcctcctgggctcaggtgatgctcccacctcagcctcacagacaggtgggactacaagcatgtgccaccacacccagcaaaaaatttttttttgtattttctgtagagatggggttttgccatgttgcctaggctggtctcaaatgatccatccatcttggcctcccacagtgctgggattacagacgtgagccactgtgaacagccaattgttcgtatctttgaaatatagtttttaattttgatgttcaacttatctttttcttttgttccttgtgctttttggtgtcacatcttgaaaaaaacccactgcctactccatggtcagaaagacttatgtctatattttcttctaagagttttgtagttttagttcttatatttagcctttgatccattttgagttaatagagtaaatgtttattcaagtttttttttttttttttttttttttttgagacggagtctcgctctgtcgcccaggccggattgcggactgcagtggcgcaatctcggctcactgcaagctccgcttcccgggttcacgccattctcctgcctcagcctcccgagtagctgggactacaggcgcccgccaccgcgcccggctaattttttgtatttttagtagagacggggtttcaccttgttagccaggatggtctcgatctcctgacctcgtgatccacccgcctcggcctcccaaagtgctgggattacaggcgtgagccaccgcgcccggcctattcaagttttaagctacttttaaacaacgatttgtagtcttcaaaatatagttttacattttttttttttttgacagagtcgctctgtcacccaggttggagtgcagtggtgtgattttagctcactgcaacctccctctcctgggttcaagcgagtctcatgcctcagccccgagtagctgggattacaggtgggcaccttcacacctggctaatttttctatttttttggtagagacggggtttcaccatgttggccaggctggtcttggaactcctggcctcaagagatctgctagcctcggcctcccaaactattgggattataggcatgagccactgcacccggtctaattttacatttcttttgttaaatatattcttaattttttttatgctcttgtagatgaaattgatctattttcagattgtccattgccagcgtatagaaatacaacatatatattacttatttaacagtctttattaagggcctatgtaccagacagtctttcttacgtgtgtaagaaaagtattattattattatttattttttttttttgagacagagtgtcactctgttgcccaggctggagtgcagtggtgcgatctcggctcactgcaagctccgcctcccgggttcacaccattctcctgcctcggcctcccaagtagctgggactcctgcctcggcctcccaagtagctgggactacaggcgcctgcaaccacgcccagctaactttttgtatttttagtagagacagggtttcactgtgttagccgggatggtcttgatctcctgacctcgtgatccacccgcctcggcctcccaaagtgctgggattacaggcgtgaaccactgtgcctggcctaagaaaactgttattaacatactgtggatgaaagtatgcaacactagctgggtacggtggctcatgcctgtattcccagtactctgggaggtcgagacaggtggatcacttgaggtcaggagcttgagaccagcatagccaacatggcgaaaccctgtctcgactaaaaatacaaaaattagctgggtatggtagtgcacacctgtaatcccagctacttgggaggctaaggcatgagaatcacttgaacttgagaggcagagattgcagtgagccaagatcacaccactgtactccagcctgggtgacagagcaagaaaaaaagaaagaaagaaattatgaaacactgtaaacacatttttacaccttagaaagacttttgctttttcagacaactgatacttatatactcatcttatatcctgcaactctgcctagttttttgtttctaatagcttttcctttgcagattccttaacattttctatatataagaccatgtcatctgtgaatgagattgtttttattttttacttcttatctgaatgtcaccggtttcatttacttgcctaattgccctagctagaaggtcctgtatgatgttgaacagaaatagttaagagtggagatccttgacttgttcctgatcttacagaaaaagcatctagtctttcaccattcagtatgttagctgtgggtttttcatccatgtcctttgggttgaagaagtttttctcctagttgtttcagtgcttttattatgaaaaggtattggattttgccaaatgctttttctgtgtctattgagatgatcatatgtgtgcaattttgcaacttttactgatatagtgaattacattaattgatttgcagatgttaagtcaaacttacattcctaggagaaattggtgattatatattttaaagtctaatttattttttctttttccttttagatgaaaggaaaatttgggaaaattttattttttttattgtgataatatatacataacacaaaatttaccatcccaaccatttttaggtttataaagcattaagtgtgttctaatggttcccaaatgttgtgctatagtttttgtcacctttctcatctttcatttcagttaatgtctactgagtaaaactgcctgaagcagctgcaccttctctactgagtaaagtgcagtggttttatgaacaatagttttctcaatgttaaaaaaggtccttatgacttacctcttaggtttcttttctttttttgagacagggtctcactctgtcacccaggctggagtgcagcacgatctcggctcactgcaacctctgcctcctaggttcaagcaattctcgtgtctcagcctcccaagtagctgggattacaggcacacaccaccacacccagctcatttttttgtatttgtagtagagacaggatttcaccatgttggccaggccggtctcaaacacctgacctcaaatgatccacccgccttggccctcccaaagtgctgggattacaggcatgagccaccacacccggccttaggtttctctagcgatctgcatagctaggtttattgaatatctgacaagattaaatggatgttactgtactatgactaaaaagcactggactaccacaataaatctaacatgctgaaataaaggatttacagtaccaaacagaattatacctatttaaatagaaggcaatgttacccaattttaattcaacaggtttctctcaggagaaaaacacgcacaacacacacacacacacacacacacacacacagagagagagagagagagagggagaaatttaaaagtattaagtcacccatcctacctgagcacccacgagctgcagcaatgctgagttcacagggaggagctcaatgtctgtattgatagtggtctggtcaaatgggcaagccttgcggtggagtttattcaggcacatcttgcagacagtatggccacaacccaaactgatgggctttcgaattgtttcgtcgaaagtctgagtgcaaattgggcaggagaggaaatccgtccattgtggagcttgtacaggcattgcttctggagttacaattcacgaacacaaacacacacacaaatctaaagcaaagattccactggaatcaaaatctttgaaaaaaagtttatcttttttttttttaaatatcttctgtagatacagtcagcacatagtgtgaaatataacctgaaaataaagaaaaaggaaaaaaattgagtgtctttcttttcaattaaactgttgaaaaagaaccacaagtccagtcttattccacaactttttataccacatttgtatcactgtaatccatctttttacacttttacagaattagagccatgatagaacatctatttccattccctcattttagagatgggaagtagtcccctgcctaagaggaaacttgaagttaataataaagttccatccaggaccctagtctcttaagtttatctaagtcttttttttttttttgagacggaatttcgctcctgttgcccaggctggagtgcaatggtgcaacctccgtctcctgggttcaagcgattgtcctgcctcagcttcccaagtagctgagattacaggcatgcaccaccacacctgactaattttgtatttttagtagagacgggatttctccatgttggtcaggctggtcttgaactcctgacctcagatgatcctcccgccttggcatcccaaagtgctgggattacaggtgtgagccaccatgcccagctaaatctctaatttttaaaaaataaatatatctaaaaaataatcttggctgggtatggtggctcacgcctgtaatcccagcaatttgggaggccaaggcaggcagattccttgaggtcaggagttcgagaccagcctggccaacatggtgaaaccccatgtccactaaaaatacaaaaattagccaggcgtggtggcaggcgcctgtaaccccagctactcaggaggctgaggcgggagaatcgcttaaacccgggaggcggaggttgtggtgagccaagatcgcgccattgcactccactctggggaacaagagtgaaactccatctcagaaaaaaaaaaaaaaaaaaaaaagctttgttggggaagggggtagagggagggaagaattactgaacaagacataaataacttttgacagccaggcgcggtgtctcaggtttgtaatcccagcgctttgggaggctgaggcgggtgggtcacttgaggttgggagttcaagaccagactggccaacatggtgaaaccccgtctctaccaaaaatataaaaaattagccaggtgtggtggtgcatggctgtaatcccaggaactcgggaagctgagtaaggagaattgcttgaacccaggaggtggaggttgcggtgagccgagatccgccactgtactcctgcctgggcgacacagtgagactccatctcaaaacaaacaaacaaacaaaacttttgacaacataagaatattttaaaagtagaaacaatttatataaacatatgtttcctctgtatttataccacaatcttgacagactcatacaaatttttcaggctgggtgtgatggctcatgcctataattccagcactttcagaggctgagatgggaagactgcttgagcccaggagtttgagaccagcctaggtaacatagggagaccctgtctctacaaaaattagccaggcgtggtggcatgcacctgtggtcccagcaacccaggaagctaagggctaaggtaggaggatcgcttgagcccaggagtttgaggctgcagtgagctacgaacatgtgactgcactccagcctgggtgacagagcaagaccccatctcaaaaaaaaaaaaaaaaaagaaaaaagaaaccttattccattcccaggaaaaatttaatttagttaaatgacaaaaaaatgttttattggtctttactatgtgttcagtactaacgataaaaaaaagataagtcattctaagtccacatggagcttgcactgtttctttcactaaacatataaacagcaatcacataactaaatatataattgcaagttatggtaagtgatatgtaggtaaagtacagggagatacaagcatatataacagaggcaacctgaccaaattagggtggagctgatgtacaggtaagtgatatttatggtaagattttaaagatgactgctgaacgaaagttaagggaagaataatgtttaatatgtgtggtatagattctaggtaaagaaacagcataaccatagattctgagactagatagaatatagtagagatgaggccaggcatggtggcccacacctgtaatcccagcactttgggaggacgagacaggtggatcacctgaggtcaggagtttgagaccagcctgaccaacatggagaaaccccgtctctactaaaaacacaaaattagccaggcatgggggcacaatgcatgtaatctcagctacttgggaggctgaggcaggagaatggtgtgaacctgggaggcagaacttgaagtgagccaagattgtgccactgcattccagcctgggtgacagagcaagactccatctcaaaaaaaaaaaaaaagaaaaagaaaaaaagaattagcaaggaccaaagaacacaggatcttctaacttatatgatggtatttggttactatatgaagagtagtgtaaagccactgaaggggcaggaggtgactcactttattgttttcaatgttctcctgtgatattattctcaccaatcacacacagtccactatgatctccttcaaggctcaactaggaagagtaacaactatatgtcttttctcactcttgggccctaaagcactcatatgctgctacaccagcatgatgcttactttaagaaaacctgatatgtaaaaatatggaaaacagattgattacagtgattgtccatattacagaaagataataaactttaccaaggtatttataataagatttaaaagaccagaaatcgatgcaattgaaaaaattgggctgggtgtggcggctcacgcctgtaatcccagcactttgggaggtcgagttgggcaaatcacctgaggtcaggagtttgagaccagcctggccaacatggtgaaaccctatctctactaaaattacaaaaattagccaggtgtggtgatgggcgcctgtaatcccagctactcgggaggctgaggcagttggactgcttgaacccgggagggggaggttgcagtgagccgaaatcacgccgttgcactctagataaacagagacataccagtgctatgaaaatgtatggaaagagactcaaaatacattaagtaaaaaaaaaagccttgaagaccaatatatatgacatcatttgtgctgagggaaaagaacccttacatattagtctacgtattaatatatgtaaatgaatggaagaaaaaggtctgaaaagacactcaacaagctgtaagcagacagcaaggtcttcatggactataggaattaatcaacttgaacaatcagcctgttttatagcctcctgccttgcagcctatttttgcctaaaccctgtgtagaatgcagtcacctagacagctggaaccagttcctcacagaccctggccactcacagataaacctgagtgaactttcctcgttaccatgctaaagtctccatcctgggagaagctatagcttcactaccatagcatgtgacctacgtccgggcataaagactcactatatgtgcaccactgggacccctcctctacatgcagtgacataccctctcttccctctccatcgccccataaaaccctcctctcactttccctcagagacccactgctttggagaatactcccagtgctctccttacttgtgacaagtaataaaacttccattgatcaaaatctgtgttcttgtggagtcattttttacttgaaaggcaaaggaattctgttttttttttgggtaacaaaacttaacggcactgccaggcatggtggttcacgcctgtaaccccagcactctgggaggtggagacaggtggatctcttgagcccaggagtttgagaccagcctgagcaatcaagtgagaccccgtctctacagaaatataaaaaatttagctggacatgggcacctgtagtcccagctatatgggaggctgaggcaagaggattgcctgagcccaggaggtcggagctgtagtgagtcatgtttgctccactgcactccagcctgggcaacggagcgagacctgtctaaaacaaaacaagacaaaaaaacttaatggcagttacacagttgggcaacttacaaaagtatgtaatcatgaattacttatataagtacaaataaattgaaagagtaacacaaagctagagtacacttagagtacaatttaagcttcttaagataatcactctaaaacgattcaaaacatttgtcctaatattattaatcttcttttacacatttagatagccaaatatcaaaacttattagttcttttcaaaatttaagaaccttaaaatagtttgtaacttatcccttcaaagaattagcattcctttattaattttgtttatcacctccatctctattaactttgtaaagtaaggtatgtagttgttaatctcttaaattttctagtaaaatagttctttgacacaactataaacaacttgatagaataaaaatacaaaaatcagcaatcagttcttcattaaaaataaaagcattattttgaccataaatacaggtttgagagaccaaggggaaaataatattaaaccttgactttttctgggaaatttgatgattaataacagaaagtcactcttagatgaccctatttcaggacttaaaaaatcacaaggcaaagatttttttgagactcaaagtgtcagttaattgtagatcatagatctaagaagaatttccatttcctcattctttaagtatctttctctaaacgcattcttccaaacattctccaagcttctcaaagacagtttatatactcttcaaccacaacatgtatctaaaccacaaaagacatgatttactaaatacaataagcattctttcagtcaaaagtaaacatatgaaataaaattattaatataccaacatccagattttttgaacttcctcagaaaaaggtatgtcagcaaactaaaaaagggccacaaaacaaaaacagctgtaaataattctactaatcaaagcacatgcattcaaggcctgcagataaactgttgggggtcaggccaaatctagttcattaggagtatttctattggaaccttccaattgaaacagaagacaaatgatgagccctctttatttccaaaaagattcaaaagagtgacactgctgctcaagtatgaaagcaatgattagtttccccaccagtttaaataaggacacctctcctacaaaaatgacgagattttactgttgataattgctaatacagaatatacatgataattaaatagcaatcagttcaagggtctgacctaagacccaagttcaaaaataccatataatttccccaattatatatacacatttttacaccactaaagagtgctcacagaaaacactgaaaagactgctttattcagttatatgccttgttcatggcattgactgaagctacagtacagaatatcacatctgacatttcactattaatttatcccaatgtctaaattctggttaagaaccaccactttcttaaatctctaaacttttatcactaatattaccatttgactttactcaggttttttttcttaacaaagaaataaagatcttattatcaaaataaaaaaattatttcagctaggtgctgtggttcacgcctgcaatctcagcacttttgggtggctgaggtgggaggatcacttgagaccaggagtttgagatcaacctggccaaaaaggcaagaccttgtctctataagcaaaataaaaaatgagcagagtgtggtggcacgtacttgtagtcccagctactcaggaggctgaggtgggaggtatgcttgatcccaggagttcaaggtttcagtgagctatgaccacaccactgcactgcagcctgggcaacacagagaaaccccatctctaaaaaaaaaaactgttgggcgtggtggctcacacctgtaatcccaggactttgggaggctgaggttggcagatcacctgaggtcaggagtttgagaccagcttgaccaacatagagaaaccctgtctctactaaaaatacaaaaattagcaggcacatgcctgtaatcccagctactcgcgaggccaaggcaggagaatcacttgaacctgggaggcagaggttgcggtgagccgagatcgtgccattgcactccagcctgggcaatgagagcaaaactccaccaaaaaaaaaaaaaagagagagagagaaagaaagatatgaattataaacaacaaggctacttgcttgggtccaccagctaagtaactagtttgtagataccaaactccaagtcttacagctcccttagctgttaaattcaaatgtatgcctctgcaaaataacaaataactacatattgtgagcatcgatgtttaagtatgattaaaacattgtcaatgagcaactacagacaaaattgtgatgacatgatgcatctggaaagacgtagaacagctttgttttctgaaaatcaatcatgtgtcagtcactgtgctaggtgttttcagatgtttctcttatttaaatatccacaatgtggactaccaccaataaccaacatttgtgaagcaaaaactaggatattatactttcagtgctctatatacagtatctaattaatgttcacagtaacactgtaatgtagttattatgcccattttaaagataaggaaaccaaagtacccaagtcacaaagctagaaagtggcacgactaagactcaaactcaggacagccaaactcccaggctggtactttgaaactctataatttgtgccaccacacgaataaaagtttatagtaattatggcaagggagctcttgggagtgacagaaatgccttaaaattgtatggtagtaatggttgcacaactctgtaaatttactaaaaatcatttgtgtatttaaaataagtgaattctatggtatgtaaattatacttcaataaagctgttaaaatagtcattaagggctttttaatagtcttagttttcaaaaatgttaagtaataatgtagaaacatagaaactattcgaatctgttctatgagcacagcaatagccctattaaatagctaaattacattgctgtgaagatttcatttaaacatatgacacatttattaccatctcctttattataggttcattttatatgttcctgatttagagagagaaaaatggaaattaaaattcaactatctactctgagccaggcactcctctgaggcattactatgcccattttacagaagataacttgaggtttggcggcattaagtaacggccccaaatcaataaactgttgagctgggattaacaccaggtcttacatatctgaaatataagttggcctgtgaaaaatgtttttatcaaacaaaaccacactgtctgtaagaagaaaatcttggctctcttcccactatgcccgatgagatgagattttaactcattattcttgaccttaacttaatttttcatttctctggaacatttccatagcaaccagcatgtagggccacatcagagaagagaaaatgtttcactgccttgaaaaatgaagctagaagcaggagataaaaacacaaagaagaaaactaatgaaggcctattataacacttaattttttaatcctcagcagagcatcaactaatttacagtggaaatagagtctaaaatttgaggctcaaggtttttccagcaataatatcttgtgaacaaagacccagttttgattgtaaaaatacatcttcccaaaatgtatggactgaattgtaaccctatatatacaaaatcctggatgtaaataatttaatatgattatgttagtacaaatggataaatacttgggacaggcataaagagaagggcttctgagttagagggaaaaaatagcttgaaaaatagaacttgataaagaaaggtggaggaaagttcaaggggttaattcaggttgcttactttttcagcgttcagaggcaaaaagaaaaatttctatctccaacctaataccagattgaggagaagtagtaagaaaggacaaaatcattcatggagaagccgcctgacctgagtttgaaacagagtgcctgagaaagtaagacagtctttaactttacgtatgtagtttgaatctccaggttcaagttatgcattatatacaaatgtgctacactaaagagggcattagccctcattaattatcaaagaggtggcagaatgatgtgaccagactcaaaggcatcatctttttttgtttttgtgtttttgacacagattctcattctgttgcccaggctggagtacagtggcacgattttggctcactgcaacctccacctcctaggttcaagccattctcatgcagagtagctgggattacagatgtgcaacaccatgcctggctaatttttgcatttttagtagagatggggtttcaccacgtaggccaggtctcaaactcctggtctcaagtgatcagcctcagcctcccaaagtgcagggattatataggcatgagccaccacgcccagccaaaagcaccatctttaaaggtagtagaaaggaaaatttaccgattaagcaaaaaagcaaaatgttttaattttttcagtttttgcattaacactctgttgaatattacatatactatactatcaagtaaataaatttataatcaccaatttagtgttagtacaaacactaaggatgtaataaaaactggttactaagatcaggagtatttttagtatacattgagcattccagtttactcattaccctcaaaaaattttacaaaattgtttgctttattatcttaactgcttttaaattaatcataaatttctgaaactgtttttttgttgggggcgggggaggtaaaagttgacatctccttcttaatcaagcttcttttctaaatcagaaagatatttcaatcccaaaatgaaagattcatgtatacattttgaagatgaggccaaatattttaacaagactaaacagttttccaggtcatcttttgaaatcagtcctcttgctgcaataatggttcatttttataaaggaagtttactcctcttgtccagttattttgagacacacaaatctgactggcaaataatcatgtgggatgcagggacaaataatcacaatggaaagaaaatctaacctgtgcctgataaatttatgtttcaggttgttaaatactatcctatagaatcctcaggaatatgatgaaattaagacattttagagggtggcactaatattctgtttcttcaacttgtccttcattattagttctttccccactggcatgcttaaatctttgttcaggagctgaaagaaatttgtctccaacttgtctcatctaaaaaagtcattcaatccttgtccctgtttccatccaccactattgtggaataattcttaacaagcacattaagaaccttatgaaattcaagagtcatatctcaattcttattttacttctttctatatagcatttaataatattaaagttactcctacaaaagctgcccttttctaggttctatacaacatactgtccaatgattggcaagccactccttgcccatatctattgagggcttcttcttctctattcatccttggaatagtgttggttcttagaattccttccccagttctcttccctagaaagtttccctgagtaatttcatctgtttttatgttttcaactaccaactagatcctgctgacttccaaatctctctctcaagttcagacttctcttctgagtgccagggccatataaccagttgactactaagtcatccatgttcatctcctccccaccaaaccttttgttctctttgtcagtgactgagtga

SEQ ID NO: 461 - DNA, 195476 bp, Homo sapiens
cagtccctttcaaaagaaataaaaacaaatgtaagaggagacataatttaaggaaacagaaagagagtttggactttgtcatcttatactggacttggcagtgagatgtgagaatgaccatctacagctatcactagattgaattccaggaaggttcagaagctgaattgacgatgagagtcaccagcaggggagtaatggatagtatctattgctttttctgtgatgagtggaccagggcacaaagagttcaactgatttgcttagaatcatgaagtaggttgtgccaatattctgggtgacacaggactaaaaggaggaaatctaataacaatctagaggatttctaagtctggctaaacctttggacctggttccagggccatcctctacagacccctctataggtaaggacctgctgagtgtggcctggcaccctgaggttcacagcattattggtttggttacttgctcttctgcaggaggcaggtcacagttggataaaactcatgatctaagagaccccaggtcactctccctgctgattgtgaccctgatttcctaggttctaaggtattcagggatgatttttgagatgccatttggcctctgacaattagacccatcataataatatctgatatggtttggctgtgtccccacccaaatctaatcttgaattcccaagtgttgtgggagggacacagtgggaggtaattgaatcatgggggcaagtcgttcccatgttgttcttgtgatagtgaataagtctcacgagatctgatggttttaaaaacaggagttctgctgcacaagttctctgtctttgcctgctgtcattcatgtaagacatgacttgctcctccttgccttccaccatgattgtgaggcttccccagatatgtggaactgtaagtccaattaaatctcttcctttgtaaattgcctagtcttgggtatgtctttatcaaacatgcgaaaacggactaatacaatgtccttagaggatatcacagaaaaaaactagagccctcccttccggattccaacaccctagaattaaatgagataaaagaatgacagatgcaaaagaacaagtgtaatgtatgttacaacatgaaataattatgaccaaagggcaaatattctagattattctttttgaaagttaaactaggtgaactttaaaaatgcctgtgatttctggtttaaactgctatgtagattaaaaactttataggtttttaatttatctttaaagaaaaaggttgggttggcactgtggctcacgcctgtaatcccagcacttttggaggccgaggcaggcggatcacaaggtcaagagattgaggccatcctggccaacatggtgaaaccctgtctctactaaaaatacgaaaattagctgggcatggtggcgtatgcctgtagtcccagctacacgggaagctgaggcaggagaattgcttgaacccagaaggcagatgttgcagtgagccgagatcatgccactgccctccagcctggtggcagagtgagactccatcaaaaaaaaaaaagaaagaaagaaaaggttactgaattttaaaaaattaatcctatgtgatccaatttcagttccactcacattctttatgagtaaagtctggatgttaataaaatgaaagtaattctacgtaatctgacttaaaggcaagtcactgtagagggaaaccaggataaaaataagtgtacttaagtcaagtgtgtagtttgtacctacagaggcaaacacaggcagcttggttcttaagagagctgcccacttggagttctcccaattaagaagttggagacaaaaatccatttttttttctatagttgtatgagacttttaggtatgaatcagcttcagttgaactacattgaatttttagcatggtgtgagataagagtatatttataacactgtaggatgactatagttaataatattatgtagtttcaaatagctagaaggaggatgttgagtgttctcaacacaaataaatgataaatgtttgagatgatggatatgctaattaccctgatctgatcactatgcatgatatgtatcaaaacatcactatgtaccccatgatactgtacaattgttactttgaactaaaaaatttttaaacatttgaaaaagtaaatgtaactacaaaagaccagaatggtacactgacctttcagattaactttagatattagacattgtattttcaaaaaacatatcaacaataagtattgctacaaatcattgatgagatagtgtgcctatgtcacttaaaatttctctgcaattgaagatacattattaaaggagccattgattttcaacaccaattgctgccaaactcctgctcaatctcttcttgttttgctatggaattactcctttactgcagtatgaatgacttcttttttccttttaaaacagttattatggatcctattaggttttctaagtactagacagtgattgatcttctttttcttataattactcccctgaaaattgactagcagttaagacactctgaagggcctgagtaatttgatttttgtaggcccggtgctccatgaacccttggaggggtttagagagcatctcattccagtctagcacaggcaggacactatacacatgagggctctgaggcctcaagagggtcagcaatctcacagagcatcagatatgagtatttaaagcaaagcatgacattaaaagttatttgtcttcatgtctctaaaatgtctacctatttaggatttttgaaatataatagcaacattcattgctgctgtggtagttggtagtactgatgcttctcaatgctggtctgtttgatgatagcaatacccaatttctcagtacatttcctatatgaatacagtggcactgcagctttcttctgaatttctgaatacgtagccaaaggctatagtcatatttccttttgttaacaatcctgggtcatccaatattcatatctattattgtctcataataataaattaggatctaaagcaaacaagattaacttataaagtagctgctatatttcttccaagtgactcagaagtaacatgccttgctgtttattgtttctatttaaaagtggaatatgctttatgttttgtgggcatatcaaatgttttactcatttcttgatatcattttatcatttctgaaatagacatttggggtgttttctgctttgtgagaggcatttttgaacaaatgccaggttttagtctttgtttttatgattataaaccacttcattggtgaacagccagaggagctgagctctcagaaagctcccaaatctcctgagtgtgagtctctgtgtgctggctgcatactgactgtgtccattttactcaactccaaaacacttgcctgcttcctgctcacccctgtggctctgtgccagtcctcagaacgtgtttgtgagtaaaggtatgtcctttgtctacactgcattcttggatgactgtgctgtcaaacgagaaatggaaaagcccctctgccttactttgtttctctgaataatacaaatattgcagatgatgcatcacattatgaattttcatagaatactgcaatgtatttgattctgtttaattctcaaaatagccctctggatattatttccattttagaaagacggaattgaggctcagaggtggcaagtgacttgtctgagattattttgttgtaaatggcacttccaggcccttaactcaggatttctgcctttctgcctcctacctctgcatcacagctgcctcaacctgttgttaattttatattaagctgtattaattggggctaggagtcttcataatgctaaatgtaaattctttgttttgttcaatgttcttattttatggttggcaaacaaaaacaacaaaacagcattgacaacaacaacagaaacaaccaactgaagctgcagcttttaatctttctaaagacaataggctaaagtgaggtcctcataataagatgctagtcaccaggaaggaagccagggaaaatctcctcccagggggtaattgatccctattggcctaacactgcatgtagcactgagttaggaggctccatggagaagtgtctgcttcttttcctctgctgtcagaacaaagttcacaaacaactttgttttccccacacctttggagttagctagttagggcccctatttatgtccaggggaccagacctggacatttgtaaaagaactgaatatagatggatagctaagaaaaaaacaaatgttaagattatcattatttatagcccaatgatttagtaatctaaaaaaatccaagaacaacaaaataatccctaagaaggacaagaattttaaaacatgcagtttagaaaaccaaatttctcaggcctagagctcaagtaaaagaaaatctgagataatgaagtctggaacactgggcctgcattctgctcctgactctgtgcccttgggtaagacattgaacttccccaccccagattcatcctacaccctaaggagggtgtaggattttgtagccttcctagtgatggcatactattaatcagaaccttaaccagctctattctcactatcccagtaaaatgatgttaaaaattagacctcgtgacatgagagaagaggggaaattaattacagattacaaagaaattgtgggatctaagtttagggtgaggtgttttattgaacctctagggttggtcatagcacctgccatatagcaggtattcaataaatgatgtgtaatgggtggttagactgatggaaaggcaggccttcccagtgacggtaaaggacctggggcaaaagagacctgtggttgagtcctgatccccacacattagcacactgactagacgaagttataagcttcaatttcttcctgtgtaaaatggagataatacctcatagggttatgaggattaaataagaaaatgcttagttcagtgcctaatacacaggaagcacaccgtaaatattagttattattattactaatactgtgatcatatcttccatccaaagacttctctgaggagcagggggcatccagagataaaaagcctgcaggtgggaaatctgttagccttctagggcgttaggtttctgtggaactctgcacctcttccctgtcctagttcttaagaacagaaactctccagggacctctggtgaggtagccgtgggaagatgaggtgcagaagtaagctgggacctgtgagcctcaatttcggcctcttctgcgctgagacccaagcggatcttgcttggcctgtatgcgttactgggggaaatggacgtgggcctgagcgcggcaggtgcgagggcgctgccccggggccgaccaccctgcggggacactgtagctgtcattccttcttctgcaggcgggtaggggaagcggtggccaaagtgggagtcgaccgctcagcacagtctgtctgagtgttgaccaggaaagtccaggctctttctaaatctcgccgccagacctggtgacgcattcgcatgtatttaaggcgtttgcacgcagaacgttatcacagaatgtagccacctttcttaacggtccgggaaaccagaggtctctccagctactcagggtagaggaatttctcctatctccatgtgacatcttctgatttagaagaactaatgttagatttctcttgggcctttccacctacagctatagtcttccctttgtttagctaaaattgaggcaggtaggaaaatattattgggggcataagcctattagtgtgtaaacgtatttttatgaagtgtgcctccagggagccattaaaaactgacctctcaaccacagaaatagatgagattttgagaacattgagaagctgccttttgcaaagtaaatttgcaatggtccttgacgaaggggggtcgggggcggggagaagtccagccgagagaggagctcattccacgctatatttttgcagttgaaaagctgcctaatcatcgctaaccgcttcccgcataagagttctgggaagacttcagaaacaaggcaaatgaagacttttcactgcctccttcgggctgtcgcttccggaagccgaagtcctagcacgcagagcagcaggagagggttactttcaggcaattccactgagcaaaataaatcacttaatggcataacgttctggcttaaaaaattggaatttatcagaggcaaaaatatccttcaagaaactatggacactccgcgccctattcatttccatggcagcagagtatctgcatcttgagccacctatacagattcatgcctcgtatcgctctcacctcctttctttttgaagtaaagccctttcccaagaaggcggccagaaagtggaccccaccgggggaaaaagaaaaatgaaacgcaaatcagcttggcactgcttgcgtcttccaaaacgcggtgggacaaggctattgagtctatagctaattctttcatgtatataaaatgtatacatatgtatatatttttatatacataaaagaattcatatatatgtatatagctatgtggagccctgaagcaattctccatgcttttgtctccctcaagttccccaggtggaggcagtcataagcattataagccgccttagtgaccaccagggacggaaaccgttaattatcacgtttcctttcatctccaggggccctttggcccgtgacacaagaggcttcggtattggcgctttcccagaactggcccagaggagccagttcagagtgtgaggtcgggtctgcattgaacgtacacaccgaggtctatcagactcccccgattttagcgaagggtgctgactgctgtgctgctagaggctagcaagctccctgtgcgcagctgatgagtttcagcaactcgccacctgggcgcttttctttaaattttgggagtaaactgggaaaataaaaaaatctccacgtccactggctctctccccttctccaacttcctctttcgactcgtttgtgggagttttctcctctttgctgggactataatgtgatgcgcaatcgtttgtgaatgaacaaaagtcaccggcaagcagggagacggggacagatcgctgacggcagattgagggtggcagcaaaggcccggcctccaaggataatggggagccgttttccctcacgcctggtctctatggcccccttcgtcttccaggtaaaatgaatgttccttcatccatcatccgcagagtaccctcaggcgtgcgtagaatctgctgatgaaacctattagcgccgactgggcagctttgtggagccacccgaggctctccattgtggcctttgtctgcagaatttaagcatttacataatgcattagcacggaactcagcacccggtggggacatcgcgtgccaagcctggcgcggccaacgcttcagcggctccctcacccggcagctccctaggaccaccctcgaggaggcattggagtcgggctgcaggcgcacgggcaaagaacttagcatctcatccaagtacttcgccttccttggccgtctccgggaggttatgcttaaaaacataaaaataaaaataaaaataaaaataaagggaggcggacaaagtttcggtgggtgaactgaagctgggtccatgtgaccctgaagccggagaaataaacttaacatgaatcttgctttcctggcgggcgttgggaccccgccgtttttcatgccaaccgttggaagcttcgtactcaacggccacaggtgcctaggagcgcagagaggcctcgggttcaaatcaccggcgcgcagggactggactcgcgggtagcgacccccccaacccccccccccccgccctacacacacaccctcgcgccggctgaaagcatggaggattcagggcatttgaaaaaagaggggctgggcgcggtggctcacgcctgtaatcccagcggtttgggaggtccagaagggcggatcacttgaggtcaggagttcgagaccagcctggccaacaccagcctggccaacatggtgagaccccgtgtctactaaaaatacaaaaattagccaggcgtggtgcctgtaatatcagctacttgggaggctgaggcacgagaatcgcttgaacctgggaggcggaggttgcagtgagcccagatcgcgccaccgccctcctgctctgggtgatagagcaaggcactgtctcaaaacaaaacaaaacaaaacgaaagattcggtcaggaaagaatctgcaggcattcgaggcgctcgcactttgcaaagtaaatgcaatctctttattaagccgaagtccctcatatctatccttttagaggaaggtggtccaactcagaaatctctcccaagaggactttccaccgaagactaccgcgaagtgccaggaactcgccccagtcccgacaggtgcaggacctttcgtgccgccacaccttgggactctacctccctaaataggccacttaaaagccagtagtgcaaccgggatcccgcggcgataaagaatcactgtgcagaaccctggagctgggagtcggcccgcccccctcccaaagaaaccgggatcccgcgtcctccccgccgctagcgcagcgcgccagcggcgcccaatcagtgagctttccgggtctgtgacggccttcggctccgccccctcgacggccataaaaagtcgcagcgaagcctgcacctccgagcaccgcgcgcggccctgcccccggcacggcccccaggtgcgctccttctccggctgcttgtagcactggtctcactgtccccgccgtcagccaccggttccttatccgtctcattccccattgtggcttggctgagccggtcgccaggcctcgctgtcctcctttgccttcctctctcctcagcggccgtactttgcgccgtacctcacctggcctgcaggtgagcagcagcgcagcacccctgcccggcgagcttaacttgcccagcccggcccctgccggagtggcaccggcacctctccaagacgccctcttccctgcaggatgaagaaccccatgctggaggtggtgtctttactactggagaagctgctcctcatctccaacttcacgctctttagttcgggcgccgcgggcgaagacaaagggaggaacagtttttatgaaaccagctctttccaccgaggcgacgtgctggaggtgccccggacccacctgacccactatggcatctacctaggagacaaccgtgttgcccacatgatgcccgacatcctgttggccctgacagacgacatggggcgcacgcagaaggtggtctccaacaagcgtctcatcctgggcgttattgtcaaagtggccagcatccgcgtggacacagtggaggacttcgcctacggagctaacatcctggtcaatcacctggacgagtccctccagaaaaaggcactgctcaacgaggaggtggcgcggagggctgaaaagctgctgggctttaccccctacagcctgctgtggaacaactgcgagcacttcgtgacctactgcagatatggcaccccgatcagtccccagtccgacaaggtatgatgtgtgactcccaggggaagtgggctccgcggagatgccccctcccatccctgaccttttctcttccccgcgagtagggatctaattcctggacacctcccctaccacttccataccatcctttttctttttccttttttttttttttttttttttttttttttgagacggagtctcgctctgttgctcaggctggagtgcagtggcgcgatctccactcactgcaaactccgcctccagagttcacgccattctcctgcctcagcctcctgagtagctgggactacaggcacccgccaccacgcccggctaatttatttttgtatttttagtagagatggggtttcaccgtattagcaaggatggtcccgatctcctgacctcgtgatcctcccgcctcagcatcccaaagtgctgggattacaggcgtgagccaccgtgcccggccttccataacattcttaaagttctagattaagtaaggaaagttctggtgttcctaaggtaggctaagtaaataagcaaatggcaacgtgccttgcaggatatctcgaaatgcttagagaaaggatgtggcaatgcaggaccgcttccagagattccagagctgcccagtattgctgcagaagtcatcaggtgtccacccacagtgtagttcaaacgacaaagggcaagtgactgggggtgggggatacaaggaatcagtcaccgctgcttgcaactttaaccaagaatttcacttgaaaggaagaggtccagagtttatatttaatccataacactataaacaaagtgtgtgcctttaaaataaggaaccatgcagttttctccctttgaaagctgcatagagggatttttcattgcttgctataagctatcaaaattcccagtaagagggcccccctggtagttcccttattctttgtgttggtgcttcagagttgtattttccatggtattctgaattctttctgggttggctttgatcctcatctagacttcattgttaagcatcctttacccattagccctgaaggtagattacattgtttatgggttccccagagatcaatacaattagttttcaagaagagatgttaaacattggaaggtaatttttatgagtattttgaaaaaatactcatgattattaaattagccacaaatccaaagggaaaaatggatttttatttccttttaaaacctcttaacttttaaaaatagttaagattttaagcctgaaacttcacttacaattggaaactttctcagccttcattgcacttgttaaagaagtcattgttaatgttcagtctttataatggaaacctgggcaataacatatgagctttagtgttactcttcatgtttagatatttttgggaccagaaaaagctaagtcagtttttttcatgtaaccagtttttaattgctccacatcttggttaatttttttgacccatttgggaacatctttctctatcctctgtgggagagcatggaagtattttgcttttatagatcggtgtatgaaactccttatagattttatagagccacaaaagactcaatctaggaattcttttccaagtaaaataaaaatacagttagagcactgtgcagcgattcaagaatcacagctctagtccaggcctgtttagaaatgaactccaccacatttacaaacacgggctcccaaagtgtacaaaaggaaacatgtcagatttacttaggaaccaagcaaatcatttctctaaggaaaaacagtatttctatcaggtaattaggagttaccctttcatggaacacatatagcgctgcattatatatttctacagaaaaacagtaactagtgcttttgtaaggtagtaaaatatttaatctgcataaataactagttggagtagtttttcatctttggaaactttgttagggtctacagaagtagagaagtgttttaattgctgttgctgcatagcacctcttgtgaaactgagttttgtcttcactttgaatggtctaacaaacaatttggccacagagtagatttcccgggggaaaaaaaaaagttttcatcccaaatttcctaattctacaaactgtttttgaacatgcactgagagaagtaggtcattaatactgaaggaaggactggtttctactttttagaaacataagaaattatttgattctgggtctgattgctgagttctccatatatgcaactaatattaacatgagagttacaaagttgcctcttacttaaatttgagttaataaaaactctcaagaacacactacccctaaggaaaacactgcaattagtttgcaaatgaatgaactggaaaagaacatttactcctttgtggtaacactctattttacaagtttagaagtcataaaataatgggatttttataatactgttgacaatcagtattttgtaaactaaaaattcctttggttaataactattactattccttatgctttttctactatgatttttttttactttgttaatactgctctttcattgccaaaaatgattgcaaatgccccttttaatttgtgtggattgagtgctcacaagagtgttcctacagacttattgaccccttctagaaatttcctactgttgagcaccactaaagatgcctgctggtctgctgaccaagtgaacaggaacagggtattagacatgagttgctttttgagaaaaatctgcttttgtgggaaatacagtcgaaaatgattctgattgacttaattataaattaccaaggaaaaaaataaggataactgtatttacaacttagtcatttacaaaaatatgtcttccatcaacctccttttctccttgtcctgaaaacttcaatttgatctttaccatcttaaaatagtatacttctcaatgccttgctagtttattaaaaaaggacaaatagtatgtctgatagaaaaataggccaacatctagataagtttcacacttgtttaggtaattgtgtaaaagtatggatagagataaccatactgtcaaagtggtgtattaaaacatattgaacttgttcattctatcacttaataatttggaaacctagctgcccagtaccatgtaagccactgtagaaaaccctaaaagaacataaaatgccatgtctagaaacagagcttaaaattagtatgaatagcaaaacccatatagaaatgactgacaatcactgcattctggcatcaacggcaatatggtagagataactgtcaacaaatagagtactaataataatcactgtaataccttatgtttatacagcacgtagaagaatacagaggacttgtgcatcaaacatctcagttaatcctcagaacaatttgagtgttcccatttgactacttgaggtgacatagccaataagagctggagccaggactcagacataggccatcatttctaagtaaaattatttttctaaggaaaacattacacatattagaaggatgcattcctcaggggtaaggacaatatttgtctttttttccagcagccagttatgtgtcacataattgatcctgaatttagcatatttagtcaggaaatgggatttgacaataaaattagactttctatgcctgtagattttgagacttataaaaaagttatcattggtatcattagattttagaatggcagattggaggaattgaatctacttttaattggccaaattctattatttttactcaagattagagacacctctttgctcatctaattttaaaatatgctattgttattgataagcagtttgatgttttaaacctttagtcctgaataaccatgtggttatactttctatagttttctataaatgctgtatttacataggcaactgccattattagttgcctaagggatcatttctgctactatacggtatagaatcagaactggactcttaacattgtaaatttttttgtaagtcataagaaaaagtctagttcttctggtagacagaaaatagctgggaaaactgatttactgtttgatatatgtgattcttcttgggtttagccacctttcctaattttccaatattttattttccagttttgtgagactgtgaagataattattcgtgatcagagaagtgttcttgcttcagcagtcttgggattggcgtctatagtctgtacgggcttggtatcatacactacccttcctgcaatttttattccattcttcctatggatggctggctaacttcatacccccatgtcagtgtgtgtattctgtatgtaaatatgtttatatttatagagcatcaatcaatataagcattattgagaaaaatgtgacccgtaacactgtgttctggataaaaatgtgattaggaatcacgcaaagtgcttactgtgtaagcccaagaacaaaggctttctgaatcttctcaggcagttcagatttaaagcaccatccaaaccttggaaatacgacagggtgtggtagaattcagcaatatgagaaaaccagcccctaaaatgatagccacaagagattaattgtgtttttttttctcctgtaatccttgtactgttcggctgaatttgaagattggaagacttatattgagaccagtaactttactgtaaatttactttgtttcattgaaaaaacaaattgataaacatattaaactggaagaattttctttattcaaatgaaaacatgtttgatgactggtcaaaaaataagctcataatctatttttttcatgtagtatataagtcaagaatgttttattgtcattatgtgaaaccaatattggcaaatagtactttaatgatgaagtaaatgaccagaaattatagaaatctgtgttttcctgtaaaaatagcactatagtatcacttgaacaatttgatttggctttacttactaggaagcctggaattcattatttttttccttttatgtgccactgtggctactttaaatcactctgagaggtaaatggatataggattgaagttatgtgggtatttggcatgtgtgtgtgaaataaatatgtagatagtcacatatacacagactgagagataaattgttcttgattgctttattatcatcatactagtgtgttcattatagagtatctgtagaggtgaatgtaaaagtaagtccaatctattttcttatgtcattgaatttgtagtgttaacttgcatatatgttattggatgggttgtcttttaaagcatttactaatgtactctgaaatttttaaaagccttcagatttgttttctagtcacttttttccatatcatttctaattatagtttatatccttaaaagaaggatgccacagtagtatgtaaaacccaaacaagtagaacccaagcaaataaaattatttaaaataattttaaagtggcttagtactgccagtcatgtaaattgattctgctgagggtcttataagaattgagatataacaatggtaaaacaagcattcaagcacttttacaaaattaccaaattcttaaaatgaagccacagctagacttgcatttcaggtattaaaattgctttcttaactgtcaagaatcacaaaataacaaatcatattatgagtgaatatggggagggcggggccaatcagtcaatgataatctgaacaaattttaagagcagattttagattaataatgttttatcaccactaatttgcccacaacaaactcagtatttaatttttcaaattaaatattaaattatttaagtattttaaataattaaaacattaaatggcaacaccatagaatataggtgttctctggacctattctaaccacttaaaattatcttaagtatgcatacataaaagcaaccactatgagaactaccgtgttagtggtttttcacttactgtatattacccttgtaggaatagtttaaggaaattcatttcttaaaaatatagtgtcctcaaataattaatttttttgcaaactttagttattacaggcagcaaaaaccactgtctgaaactaaatctgtgttcaaagatgaagacccctcattaaaagccaaggacgttcttaagattggaactgacataattagtcttgacttacttcattaaagcaagattcaattccttgttcatttgagtgttcattatatgccaggcattgaccagttgcaattttatggtccagaattaatattattattcgtaaactagctataatagagtatatacagtgctgtgggaatacaggggaagaagcaattaaatctgctagaagggtaagagaaatctgtatgcaggaggcaatgctagcattaagccaagaaatagtgtgaggtgatcttatcacactgatgtgttcaactgtttatgggaaaaggaaactaggatggttttatttgtgaaatgttctacaacgctagaactgttgaacttcttgggagaaaaggagaatctttgttttgttgtgctgagtttgattagttgcttaaccaagtagaaagaaaagcacatcttcctgatcacagttataaaagaaaccctgaggccgggcgcggtggctcaagcctgtaaccccagcactttgggaggccaaggagggaggatcacaaggtcaggagatcgagaccatcctggctaacacggtgaaaccccatctctactaaaaatacaaaattagctgggcgtggtggccggcgcctgtagtcccagctactcatgaggttgaggcaggagaatggcgtgaaccgaggaggcggagcttgcagtgagtggaaattgcgccactgcactccagcctgggcaacaaagtgagactccatctcaaaaaaaaaaaaaaaaaaaaaaaaaaaaaaagaagaagaaaccctgagccattaatgtgtctcgtaacttgaggaagttcatgaattctctgggcttcatccattaagattcatccttatgctcctgcaagtttcttatatttatgtatttctattctgatttctgaaatgataacctagtagtgtctgatgaagttttttcatgcttattttattctttgtcacagatgaaagaagaataggactaattggggctaagatgaattaatgtaagtgtcagatactaggcaggtgttagggatgaaatgatgaatgaggcatggacctgttcctcagagtttatggcccagtagacataattgtattaggactttctgcagttgacatttgcataaagctgactgactgaaggaacagaaagtgagacagacagatatgaccaaatttatacaaaccatgtaccaacacttgaaagatgggtggatattttccaggaaacagattttgggcaggacattccatgcactggaaatagcatgaacaaatgcatgaaaattgcctacaacatgcctggcacatagctgtgaggtaccctatgagttgttgacttgaaaacatggaactgcacagggcattcaggcaagtgcaagtggttcaggggccagcgcagagcagagtgctgagtaaagatgtcagaaaaggaaagcaatggtctggtacaagtcttgtatagaacaagaagtttagacttttgaacaggcaatcgagatttggggttcagaaagataaatcccaaaagtatggagaacaaaggaactcattttaaaggactagctaagatgctcaatctctaaaaaaaaaaggatctgtattcgtgagagtagagagaaaggttgtttaggaagagtcaacagactttagcaaaatccttttatttgattcatgcataactcctgatggagtgtcaaggaagactcattcacttttctttcctgccagaaagttggttcttgcaaaatagattaacttgatgactatgtgtatattggatactcctaattttagctctgttagatatgtttctttctaaggacaagcaactatgtatagacttgttgtttgaattttttttcagtatatatatgtttcttgtttttctatttttctacttcatactgttaatgtcaaatatcaaaaatgttttccagcaatatcaagttatggcaatggcaaaagtccttgttgtagatgagaagcatataagaaatggttgccaatctttgttttgtatgatctatttagagttttaaccaacctagatctgtcagctaagctaattttatatttggtatacatgcatgtcaaataaagttaattttacatactattctctctttaaattttaaatacataaatgtagatcacaaactttttttttcagcgtggtagcctgaagaattttgtctttccaatcttcctttacagattaccaaacttagttttatgcatttgaagttaaaactttatgtggatctgtcttcagactgataatatctatgttatccatatcttgaagcctaccttgattgtgtaggaataggttctgtgtaatattaaataacatatcccttctccattgcacaaaattaagtaacaatgacaacaaataattagtcataatatgaactctatacagttgacccttgggcaaaacaagttttgtttgtttttgtttttgagacagggtctctctttgtcttacaggctgcagtgtagggacacaatcctagctcactgtaatctcaaactcctggtctcaagcgttcctcctgcctcagcctcctaagtagctgggactacaggtgcatgccacaatgcccagctaattttcaatttttttgcagagatggagtcttgctatgttgcctgggctggtcttgaactcctggctttaattgaccctcccacctaagcctccaaaagcactaggattatgggtgtgagccaccaggcccagcgacaacatgggttttaactgggtgggtccatttacgtgcaaaatttttcaaccaaatgtggacagaaaaccaagtattcctaggatctgaaacctgcttatatagggagggccaacttctgtatatgtgggttccagttcctgcagggctgactgccagacttgactatgtgtggatttgggtgtacatgggggtcctgggccaaacctctgaagatatcgagggaacactgtaaccagatttatgggtgaggaggtgatgggatgtgagtagaagcaaattccagggccagtcttgaaatacattcatagcagtgccaaggaccatagaggttactgagcttgatgcttagccatccaacgatatttaaagatgtggaaaatcaggctcctaggggttgaggtgcttcagagaaagactcagaactttgctccagatttcattccattatacctccctgaggtataatggctccctgaggtctcccagggattagaaaaacttttctccaatgaatgtatttatttcttgcacacgttctatgtactttaagcaggatcacacaagaataaactggttagaatcttagtcctggaattgctcagactaatgtaaaagaatggcaagattttaaaataatggtaggcttgtacaagtgtcagaagagcagatatgaaacctttacctgtctgatggggaccaataaaggagaggggtgtcacgtcacagaagtcttcattaataccttaactgacctgtaaagaatatgaacacttaaggtgaaaaagacctcctttttccaggcctttcaggcacagggaggagcaactattacacaaagggatggagccaggagaacccatatcacagttgggttacaacagggcgttaagaacaatcacttgagattatattgttgctgtgagagaaaggtgccagtcctgccacaaagaactcaccattcctttggagaagaacaagtctgactcagataatgctgcagacaggaggcaagttcacggaggactttgcattgtgaaagtttggagaggaaagaaagcatttcccaaactttgcaactgggtcccgtgagtattaggaccatgtgattttctgaaacacatgaagaagaggtgtgcagttagtttgtgaggaaaagaaacacttttttttttttggatggggtttcatttaaggttacaaggagaagtggaaagtacagaaatcacttcagtgctcagcagatgaatagtcactgctccctgctcagctcacaactgttcctgcatcctcaaatgactctagtgatatcttcttctcgagtctggattctggtgctgctatttgctcccatttagcttatgatggctactcgcgtggcggcccacctactgccgctaactcacactgcaccattgtttctgctgccttgtggttttcattacacttctaccctgttacttttagcttctgctccactgtacctggtcgccgtctttcatttaaaattgcaaagggatctaaccaagctgaccagtcactatgcaatatttgtggtcacagtaaacagttctctagccaggctactgaatggaccattgattcccctgatggcctttaggtctggtaccttcagatcaggtgacatccttaggctaatcacttgttgccaaattgcacgaccatgtgttcccaggcatggagatctactcttattcttaaggagctactcataactgatatcacttggaggatggctgtctgctttagtttaaatgggagacctatatctaacgatcactttagagagcttattctgtagcaatatagagaatggattggacgagatgtaaattaaagaatatgaagtctattaccaagatgcagaagagaaatgatgaagactagatgaagtcagtgtgagtggagatggaggggagagaatggattgatttgaggggtgtgaaagatggagagtgtttcatatagggtccaaccaaggaaacaaaaaccattctaggtactgtctagtggtgtgtgtgcataagagataccgtggcttctcctttcctttcctcttaccctccaatctcctgtgaggacttcacattgggcagctaatgcagaaaccagctaacaggagagcctggaaaacagcctgctgagcaaggcaacaatgtatctgagggacaataggcagaggcaggcaccagattagtgtgactgattgtactgtggcatcatggctaatttagggaattttttaaaaatgaggcttgggagaagtatgaatctggttttggatctatgaagtctgagtatcccagggtctcacagttctcacaggtaggcaataggaaattggagtctcataagacagagttcagggataggaatgtatttgggagttattataacagtggtggttcaggccaaggatgtgagtgagctagaccatcctggggaagtttatgaagaacttttttttttttaagataaggatggaagactagggtcacaaacaaggggaaggaagaatgatccagaatagttccaggaggagactgcaaaataatggtacaaaaagttagagcagacctcatacaggagagattgtatgaggaagccaaggaggagtgagcttttgaaggtatgggtgtgaacagcatcaagatacagaaatgagataagaactgattagtgcctacattggatttggcaaaaaggagactgtgagtgaccttgattaataggcattccactaacttcaagtatgggggtgttagggatgttgcggttgcggggagaaggcagactgtgggttgagatttaaatggaaaatgactacgagcttctctttgtagcagtttggtgggagaagaaagaaacagataaagcccaaagactcagaaagcagtataacgtgatatctcttactacttccgcatgctttagaacaaaatgtaccgtgacctgttgcaagttaatttttgtaattattttctgagggacaaacactctttttttgtgacattatcacaattgcactttttttccaagactgattactatcagaggttcagtctaatcaatgagcattctcatttctactggcttctttgaaaagaacacatattcagattcagagtctaacaggctcagaggattgggaaagggtagaaattaaaactgcactgcatgggactctcgattcttgggctctcattcaaacaacctgttgaggaaagtccattaccattccttccctttcacggaatgatagaacagagagatcaagacacagtgcaagactcaaactttcggaaactttttgaccagcatgacctcataaacacttcagattctttataattaaattattcattgaaaaatagaattgaaggttaaataaatccaggtggctaacagagccaatgacaaccagacaaagtaatggtttcttatccctttgtcctatactaacccaattcacatagcatcttgagaccactttatctggcacttgactgaatcaccatccattgaagaagaatatgttagtattcccgaaaaaaccttcttgtttatgatgagccaaacaatgattccaaattcaaaaatttatcagataaacaacacttgtctgctaagcctggctcagcagcagctgcccccaagaatctgttcaggcataagctttatgttggtctagacacctgatctgaccaggtgtctcactgctgggtagaaacctaaaaggtagcaattgctacatgcttgatgaacatcaagatttatttcttctttaatccccccatgcccccaattctcttctttacacatcacatctccacacacatctttctctactttacctctgacaagtcacagacaaatgactgccagggaatttaaccatggtaaattatttcacactacatgcaatttttctggatgggaagttgaggtgacaataaactttatatttaaaaatataaaggcatttaaggaataattcaagatgggagaaaatctgaaaatgagattgaaggaagtggatttgcaccacctcagtatgtttgaggggcacctcctctgtgaagtgaagcagcaggcaaccagcagcgttcatctcactgctgcagcagcagctggtgcatcgccacagctcagccagatttctccactttgctagtgctcgtcctgaccaccctgcgagccagtgtaatggggattctccctcatcagatatttttgaggcaacgttctttttgcatttattctcaacacacctcagctgtgggatttctagtctcaaaatatggccctttgcttggttttcaaactcaaacttatccccgcaaaaggaagtccattcttcagtgtgtactagaaagtgggaatgaatggtgtagattagtggcagtctttttcttcttctaatagagcagaaatacaagtttcagtcactattttggggtactgtgtggtttcaatgggcatcactgaaataattgtcatcatggctttacctgagagttcggacatttaccctcttacagtgtaattaattacataaaatttgtcaacttgccagtttcccctttacattttattattattttatttttattttcttacttagagaaaaatgaatcaactttcattctcagaacttggtctttatttttttccaatgtaaaagaaaactttgtgctcatgttcctatcatgtctaggctcaggtgccttagctctcaaggacttcacctgctcttctggacttttccatgcaaggtgaacagatgcaacgtgcagagtgagcactctgcaagagaccagagcgtgaaagctttattaacatactgaaactatggaatgtcaccacaaacttgccaagctgatttatgatcaaagtgcagtgaaatggcaatcctatcttgtagttacgtgaccaacgctgaatatcattcataatagcacagaatgggatcacaagtttcttgaggagccatggatgcccaagtgtaggggagaatctttagataatgagcactcctgaactccagtaattatcagtcagaagtggacagccatggcaactgttggtgtgatcatctactgaatcagagatgacaacacattcagagctcccggatgatagagaggcttaggctagagccaatctaatcccttctgtttatatgcaagttagagacctataataacataggaaactccaggaaattttgtaacagaaccagagcaaaaatctgactttcctgacacttattccctgttctgctctggggattctatattgatgtattgtttgcaagctctccagcagatatgattcttattccacactggtatcattggtagcttatttggagagaaaaacttcaatcccaaagttattgtcccacctagacagcagggcagactcttagaaaagtagaaaagatcaatttttatcccttctgcccccttttttggattgcttgattcttttccttgccaggctctaataacttgtataaattttgcatggtatggaagatacctggtagaatcaaggagttcttccaagaacccagaggatctgtagggttccacatttgtagccttaagcattaactttttcctggcagggcaaggcagccagcttattcccatgacagagaattcagttccttcactcctttcattcagttcacatgtattcactgtccacaatatgctaggcattgaacttggtagtggggctacagaggtaaaggacaaaagtttctattctcatggaaaaggtatgttgtgaccacagagttacaattatctgagttgaaaacagcttcagaaaatatatagcattttaggatttattatttcataacacactttcacataagtttgctcatttaataactgtcacccccataaggcaaagaagaaactgagcctataaatatcaaatgacttagcttatcatatagccattttaaccaacaaggtaactgtgattctcattttacaaacaagaagactgaggctaaacacactaaatgttttattcaagatcctataatcagtgatgttatattaagactcatacctcagtattttcactcaaaattctgtaatatatcacatgccctatttgtagggaaactaagtaaatatagtcattactttctttccaagatcacagtgctacagttagccagtggccacctgacatgatgagaaggcaacacatttatttctaataaataaatgtgctttttgactataaagttcaacatgatataacacttcttaacttcttaaaatccttacctagggaagtagtatggaaagatatggcagtgcctgcccctggagcctgaaatttaagctgacacaattaatgcctggttctagttttgttaatgtatctgttatgggctgactatctgtgtatccgctaaattcatatactgaaatcctaacccctagtgtgatggtatttggaggtgggatctttgggaggtgattagagttggatgacatcatagggtggtgtcccatgatggtattagtgttcttagaagaagagagaccagagatctctctctctctctctctctctctccctgccatgtgaggacacagtgagaaggtggccatctgcaagccaggaaaatgacctccaccaggaatggaatctgccaacaccttggtcgtggacttctcagactccagaacaatgagaaataaatgtctgtcaagtcacccagtctatggtattttcttatagcagcttgagctaagacagtagccatgcaagttgcacccagttacaccacatacttttcatgttcagcagtccccaatgaggacagtatggtgtttatgagctgacagcattatgaacaatctatattccacagtgaactgttggcaaagcaacttccttttgtgaagcaacgtcacaacaggtattaagataaaacaaaagcctgtaatagtaagagatgtgtccctgtatcttgtttgttgttatacatacagatgcacacataggttcccaaactgggcatcttggtaattgggatttactctctaggtgtataaggaaaagttatttctgggcaacaaaatgtgcattccaaattacagtgctgaaactcacctggtccaatgctgagaagctgggatgcagtgatggcaaatggaccaccctggctctccacgagtgggcaatggtgcaatccttctcaaggcctccaggcctattgcaatgacagacctggttacaaatcaaaggatatcatttacatgtgtgacatacataatgttgattcagcagaaatctgtcttggccattttctaagagtggacaggccttaatcctcctatagttctccctcagagtctttagcacttataaaccaagccctagaatctttgctgatgttgttgagaagccaagagcgaggccactgtcaggtcagaatggtgaggtcctgaagaagaaattagcctaggagatgggaaatgtgttggaaggcaaagtggaagacaggcagggcaagtggttcatgacagtgcctgttggaaggccatgtggtccagtctattcttataaagacagtccttccagctccacatggcccctctaggcacttactaagtgccagcctgaacgtttgcagcagtgtgggaaaacaaagaccacaccaagtgtcctttgcagatgggggctcaattggtggatgcaggtccagcacccttcttttaccagggattctaaaatggaggatgggaggctgagcacaaaggctgattcttgtaatctcagctacttgggaggctgaggcaggaggatgacttgaggccaggagtttgagaccagcctgggcaacatagcaagacatggtctctaaaaaaattaaaaagttagccaggtgtggtggtgcacccctgtaatcccagttactcatgaggctgaggtgggaggatcacttcagcctgggaagtcaaggctgcagtaagctatgattatgccactgcactccagcctggatgacacaatgaaaccccgtcttatagatgatagataaaatgggcagtggagggaggcacagctcaagaggctgagccattccaaaacacctctatgctgaaagtttgaaattgatgagtttgccttgtttatagtttgtcttactccttaacaaaattatacacttttcaaaggagtttcttagtgtctagtagtcacagtgtacatagcactcataaattataaagcgtgaatagaatttcatgttctcccagagttattttattttttataaagttctacagacaggcaatcaaggtaaggaagatctttcatttctagctgctcaggagatttacgttcaaacatctaaccaaccattcttgttcttttttctgccttcctccctgcaacaagtttatactgagtacctgagcacaaagcaggtgctgtgcctgtttctgctctggtttggaagaagaaacaccaagtcttcctcacaatcagaatgcagagggtaggtctgtgtggtctctcaatcttacgcctgacagtattagtggtgatattattcaggctgcggcttacatgcatgcataaacctcacacttatctccatgcattgtaaatttcctatttaatcctttgcttatcttatcccaaagtttgaaatctctattcttaagattggctctgggtttaaggtacaaaggatttttcctttctgtcttcttaaatttcttctgttgcccagatgactatcatataaaaaaccattttgacgtgcaccaatatgaagtggatttgactggctctgagagcaccagttttccggggtgtttgccccactctctgcctgtgggaaccccatcaattcagcatgtgagcttttaggttggctacattacccatttccatcattactctcatcattaaaaatatatatagataaaataaattaaaaaacactactcctctcttggatgttcttctgtttgtgtaccatctaatttaatgggagactgtcagaataattttctcatttctagatttaatgggaatataactagtcaaactggaagttttgttattcagttctctaatttttctgtgttgtttcacaaatatgatcacatttatttgcagttcctcaccacaatttcatttttctctgatgagtctgttcagtcttcatggggaaatctctgtgataaaacaaaaaggcctgacatttttgtcttgctccattaaaatgatccccattgaaagttattacatccactgaaaattatctgttttaattttctctagtataaatgggggtattactacttacctctcaggattactgtgaaggttaaagtatgttgagccctccagtgggcttggcacatagatgtccttaataaatgctaaccaagaggctgtaggtagtatcacccccttcatattctgaacagtatttctaggcttacagttcctcctagtacctacatatcaattctttctgataacgtttattaaagagatccttgtgtcttctagcttctgcaccacaactgagctctcagaatcaaagcagctgcttggccctcctgctgccaaactttggggagcacgtccaggccctgtggtttctgggtggcaccatgagccctggggtggctgttagtccctctacccactccattggactgatctgacccagctgccgaacttttggaacttttggaaattccagtaatggccagactggcttggctcacagcaactggatgtgatggttcttttaaagcaatcagtttatgaagagaaaggatatgggctgtaaagtgctttttttttttttttttttttttttttggtcaaagctgcccaacaagaaagtttgtttgtcagggaaaggaggaggaagggaagtgtagcctaaataatagaagccaggaatacaaaccaaagcatgttttataaatgaacacctctttctctgaaatcagaacttagaaaagtaaaataactgttcagttataattagcaatcgtactgataattctgaggttttacatcattcaagattccacctgaaagattcacttgtctttccacctgaaagattcgcacagatcaatctgtgtgtgtgtacatgtgtgtgctcagtgtttcttctaaatatttggaaaaataacacacatacaataaggcaatacttagttaattaaaatttttaattaacactgatacccaattttccaatattcattataaaggagagtacattttccttgggcttactgcctccatcaaatagactttaaaaaaccgccataacatcagccaatttcccccttattctgatttcctatgatactgttacttaatgtgcattccatgagccgcttgcatcagaatttctcaggaaacttgttaaaatttcaggttcctggggcaacattctacatctactggagcttactagttggctaccccaacatcatagtccctttcctctttagtaagatgatcttgacttaagtggaattagccatacacttggccttcttttccatgtgacaaagttttggccaatcaaataaaaggagatatgctgtgcaggaattccaggaagcctccttcaatgggaaagaatacaaagttttcttctcccgtttctcttgctgctagcctgtaagtggacagcatggctagaaacaagaagccattccagatcatgaggtgactctgtggatggaagccaggcacatagggtggtaaaacagaaagaaccttgggtccctatggtgccagcaggtcgggcttggactgtcttcctccagaggaaataagctgctaacttattgaagcagttgaagttattttagattgctgtcttatatgcagctgacctaatgccactggctaattctcctgatttaaaatatatgagggttgtgaaatctgcatttttgataaacacctaggacaattcttagacacaatcaaattttgaaaaacctgccatgagatacaagatctataaataattttataattatttcttagagatagaccagagacagggctggtatacattatacctttacttgtattctgcaggatttagtaccataacaaatagtgagggatggtccatcaaggtctgcagaataaataaattgttaagagaagtcttcttttccacccctaattttcttctgcaagctaccagagaaaatgtttcttaattgtggacagccttgaggaacacctggcggatcatttttctatttctttgaaaggtctaggtatatgaatgaaccacaaaacaatgagcagcagctttgcagtgacaatacggtttcttaaatatggtggctattttgcctctggtgtctcttccagagcttgctaccaggatagcgtgagtccagtaggcgtaccaagtccttcaatactactagtctcatggggaggaaaacaaaaaccagtcccacacaccaagcaattaagtgctcactgtgttgtttttacggtatcttattttatatatatatatataaatacatatacagatatatatatatttaggctagatatatatatatagatatattatatatctatatatatatatatacacacacacgtatatacctatggacaaatatatatgtacgtatgtgtatacctgcacacataagacatcactttataaataaatttccaacttctcagatatgttttccaacattatggcaattcattactgtgataattaggctaatgaaataccagttacttgaatgagaagttgtttgtggtgctcagaagtaaagggtgatgcctgttggtgatctatgggattctcactacaaattctggaaatagtcacctgcacccttcagcacattcattagccaacatttctaaaatagggttagtcaatttggctattttcctgagtttccagattccttatagagtctgtcagcttacccaagttgacagactctataagtcaataaactgatagctgaaacaaaacaaaacaaagaaacctaaactctctaagctttagcttccttctaggtaaaatagagataataatagcaattttcatagaattgcagtgaagaataaatgagataaggtatttaaagttctggtacagtgtctaacaaagtaagtgctcaataaatgatagttatgatttgtattttctcctttttgcttttttaagatggagtttcactcttgttgcccaggctggagtacaatggtgtgatcttggctcactgccactgccactgccacctccacctcccaggttcaggtggttctcctgcctcagcctcccaagtagctgggattacaggcatgcactaccacgcttggctaatattgtattttttttttttttagtagagacagggtcagtcttgaactcctgacctgaggtgatccacctaccttggcctcccaaagtgctaggattacaggtgtgagccaccgcacctggcccgtattttctccttttattaaatgtttcatcttccttgtgtgtttctgtccagaagataaaacatctgttaaactttataaaatatattattttaaacctattcttttaggattttaataaatgggaaaataggatcacttttctgaaaattaaccatttttcaattacttcttcaaacatcatcaaaattaataacagaatgaaaacccagtgctgccacatttgtccaatgttcaccaggtcagtttgttggggccagggttacaagcccaaatccataaccagcttttcatcccctggacaccaccatgcccactttcagctcaccctaattgcatgatggcaaaagagaaagaaagaatagcagaagatggttacagaagccaagttccatttatagtctatttatacttcctccattaaacttcctctaaggagatggggtgatgaaaaaagagggaagccttggagtccgtccttacaggtttgcaagtatcattagcaagaaatgacaaaataagcttatcaattcagtaccactgagggataatattcattaacattatgaattgtttatttgtattatgtcaaaaacattatcttcccacttctatatttatttaacgactgagttcagggtttctggttcctcattagatggctactttgcattggcagcaagcagttccccaggaccaaaccctggagatgtcacaatttcaagacagacctcaaaggatataaaaacctattgttaaaaatgtgagaaactctgagaagactaaaaatgttttggcaaaaaacagcagtcaggatgtagcagggtggacatcattgtgggagaaattttgggaagagcttgtgtgatataatttcattctctcaaattctactgggtggaatacaactttgacagagaagcaggaaaatgtcagcactagctagggcacctagtgggagagttacatcagggttgtgttggctgtggtgaagagtagataaaaatagaggcaggtcctggagttgtcccttcttctctattcattccatgagcactgggtactatgactaaaacataggaagactctactggctgatggccagctgctgactccttaaataactaagaagggtacactgtcctttgccgccaattcacattactaatgaagactgcagatgtgactataaactcacaaagaatattagataaccaaatagggcaacacctacacaataaacaagctatagtagattaagttaatatcttctaaatgaaactaaactaacatatattctccaagaaataaaggaggctaacagtaacacgaagcaagaactagtagttattaaaaaaaaaggtggaaacagttatgtattaaaaatatgatttaaagtaaaatctcaacaggaaagataaatagcagaacagatacaaccaataagttaattaggagctgaaagctacaaagtcaaagaactttaccaatagcatcagggacaaataaaaggccacatggcgtagtggttaaaagtgtgcaaccctggatcccgaagcctgggttcaaatctcaactctgccaaatattagctgaaatgctctgagcaattcacttaactaatatgtaatgactttttttcatctataaaatgggtagataataatagtacctacactatatgattgtaatgaggattaaatgagttaatatatgcacagtacacataagagtctctggcaaataactaatcctgcataaatataagctattactattttaaggagtaggaaatacaaaagagctatttgtgggagatgtaggagagacacaaacatgtcacgtaactcacagcaaaccttgatgaggaaaacaattaagtagaaagaaggaaatattaacagactgacaatagtctagaatcaaagaaagataaaaatctctgatccttcagatttcaatcttcagatggattatcatagataactcaacaaaatagatgaaaaaaaccctataccttgatacattgtgataaaatttaagatcaaagagagagaaataataagtgattacataaaggaagaacataaaatcttcaaaagaacaagattaggttgacatcagactcatccataataacactggaggcaaaaacataatgaagtactatttcaaggtactgatgtaaaaagaatttatacctagaaaaactaatatctaaaaatgatggagcaagaaatatgatgatgtcagacattcaaggctcaaaaagtttgtattcaaagcccaattttgaaaagactattggaaaaaatatcctaagagaaataaatctaggcagtcatacaggaataagggttgagtaaataactaatttaaataatgtttaagaaaaaaatgtgtgtgtgagtgtgtgtgtgtgtgtgtgtgtgtaatgatgatccaaaactaaaattccatgtaacagcaacaaagcaggtatgtgtagtttggctggggaagtggggaagaaaagagggagctgagagagttctgaagtccctgtcttaatcagaaagaaaacacaaatgttgataggtataggttgtagtgggttagtcaaatagaatatatcattttcatatcagcagaaaaataataaatctatcataggaggtgggaaagggaaaaaaaaagaactcattcagtatcttctcccattgtattaaatccctacttcctttattcttaagttcttaatgcgtaaattggcaacctcagtatgaattaacaattggtaacacattcaatttgcttattcccttgtcactactaagaccagtaacatagtggctttaaattatgtactgatatacctaaagtctcattaattcagatctcaacaatttgtattttgtgacattcctgacagggatgggctaaggtttagttctgcaagagtttaaaaaaattagtagcatggccaagggtacaagacagaatacttaaattactttagacaatcatttaaagatcccaaacacttcttaagaagtcatttatttatacccatttacttgcaagtacactataaatcactcttatgtattcaataaatctgttctcaaaagaagtcatttggtcagaatttatttttcaaatttctgtataaaacggtaaatgcttattgttagtctggacatataaaatattttaattttttctcaagacaaaatcccttttcctccttttaatctgaattagtgaggtaagtttctactgtaaagagaaatctagtgttaaatctttactgagtgacttcttattaactttacctgacagtgtccaccccataggtgagaagctgaccgcccctgtggtcattctagttctcagcctaaacagtatctaggtttcgtgtgttttttaaccgtgtacatacatatcataggaggttgtgttcagacatgacaacaaacggtacataatcaactcacacatgccttactaaaacaaaatccaacacatatatttattcggctaattataatgttatcttttttcttatggcagatgaaggcttgttttactgagtgactgatagatataattagcccattttcacattgctataaagatactacctgagactgggtaatttataaaaaaaaaaaagatgtttaattgacttgcagttccctatagctggggatgcctcaggaaacttacaattatggcagaagatgaaggggaagaaagcaccttcttcacaaggcagcaggagaaagagagagtccaggggaaactgccacttttaaaccatcagatcttgtgagaactccctatcatgagaacagcatgggggaaactgcccccatgacccagtcacctgccaccaggaccctccctggactcacagggattacaacttgaaatgagatttgggtggggacacagagccaaaccacattaaccactatgcttacataagagaggggggccttcatgtcttcatctcttcctgcttggacagagtcttggttacctccttcttggcctgaagtggctcctcggggcactcctgtacttccttggtcttaaccttgggggcctatctggttagccaggggcttcttgcaggccttctctgccttcagcttgcggatgtgtttcaggagaatctgcttgattctcattcacctaaaagataatgtaatttttaagagaaaaaaagtcagatatgttatttttctttgagtaccatggccacagccatacatcttgctcaggcaaccgaagaggcatgcctccagcatcctctgccatgacgaaaaggcctcataggatcccagtgaaaccaaccaaacagtcaatgccaactctagccagcagatctggaagttgatcaaagatgggctgatcccactagactatgacggtccattcccaggttccatgccagaaaggggcaggcacatgggtacatgtagtcctaatggccctgcagatgctggaatgtcccagaaggtaacctgcatgaggaagaggaggactctgcaccagtttcttagaagatacagtgaatctgaaattgaccaccacctgtatcacagcctgtacctgaaaaagacttgccattttagaacctagcactgacttgcccatgcaggaccctgcagagtctcctttctctctgccatggcaacctgcaatgtaacaaccagtgatgctccatcagtcttgactcctgagtaaagagctgaaggatgactgcttaggatcagagctacagacaccacagctccagagagaaatacactttgttgttttaagctggaatttgtgggactgtttattattgcagcataacccagcccatcatgacagacacagcatcttccttattccagacaacaatcagacaagggagacaatattgctaaaaaaaaaaaaaaaaaagtaacttatgtaaaagtggagacttgggaaactaaataattcatgtccgaagtcacactgccagcatttgacctgtctcattccaaagcccactgtgtttccaccttatcactttgactcaaaaaatgttttgaagtacaactcattagacttgctatcattattagaaatcaggaagtttcagacaaatatttgttgagcaatgttgaacatgcccttgaaccacttttccagtgatgaaggggatgaagtctctgtgccagctaagaatacttccagaggctaaagagaaggctggctgaaaaatttcctttaggatctgcaggaatttaagcttcaccataatttccatcaagggataaatgaataagagccacatagattgtctaaaacctaattttagagtcacatgcccatcaatttcaacatactttatccaagacttctctaaactctagacattacaaatgtcattccgctcctattttttttaaaggaacacttttatttttatttatttatttatttatttttatgctttaagttctagagtacatgagcacaacgtgcaggtttgttacatatgtatacatgcaccatgttggtgtgttgcacccattaactcgtcatttacattaggtatatctcctaatgctatccctccaccctccccctaccccatgacaggccctgatgtgtgatgttccccagcctgtgtccaagtgttctcattgttcaattcccacctatgagtgagaacatgcggtgtttgttttttcgtccctgtgatagtttgctgaagaatgatggtttccagcttcatccatgtccctacaaaggacattaactcatcctttttatggctgcatagtattccatggtgtatatgtgccacattttcttaatccagtctatcattgatggacatttgggttggctccgtctttgctgttgtgaatagtgccgcaataaacatacgtatgcctgtgtctttatagcagcatgatttataatcatttgggtatatacccagtaatgggatggctgggtcaaatgggatttctagttctagatccttgaggaatcaccacactgtcttccacaatggttgaactagtttacagtatcaccaacagtgtaaaagtgttcctatttctccacatcctctccagcacctgttgtttcctgactttttaatgatcgccattctaactggtgtgagatagtatctcgctgtggttttgatttgcatttctctgacggccagtgatgatgagcattttttcatgtgtctgttggctgcataaatgtcttcctttgagaagtgtctgttcacatccttcgcccactttttgatggggttgtttgttttctcataagtttgtttgagttctttgtagattctggatattagccctttgtcagatgagtagattgcaaaaattctctcccattctgtaggttgcttttcactctgttagtagtttcttttgctgtgcagaagctctttagtttaattagatcccatttgtcaattttggcttttgttgccattgcttttggtgttttagacatgaagtccttgcccatgcctacgtcctaaatggtactgcctatgtctaacatttaagtctttaatccaccttgaattaattttcatataagctgtaaggaagggatccagtttctgctttctacatatggctagccagttttcccagcaccatttattaaatagggaatcgtttccccatttcttgtttttgtcaggtttgtcaaagatcagatggtcgtagatgtgtggtattatttctgagggctctgttctgttccattggtctatatgtctgttttggtatcagtaccatgctgttttggttactgtagccttgtagtatagtttgaagtcaggtagtgtgatgtctccagctttgttctttttgcttaggattgtcttggcaatgcaggctcttttttggttccatatgaactttaaagtagatttttctaattctgtgaagaaagtcattggtagcttgatggggatggcattgaatctataaactacctttggcagtatggctattttcatattgattcttcctatccatgagcatggaatgttcttccatttgtttgtgtcctcttttatttcgttgagcagtggtttgtatttctccttgaagaggtccttcacatcccttgtaagctggattcctaggtattttactctctttgtagcaattgtgaatgggagttcactcatgatttggctgtttgctgttattggtgtataagaatgcttgtgatttttgcacattcattttatatcctgagactttgctgaagttgcctctcagcttaaggaaattttgggctgagacgatggggttttctaaatatacgatcatgtcatctgcaaacagggacaacttaacttcttcttttcctaattgaataccctttatttctttctcctgccggattgccctggccagaacttccagcactatgttgactggagtggtgagagagggcatccctgtcttatgccagttttcaaagggaatgcttccagtttttacccattcggtaggatattggctgtgggtttgtcataaatagctcttattattttgagatacgtcccatcaatacctaattcattgagtttttagcatgaagggttgttgaattttgtcaaaggccttttctgcatctattgagataatcatgtggtttttgtctttggttctgtttatatgatggattacatttattgatttgcgtatgttgaaccagccttgcatcccagggatgaagcccacttgattatggtggataagctttttgatgtgctgctggattcggtttgcagtatttcattgaggatttttgcattgatgctcatcagggatattggtctaaaattctctttttttgttgtgtctctgccaggctttggtatcaggatgatgctggcctcataaaatgagttggggaggattccctctttttctattgattggaatggtttcagaaggaatggtatcagctcctccttatacctctgatagaattcggctgtgaatccgtctggtcctggactttttttggttggtaggctattaattattgcctcaatttcagagcctgttattggtctattgagggattcaacttcttcctggtttagtcttgggagggtgtatgtgtccaggaatttatccatttcttctagtttttctagtttatctgtgtagggtatttacagtattctttgatggtagtttgtatttctgtgggattggtggtgatatcccctttatcatttattattgcgtctatttgattcttctctcttttcttctttattagtcttgctagcggtctatcaattttcttgatcttttcaaaaaaccagctcctggattcactgattttttgaaggtttttttgtgtctctatctccttcagttctgctctgatcttagttatttcttgccttctgctagcttttgaatgtgtttgctcttgcctctctagttcttttaattgtgatgttaaggtgtcaattttagatctttcctgctttctcttgtgggcatttagtgctataaatttccctctacacactgctttaaatgtgtcccagagattctggtatgttgtgtcttcgttcacactggtttcaaagaacatctttatttctgcctttatttcattatgtacccagtagtcattcaggagcaggttgttcagtttccatgtagttgagcggtttgagtgagtttcttaatcctgagttctggtttgattgcactgtggtctgagagacggtttgttacaatttctgttcttttacatttgctgaggagtgctttacttccaacgatgtggtcaattttggaataagtgcaatgtggtgctgagaagaatgtatattctgttgatttggggtggagagttctgtagatgtctattaggtctgcttggtgcagagctgagttcaattcctggatatcctttttcactttctgtcttgtagatctgtctaatgttgacactggggtgttaaagtctcacattattatcgtgtgggagtctaagtctctttgtaggtctctaaggacttgctttatgaatctgggtgctcctgtattgggtgcatatctatttaggatagttagctcttcttgttgaatggatccctttaccattatgtaatggtcttgtctcttttgatctttgttggtttaaagtctgttttatcagagactaggatagcaacccctgcctttttttgttttccatttgcttggtagatcttcctccatccctttattgtgggcttatgtgtgtctctgcacgtgagatgggtttcccgaatacagcacactgatgggtcttgactctttatccaatttgccagtctaggtcttttaattggagcatttacatttaaggttaatattgttatgtgtgaatttgatcctgtcattatgatgttaactcgttatttttcttgttagttgatgcagtttcttcttagcattgatggtctttacaatttggcatgtttttgcagtggctggtaccggttgttcctttccatgtttagtgcttccttcaggagctctttgtagggcgggcctggtggtgacaaaatctctcagcatttgcttgtctgtaaaggactttatttctccttcacttatgaagcttagtttggctggatatgaaattctgggttgaaaattcttttctttaagaatgttgaatattggcccccactctcttctggcttgtagagtttctgccacgagatctgctgttagtctgatgggcttccctttgtgggtaacccgacctttctctctggctgcccttaaaattttttccaacatttcaactttggtgaatctgacaattatgtgtcttggagttgctcttctcaagaagtatctttgtggcgttctctatatttcttgaatttgaatgttggcctgccttgctagattggggaagttctcctggataatatcctgcagagtgttttccaacttggttccactctccctgtcactttcaggtacaccaatcagacgtagatttggtcttttcacatactccatatttcttggaggctctgttcgtttttttcatgctttttttctctaaacttctcttcttgcttcatttcattcatttgatcttcatttgatcttctgaatcaatcttctgaacacccattctgaatttatgtcttagtcattccactgatcactcccttcttaccacttgaacctccaactaattgacctataaactactcacccaatctttaccccactaaacacatactacagagttattctatctcatagaataacatttattaatagaactaaagacctctatttgggttacacagagctactggactgcatcagagaggaagttctaactcagtctggttagcctgccaaacatacatagggccacaggactcaggtgaaaaccagaattacagattgtagatgtttcaaaagtttacatttgaattaattattctgacagcagaacaagactgctttttggccttttttcttttttctcgtcagaagggtttagtaattcagtgttgttaagacacaggttgagagaaatgtatctaatttattaagaatcagaattggagtggaatacgtaaaaggtggcaaaacataaaaagcccgtgatttcagggatgccctagtgactgtggatacaagctgatcaatgcaaattaagagagatacagtgactcattagaaagatctgatgcttagtttagaacccagactgcattatgggtcataatggcattcctctttccccttcgagttccatggactctccttatttcctgcatttgagaaatgcaagcaaagtgccctcttgggcaccaaacgggagtctctctctgcttcctctgcagtgacaaatgacagagttggactgtcccagctggaatcatccagggaagatgccatccatggagtgctaagagagaaatgtcatgcctaagaaagtgctttgcctcacacatccttcatggccaggtgtactgaagtgcctgaaccaatgctggccctgttgtcctcaaccaaaataattttcttcatggaatatatttatgatggcttaaaaaaacttaaaatgcaatttaaaagtttctgggagaaccagagtatcagaatgaaagttagaagagaggagttggagatccagtattgctgctgactggctctttgacttggggcaagttaatttcagctttcccagccaaatggttgctaaggtgtcttacagctctagttttcattgtaacttgttacccagggaagcacactaccaaacttatccagtgagataagacaggaaagatttaatcacattctctctcaaccaaagttaatcagtcttcattatcagaaacttattttttattacatatattagtttcttatgttgtgagttaatcctagatctctcagagaaaaatgtgtatttcctttcgcatcacctatttctattattgtggtttatttatgtatttatttttaataattagataagtggatcctgatgttaactaacaacttataccaatctgaaaagggttagctttatgagtacttcctttagtttgcccctatgtcaactgaggccttggtcatgggtttggtccatatataggccattagctacatgtgaagaagatctcaggttctgatttgctgccttgggaagtgaggttgttaatcatagggggtacactgacaggatgtaaatatggctcatcaccataactggaaaaaagcaatgttaatgcgcctctcccgccacatatagtcatcttggtgctgatgctcaccttccagtataatgaaaagttcaaattcatctgtcaggcagaatgcattaaaccaggataagaaagtaagggtcagtgaattagaataaacatacttactacacacataaaataaaacaaaaccccaaatccacacttccaaaacaggtttgagatgacatttcaattgaagattcaccacattaaagagttccttgttcctgagcgatgtgctgtagatcattaattctataaacatgcaagtagctgccatgtttttggtggatctgtgtcatatcactgccacagtgataaaggaagctgaagaagctccaacacatggaaaataaaccagatcactgcacaggctcatttatatggaacagaggactaagttggatgttaaacattttaaagatttcccattgcttctctttcctttgtcagggggtgtattttgcagaatgtatatgaaaataacttctaagtgatataaaagcttgcatcttaacttctaagtgatataaaagcttgcattttatatggggaaaatacatgtattcagactatttttaaccacttgaattttgcatctcttccttttttttttttttttttttgagacagggtttcgctctgtcatccaggctggagtgctgtggcacggtcatagctcactgcagcctcaaactcctgggcttaagtgatcctcttgtctcagcctaactcaaagtagttaggactacaggtgtgtgccaccacacccggctccttccaattttttattgataacttttacttcccatgtcacacagtcactattatttctctttctggtgtttgcagagatccccttctattttctcccttgtatgccaagtatctttcgacacttctttttagtcacaaacacctttacattgcttatcatcttccttcttactcatttgggtcaccttttcccataagctcaaataatcttaaaacaaatccaatttggaatctgttactgaagaattctagctgataaaagtgttttggatctctttctctgggagccttgagaaataaagttaaaggtcatttctttaattgtacatgcagacaatagtttttatagcatttgaaaagtatacctattaataaactttaggataataaaaacttagacaaaatctaaccaaaatgacatacaatgttaagtatgggaagggtctttaaacaacactgtctcatctatggcaaggttctatggtctgactgtaatgcctattgagaagcccttgtctatttggttttctttatacttggggagaaaaaagacaaaaagggaaacaagaaaaccagcaatgttcaacaaccttccaggctatttccaagaacaatctttgtacctcacaacatctccacctagtgactccttaaggatcttacagccattcctagaaattacttgttttaaattgccactaatatgcctaacctcatttcagataatttaaccttaaacacatgtatttagaattaattactaggaattgagaaggtaccgacatgaaaatgaagaatgaggagaatctttttctggagaaataaaagagcagcaaaaaatagtaatcaatataacaatcacagttcccgaggtacagaattggtgacatgtcaaacaaagccaactagatctatcagtctaggttttctagttgctttattttgaatgcatacatcttatataaaatgacacttgtattcattgactaaagggcagacggcttacaaaaaatatttgttgagcttccagtgtgcatcaagtactatgccaagttttctacttgtttctggacgtattttgagacagtatagtatagcaattatgtctgtaggtttcaaactggagccacttacttgctatatgactttgcccaaactacttaaggtttctgcatctgtttccccgtctgcaaagtagggctagtaactttaccaaagttactgtgagaattaaatgaaaatatgaaaagtccttaggattgtttctggcatctggctcaatatttggtaatatcatatattattttattctcacaatccccactttaaacagggtctgtctggctccaaagtccctgctaattcctcactgttgtagtatatttaaaaattaaaaatatactttaacaaaatttaaattggtagacattcattagttccttgaatatatggagaaaatacattaggagttaatgtggaagaaatcaccttgaggttgggaataaggagatctgtgttactcggtgaatattctgggcatgaagttccttgttaattagagaatcaacatgagctaggttctttattgtctaatattccatgaatctaatattatctatacataaatagttggttcctaaaggtggttttttctttccttgtctgcatttaatttcgagctgtcttcaaaggaagcaaaactgaagttatgcataccgaatgccaaacaaccctatctgtgaaagttggttttacaagagcatagaacccagttcggcagttcgcctctgccaaatgtccctgcaagctgattagtggtagcgtcaagcctatcgctagttctcctcatctaacccattttcttagtcattgtcatttaaaccacttatactttatacttctagtcctatttgcaaatccatcttttagctttataacccacctccccctagcccttaatttcaaaggtccaccggatatatgtggttgttttgcgccaaactagcagtttacaagaaaactacatcaaacaagaaaaagaaccattacgatgcatctatgttttcccttaagtgcggaatttcacactgcagccctcgtcttcaaacacctaaacaatgcacctaggaccttcatttattattccgtgcccacccacaccctaaaaatcgctctcttcaccccaattgctcgaaatgcctgtcactccaagcactttgactagcccaagagcctcatttaaactttagccccactctctcctcctcgccccgccccgaagctaatccctgattggatgaggcaccactcctcgtggggctgcttaggccaccgcgcgcgctgcgcgctgggaaacgagtggagacacgaggaccagcgcgagcggtcccggtgggctaccctccccctgcgacgaccccccctcgctctgaccgactggtcccctaaacggtggcggcggtttttggtcgttgggccccgggatttaggaccaacatttgaagacccgaaggggtgaggaggggaaaggggaaacggggtcactaccagaccactgctaacggctggatagtgcccggctcactctcacgccgaatacacagtgggggctggcggcggtggctgcggggttcaccctcgtccttccccagccccgtcgagcagtgggagggcaagtgtccgagacgctgcttcctgccccggcagcatccggccagaaggcgccctcgccgtcacccaggcgctgcatggtgagggcccagcggccagtctctttggggcgtctggcggcctcttccgccccgcggcgccctgcgctctccgccttatttccgctctcccccgctgccttccggccgcttcccacctgtgctgcatttcgtgttattttcctgacacgcttacgccgacgaccaacgaccgctgcaggcccgggccgctgcctggccgttgtagggtccgcgcgtcccctggaggctttggacgccgtctggggcgtcccgacggctgggtgagattcagcagtctggtttcagaattgaattcaggctgggtgagctttagcgggctcctagtcgtttgcgtggagttctagccgggactgagcctcgaactttactttgcctttgtctccctgtttcttccccgagtacctcgtgtgtgctgggctgtgggcagtgggaggccgcgggtgcacagggaagatagctcgcctctcccccgacacacggacggcagcacacgtcgtggcaccgcctttgtttcctaacatctggtagtttttaaacccctaatttaaaaatgtttctttggagctgctggaaaaaccacagaaccagcggcatttaatcctggcgttgatattctgagatattgcgaagctgcttgatttatttgggcaccagttttctcctatgtaaatttagcttaggtaatatttaagttctttaagctttaactgtctttacattcttgataaattccccgtaacctttatgttatgtggtaatcctaatataggcaaatatcaaagaggaaatatcataaggagtttttttgttttgttttttgttttgttttgagacggagtctcgctctgtctcccaggcgggagagcagtggcaggatctcggctgactgcaacttccgcctaccgggttcaagcgattctcctgcctcaaactctcgggagtagctgggactacaggcgcgcgccaccacgcacagctgatttttgtattagtagagacagggtttcaccatgttggccaggatggtctcgatctctggacctcatgatccacccgcttcggcctccccaagtgctgggattacaggcgtgagccatcgccgccgagctttttaagtcttggcttctcttaaaaattggcctgattttgtgtttgagaatggcgttataaccaggaagcaggatatgttgcgtgtataaggagaataacatataaaggacatgttcaagggtctgtagaattttgcttatttaaataatgggaagatattttcgtttcaagaatcaccacgatgtatatacagtttgacagacttccatttggatcttttcagaattgaatctccttatgggggtctaataatagacttgttttcagggcacacgtttaaaacattctactttaaactttgtttgcatctgtctgcatttgtttgcattgttaataaaatttgtttgcatctttatagacataaagatgacagtgctgcctgcaatcactaaatattaatgctttctgcttaaggcactgctttgattgctgattttcacttaagaggttggagtaatgtacttgaatattattgccaaatataatacatatcaacacttaaaatatatgcattactggatatattatgaaacaagaattattaataacgagaacaaacccagtttatggactgaaattaagtctcaggtttaatggtgttattttattgttaggagaaggaagacatgtcagtttaagtagagtttgtgactacaaatcaagtaattgctgtaaaaattgtccagatttgcatattaatgccgaatgttatttctcattttactacccgatgattgatgaggcaagaaaatgtgatctctatgttcaaattggtaacagatttaaaataacagattatgaaggaccttgtgtaaggaatggtgtacttaatttggacaagaatatgtagatatctttatcctgaattcaaacagcatatacacctttgtgttcaaagcagtattttttaaaagtattagttacagtttttttaaatagttcaatttttaagtcattcagaatttaaacttaatattaaaacttttatccattatatatttaacttctagcaataaaatgtgctctcattctttaataaaaacaacttaaaatggaattgaactgatccatctgtacacttatttcgaaataattttagacttccatgtccacacacttttgattaactcttctcgttttccaagaacgagaagtgtagtggctgtagtgcagtctgtcactaaaatgaattgctgcttaaaaacaaacagaaaacctccattgacctggcaaccattgacctggcaaccatggtttccatgtaccatactcaatgacaacagtgctaacaaatcaggagtttagtaccatgtaattcaagaaatgtcataaacatttaatgtgcccctataaaggcacgctttgatattcttaatttttttcattattacattgagtttttaaaacccacagtaagattatataatgttctctttcacagctttctaaatttttacagtaacttggaagatgaagtttcagttgaagtagttttaatacagctgacacagttcctttaaataattttcattaatgttttgcttaaattgtgcttgtcttttttcattaatatactttctatttttgaatggcagtacaaatttgaaaatacatatttttgataattgttaagaaggttaaaattaaaggagatatagttagcacttaaagataaaggcttgattcacattgttacttgaatagcttgtgatttgctatcctgtcttggccttttgcttcataccttagagaggttttttccttctattttttcttttgaaagtgagctagagaggaatctttgaaagtctacagtttagggaaaaaaatacatatctgaaagctagagttaaatatggcacaacttttaatttctcattcccactttgtctgcaaaaccatttttgacattctactcaggatccctccttctcttacttggattacttgggtcagcagggtaaggaaataagtttttagaacgctttgtagtgtgacttcacacctgaaagtggcagaggacaaattaagtctggaagcctcaattggtatgtcagttttgctttaatgtataggacagatgtgctttcttggatatttaggtaacaggttgattctggagtattttagaatgaatgtattgtatgcttgttttagatttgattatatttctctggctattcttgaattttgcctcttttagaaataaacttttgttaaattaatatgttaaagttaggtaattttgaactttcttgtgaattatacacgtgcatatattttgttttggaggctttgagataagggtttttttttctaaagagaatataggattggtgactcttcagtgtgtcttttacttctgtaatttcaagctttcataatattttgattgagatttcttgagatgtacaaagtctagcatatgtttctagtcattatctagtaaaaggagcctttaatgtgtatggactggcatgttatttcattgtaagaacctaaataatctctttaaaaatagaactttagagacatgaattaacccaaaaaataggtctgtaaggtaattgtagagatgggttggattgcagaaatcagccatttggagctagctgtgaattgtagttaaaaaaaaaaaaagtcttgtttattaagttaaattctacattttggataaaacgggagcatatttattatttctataaccagtaagtagcatatgtaaggtaccatattaagattggtgcaaaagtaatcacagtttttgccattacttttaatggcaaaaacttttgcaacagtcttaactagattcttgttttttctctcactgtttttcctgtagcatgtttaaaaaaatacaaatgtcacaattccctattcacattttatcaacatgatctttagtgtagtgggccagtatgatgtcctgtgggatgtcgaggccattgaagactctctggactaaattattgaagagagttcagagttatgaatttctgaggctccatggtttgggcccttggtcttttcgattactaattttgtgactttaagcaggactcttcaccgtatttacttttggttttcttgtctacagtattggaggtcatctaaggtccacttgcagttgtaatattactacaaaatattcagtgatggtttaatggcaaaacctagagtcaaacagtgttgagaaaggtggttatatcacttaaaatgctcttaattttaaaggaatggtgatagaaaaatattgaattttttaaaagacaaaagactgaaagttggttgctcagtcaatccttatcttctgttttttgagatggagcctcgttttctcccccaggctggaatgcagtggcacgatctcagctcactgcaacctccacctcctaggttcaagcaattccccagcttcagcctcctgagtagctgggattacaggcgcatgccaccatgcctggctaatttttttgtatttttagtagagatggtgtttcaccatgtttgccagactggtcttgaactcctgacctcaggcaatccacctgcctcattctcccaaagtgctgggattacaggcgtgagccaccgtacctggccagtctttatcttattagtggttctgattacaaaaaataacatttcttttatctgaatctattaatattacattgttttatttattgcatttggtgtcacataaatctgtccatgaggtatagtgtaagatacaaagctgataatacagacataagacttttcccttgataaaaattattgtctactttctctttctgctgtttaataaatgtgtgaggatattcatcttaaatcttcggttaaaaaaaaaaaacagtaggccaggtgcgatggctcacgcctttaatcccagcactttgggaggctgaggcgggtggatcacgaggtcaggagttcaagacaagcctgaccaacatagtgaaaccccacctctactaaaaatacaaaaattagccaggcatgatggcgcatgcctgtagtcccagctacttgggaggctgaggaaggagaatcgcttgaacctggggggtggaggttgcagtgagccaagattgcgccattgcactccagcctgggtgacagagcgagactccttcttggaaaacaaaaacaataactgtgtgaggttagtaaattataagaacctaaaagcaatataaatgagatagtacttatcatattgaaatgaataagaaaggaggaattgagggaaagctgaatagctttttttccttctctggagatagatctttataatataactttattatttttcaataagtgagtttctactcttctcggccatttggccaagatcaagtatagtatgtgttcttaccagtttaatatctgatatgtcttctatctgaggacaaattttttttttaatactttaagttctagggtacaatgtgcaggtttgttacatatgtacacatatgccatgctgcacccattaactcgtcatttacattaggtatatctcctaatgctatccctcccccctccccccaccccatgacaggccccgatgtgtgatgttccccaccctgtgtccaagtattctcattgttcagttcccacctatgagtgagaacatgcagtgtttggttttctgtccttgccatagtttgctgagaatgatggtttccagcttcatccatatccctacaaaggacatgaactcacccttttttatggctgcatagtattccatggtgtatatgtgccacattttcttaatccagtctatcattgatggacattggggttggtgtgaagtctttgctattgtgaatagtgccacagtaaacatacatgtgcatgtgtctttatagcagcatgatttataatcctttgggtatagacccagtaatgggatggctgggtcaaatggtatttctagttctagatccttgaggaatcaccacactgtcttccacaatggttgaactagtttacagttccaccaacagtgtaaaagtgttcctatttctccacatcctctccagcacctgttgtttcctgacttattaatagtcaccattctaactggtatgagatggtatctcattgtggttttgatttgcatttctctgatggccagtgatgatgagcattttttcatgtgtctgttggctgcataaatgtcttcttttgagaagtgtctgttcatatccttcgcctactttttgatagggttgtttgattttttttcttgtaaatctgtttaagttctttggagattctggatattagccctttgtcagatggttagattgtaaaaattttctcccattctgtaggttgcctgttcactctgatggtagtttcttttgctgtgcagaagctctttagtttaattagatcccatttgtgaattttggcttttgttgccattgcttttggtgttttagtcatgaagtccttgcccatgcctgtgtcctcaatggtattgcctaggttttcttctagggtttttatggttttaggtctaacatttaagtctttaatccatctcgaattaatttttatataaggtgtaaggaagggatccagtttcagctttctccatatggctagccagttttcccagcaccatttactaaatagggaatcgtttccccatttcttgtttttgtcaggtttgtcaaagatcagatggttgtagatgtgtggtattatttctgagggctctgttctgttccattggtctatatctctgttttggtaccagtaccatgctgttttggttactgtggccttatatagtttgaagtcaggtagcgtggtgcgtccagctttgttctttttgcttaggattgtcttggcaatgtaggctcttgtttggttccatatgaactttaaagtagttttttcccattctgtgaagaaagtcattggtagcttgatggggatggcattgaatgtctaaattacctttggcagtatggtcattttcatgtattgattcttcctatccatgagcatggaatgttcttccatttgtttgtgtcctcttttatttcattgagcagtggtttatagttctccttgaagaggtccttcacatcccttgtaagttggcttcctaggtattttattctctttgaagcaattgtgaattgcttcacatgatttggctctctgttttttattggtgtataagaatgcttgtgatttttgcacaacgcttttgtatcctgagactttgctgaagttgcgtatcagcttaaggagattttgggctgagacaatggggttttacaaatatacaatcatgtcatctgcaaacagggacaatttgacttcctcttttcctaattgaataccctttatttatttctcctgcctgattgccctggccagaacttccaacactatgttgagtaggagtggtaagagagggcatccctgtcttgtgccagttttcaaagggaatgcttccagtgttcgcccattcagtatgatactggctgtgggtttgtcataaatagctcattattttgagatacgtcccatcaatacctaatttattgagagtttttagcatggagggctgttgaattttgtcaaaggccttttctgcatcttttgagataatcatgtggtttttgtctttggttctgtttatatgatgggttacgtttattgatttgtgtatgttgaaccagccttgcatcctggggatgaagcccacttgatcatggtggataagctttttgatgtgctgctggattcggtttgccagtattttagtgaggatttttgcatcagtgttcatcagggatattggtctaaaattctctttttttgttgtgtctctgccaggctttggtatcaggatgatgctggcctcataaaatgagttagggaggattccctctttttctattgattggaatagtttcagaagggatggtacctgcacctctttgtacctctggtagaatttggctttgaatccatctggtcctggactttttttggttggtaggctattaattattgcctcaatttcagagcctgttattggtctattgagggattcaacttcttcctggtttagtcttgggagggtgtatgtgtccaggaatttatccatttcttctagattttctagtttatctgtgtagaggtgtttatagtattctctgatggtagtttgtatttctgtgagatcgatggtgatatcccctttatcattttttattgcatttgattcttctctcttttcttctttattagtcttgctagtggtctatcaattttgttgatcttttcaaaaaaccagctcctgggttcattgatgttttgaaggtttttttgtgtctctatctccttcagttctgctctgatcttagttatttcttgccttctgctagcttttgaatgtgtttgctcttgcttctgtagttcttttaattgtgatgttagggtgtcaattttagatctttcctgctttctcttgtgggcatttagtgctataaaattccctctacacactgctttaaatgtgtcccagggattctgatatgttgtgctgagaacagatcttaaatggatttttggagccaggagagggaataggagcttgctccatctgctccactcactgacttgatattgcagtacctccaggtatggtgcattcccctcgggggaataaatttttaaaaaaagcaaaatgagtttcttcagaatatcacatatacctgtttttcaaatgtaaatacatcttaaaatgaattatcagggcccagattgtattgatgggtagatattctatgatattacaattatgaaacaatgttgactatttaagacaatgcagaattctattactaatggtcagactagggaagttttaagatgttttctgtttatatttggacagatagctcttaagtttgctaatatgaaaagttttatcttggaaaagcgggaaaaattagccatttcatggatgggacaagtgagtaaaagatcagacgggaggtaggaagaactggcaggttgaatctaataagatgagattaagttgattctaaattcggatacttgatatagggtggggcagatttgaggtttttgttgacagcatgctgaatttcaaccgacaatagcatgcagctttgtagaacaccattgtgctgtttatctgtattgctggagttttcaattttggccaaccacacttttgaaggaagaagagacaggataatgagagaacataaactatgtcatataagaaacagttaagtagcattttcccatggttctgtagaaacttaatagataggctaaggacaattagggtatcatgctgaaacacttgagttaaagctggaaagttctttttaactgaaacttttcttggccttaaatatgcagatgatcattgtgatccttttaagagggatgcatagtgatttctcaggtgtgtttagacatcgaacacattttggagaccttttaatcacctctggaacaatgttttaagggatgccagtttaggaagtgtctggttaaaataactggtaatgaggtcaggtgccgtgactcacgcctgtaattccagcactttgagaggccaaggcggtggatcacttgagcccaagagttcgagaccagcctgggtaacatattgaaaccccatctgtataaaaaattagctggatgtggtggtgcatgactgtagtcccaggtacttggaagtgaatcatctttcaaatgcagttatatgaaaggggcaggttcacttttgccagaaagttaaaatcaagatcgaaatgtgaaagttaaccaggaaagagattatgatacattataagaaataagtttcttaaataattattcaaagtttagttgctctagaggataatgagttctttgtaagaataaaaaataagatgcatatcttctttgtggcaatattataaagaggatacacatatcaggtgggtggttgaattagatgatttttaaggtttcttataaatctgaaattacttttattaagggttttccaaaaagttttgttgccggacttttccatctaagttaatacaatgtttgggttgttttaaaagcatgaaatagtttttcggagaaggtatgaataattgatttgatgttataatctaaaaaaaattgtgaaaaaaatctggattcaggtatttgtgttgctatttgtaagttacatgacctcaagtaaatcacatagcttttcagagatgtgaattttaaatatctaaaattagagtagtacaagtaggggttagtagcccagcatttgggcaaacagatttctgatttgaataccatatttaccttatcaatttaatagcactattactttctctcttagtctcgttttatgtatttttaaactggaaaagaaaaatatttacagattactataaataataaatgagataatgtatataaagtgcgtgtcattatatgtggtatttaatatgctaaatcattaaatgtagaagtaaaatggaatttcatagattaagaaagtaaaggtcagagttgtaaagtgcttgccaaaatctgaccaacaactggaattcaggtcttctcccacacagttgcattatttttagttaaatcatgatgtctctccttccgtgtctcattcattgaatgaatagttatcatatgccaaggggtctgcatggtgctttggattcagaaatgaaaggctagacccttttcaatgtctggtagtgggagagagatggagggaattgacagtcacagcacgctgaaatggattctgtgatataagtacatataagggaatacttgatttagagttgagagggagggtcagggagggttttcctggagaatattaggaataggaaaggccaagaaagtagagaaggactataggaacaatctatgtaaaggaacatatatgagcacctggcatatttgagaatttgcaaataggtcagcattgttgttggcatatcataagaaatgaagctggaggaagagatgatgaagagatccttatggctttctaaagagttcagattttatttttaaggaactgggaaacccctgaaagggctttttatttaattgagtagcacatgctcttgataatcacagaaaagtgagaagtaagggttacttgagtccttattcctactcaccaatgataactaccagtaaagttccttgtaaattatttcaacatttttatattcctacacagccatctatgaatgtgtacatgtatatctttaaaacaacacacagttgatatgaaagtaaatatattttctacttgctctttctcacgtatttcttgaatatttttccatatcagtacatgcaaatctatgatattctttaatagcttcataacattccctgtatagttgtatcctgatttttgatgcagtcctctactgaagaggagctagatattttctagactgttatttctatatacagtgtttcactgaacattcttatgcttatatctttgtatactcttgcagttatatctgtaggttaaatttttagtaattatgaagtatatgtgtattttagattttgatagctattatcaaattttcctctaaaaggataatttcagtaatgcatacatgctagcagtgtatgaagtcttaagttttccctgagttttctgttgggcttcccagcagataattattgagtaccttctgtgtgccaaagactgtggtgggtacttgagaaagtgttgaaggctgaagtggtctctgccctcatgcagcccagagtttgaaccgtaggaagcctgcaggtgttttgtttggtctgtacactttcatagctgtttgacaaattaattttcagtttttaaatattgagagattttgaaaaattggaaaatttggtataactaggcaagctggattctcttgtattagtttgctggagtttagtagccactgcctttttcagatggtgcattggactttataggagcacggtcgattccatttcttatggtctcatttcttgacctcttaacatttcttgccagagccttgtaaaagcatttgagtgatcgtttgatattcaaatttaaaattccttaaactgaaccctgatcttacccctaaaaccagttctactcagtgttcatctctttccttgttgcttaggccagaactgtggtgtcatccttcacttgcctgtttatctcacagtatgtcagaaaattctgttggatgtacttcaaaatatatctcaagtcagaccccttatcccttccacctcaacctctctggcccatgccaccatcatctcttgcctggattttagtagtaatcactttttttttttttttttttttgagatggattctcactctttggcccaggctggactgcagtggtgctatctctgctcactgcaagctccgcctcccgggttcttgcctttctcctgcctcagcctcctgagtagctgggactacaggcacccgccaccacgcccggctaaatttttctatttttactagagacggggtttcaccgtgttagccaggatgatctcgacctcctgacctcgtgatctgcctgcctcggcctcccaaagtgctgagattacaggcataagtggtctcactgcttccacctttgcccttctactgacttccccatgcaacagccagatgatccttttaaaatgaaagaacctgttacttgtatgctcagaatctatagtagctcctcatttaactcagaataaaagctaaagtttataagaagttacctaacttacaaggtataccttgtacatgccaagtacacctttatataaggcctttgtcttggtttctccatttgtatgggatgttcttcccagatagctgcatgggtaggctccttaattctttgctggaaggttacctttttggtgaagtctgcactagctttcctgtttaaattggcaggttctcttcccttgtcaaccttccactgacccatgtgccctattcctattccttttttccctaagtattcttacctcttattatttgctttttttttttaatcatctgttattttttccccattagagtgtaagctatgcaagggagaaattctggccttttatttactaataatatcccagatgtaaggaatagtgcatagaatatagttggtccttaataaatctttgttgaacaaatgaatgcattttgaatttgcaggctctgctgtgcagtttgtttttcttactgttttattaggtaataataataggaaatacatgtatagtgcttatatgcaaagacctattttaaaccctttattttgaatcccctgaatccttctaccctgaggtagaaactattattatctacttattatagacaggtaaacataggcattgagaggctaaataatttgtccaaagtcagagcttagtaagggaagaaccaggattcagattttttagccagtcttgaacctgagtctgcactttataacaccatgctgtcctttttattttaaggaaattagctctttatgatgtattgcagatcatttttctgtgtaatttttttgacttagtttttgtggattttttcttttgccttctaaagtatttttatgtagtaaaaaaatctattaatgtatttttttgagggatttgtttgtttcagacaggatcttgccctgttgcccaggccagagtgcagtggtttgcagtcacggctcactgcagcctcaaactcccaggtacctttgaagcttttaaacttattttttagaaggagctccctgattttaagattaataatttagtcattttcttccttatttttgatttgaaatagaagtttaaattaagcagatatatattttatatcaccttgatagcattatggagattttgagggcaacaaaattaaaagttggaacagcatttaggaacctagcactaattgaagtaaaaaataatcatctgagaataggctgtagggatggacgggaatagactgatttcaagaaatatttagggccgggtgcagtggctcacatctataaccccagcactttgggaggcctaggtgggtggattgcttgagctcaggagtttgagaccagcctgggcaacgtggtgaaacccagtctctacacacacacaaaataaaaacaaaaattagccaggcatggtggtgtgtgcctgcagtcccagctacttgggggactgaggtgggagaatcacttgagaccaggaagccaacactgcaggagccaccttcacaccactgcactctagcctgggtgacaaagtgagactctgtctcaaaaaatgaaataaatatctgataaaatcttcaagtcttagtgactgatgagctgtgcatcaaaggactctgggataacacccagatttctggttgtgagagtttggaagagaggaaatatgtttgttggggtgccatttattggttgaatgtaagccacaggaaaatccagttggcttagatgataaaatgatttaaattttgggctatgtagattggcaggtatattcattgatggcttacattttgttgttactctgtttgctttcctttttcttctctttcacttaattttgttttttcattctttgttgctttctctttttcattgtttgtgtccctttcttatagcttaggccttctaaaggtactgcataattggtcagtgacattgaaagaagtttccaagtttccactgtagggaagagctttggggcagaacctcagaggacagtgaaggctaatcaaacatgccagccacaactgtctttgtttttctgcaacccaaagaaatgccttatagattcttggtattctgttgtaaacttaaccagtgttattaaactttattttaggaactgcaaccatgaatgaagaaaatatagatggaacaaatggatgcagtaaagttcgaactggtattcagaatgaagcagcattacttgctttgatggaaaagactggttacaacatggttcaggaaaatggacaaaggaaatttggcggtcctcctccaggtgtggatttgtttacagtcttttaaatttaatctttaacctcgtcatgtagattagatgtgtatccccacaagtattccaaacaatagctctctccttgtaactgctttaagacatttttttttttactgttgaggagagttaaattataaatgttattcatgtcttaccattacattttttcagccctgctcttcatctaagaagcagttgagaaagaagctgggctaggttgagaaagaagtcaggattaggaaagtaggaaaaagggtgctactctaggtgttaaagaggagatcatctggggaggaatttgaaacagcagtgagtaagtgagtggtgtttaaactagaaaaccaaatggaaacaggtaaatagaatgttcgacttttctaccaatagtcagtacaattcctttgcccgaaacccttcagtttatcacacttaaaataaaaatctggcttctgggtacctcaatggctgtagcacttaccactttcttcctttctcacgtacatgttagctgtacaggcttccataatctatgttgctctgacataaaagcgcttgctttttcttctttccaaatgcccttttcccagataatcctcatggctcactccctcattctattcaggtctctgcttaaatctcacgtacccagagatttgcctgaccactcccttgattttcttcgtagcacttaaccactcacttgttatctcccttctctattgaatattagcttcataagggaaggggctttattttgtccactgttgtatcaccaatacctagaattgtgagtggcacatagcacagcaaatttgttgaatgaatatatgattgaatagtgagtacaaatatccaattagaatttatgtgtcttttcatttttgtcgttcaggttgggaaggtccacctccacctagaggctgtgaagtttttgtaggaaaaatacctcgtgatatgtatgaagatgagttagttcctgtatttgaaagagctgggaagatatatgaatttcgacttatgatggaatttagtggtgaaaatcgaggttatgcttttgtgatgtacactacaaaagaagaagcccaattagccatcagaattcttaataattatgaaattcgaccagggaagtttattggtgtgtgtgtaagcctggataattgtagattatttattggagctattcccaaggaaaagaagaaagaagaaattttagatgaaatgaagaaagttacagaaggagttgtagatgtcattgtttatccaagtgcaactgataagaccaaaaatcgtggttttgcatttgtggaatatgaatctcacagagctgctgctatggcaaggaggaaactaattccaggtaaactgaaaggttgtttttcaatattaacattattacaaatatggagagatgatagtacatcagggatcaatattatcaaaatactaatgtcacttaaagaagagtaaagaattgtttgagtaatgaagtaaaataaattacatgattctaaaagacaagaaattgttccagtaaaatgagtcctatttatgatatttttactggatatatacactttgagctgttaattgttgtttaataaaaatccaaagggcaacacttaattcttctgataaagatctatctttgaagtgtatttgttctattgactctgaaattacatagtaagttttagttatttactttagtaaaaatttttgtgtgaataggaaacaaatgcttaaccaaatttattgatgtgtagttgagtttctgcttctctggggaaacagttttactgaacatctttaccttttattctttattttaattctcttcaaattattattttttttttacaggaacattccaactatggggccacaccattcaggtagattgggctgacccagagaaagaggtggatgaggaaaccatgcagagagttaaagttctttatgtaagaaatttaatgatctcaactacagaggaaacaattaaagcagaattcaataaatttaagcctggtgcagttgaacgggtaaagaaacttagagattatgcttttgttcactttttcaaccgagaagatgcagtggctgccatgtctgttatgaatggaaaatgcattgatggagcaagtattgaggtaacactagctaaaccagtaaataaagaaaacacttggagacagcatcttaatggtcagattagtccaaattctgaaaatctgattgtgtttgctaacaaagaagagagccacccaaaaactctaggcaagctgccaactcttcctgctcgtctcaatggtcagcatagcccaagtccgcctgaagttgaaagatgcacttaccctttttatcctggaacaaagcttactccaattagtatgtattctttaaaatccaatcattttaattctgcagtaatgcatttggattattactgcaacaaaaataactgggcaccaccagaatattatttatattcaacaacaagtcaagatgggaaagtactcttggtgtataagatagttattcctgctattgcaaatggatcccagagttacttcatgccagacaaactctgtactacgttagaagatgcaaaggaactggcagcccagtttacattacttcatttgggtaagtttaaaaatactttaaatgatgtataatatgaaattaggaaatactgtagattatttttaaattcatttattttgaactcaacattagtggtaagtatgtaacataaattttatctcaattttataaagtcatgataactttcttgaaacttgtgccctgtaaaatcttcctacatttagcttttcttttttttttttttttttttgagagatggagtcttgctttgtcgcctaggcttatgtgcagtggcatgatcttggctcattgcaacctgtgcctcctaggttcaggcgattctcctgcctcagcctcccgcgtagctgggactacaggcacgtgccaccatgccaggctaattttttggctaattttttgtatttttagtagagacagggtttcactgtgttagctaggatggtctcgatctcctgacctcgtgatctgcccgcctcggcctcccaaagtgctgggattacaggcgtgagccaccgcacctggcctacatttagctttttaagcattaacctgtgggaaaatttggttttactgtagtgttcataaccctgttttattaatttattgtttttttaatgactaattctcagttgaaataaaaattttttgtataagttacaagatatgttcattaaaccaatttattatagagtgtccctgcatctttggtgaagtctacataatgatctttttgaggggcaggggatagggagttagtaaaatcagtgggatttcagatgggtcgtgtgtagacacagctttatgctcaccaatctggaaatttgtcattatcactcatgaaagacaaaaagcatcattaagagatgtttgtgaccattctctttttaatttcatgtttttcaaaaagtaaattttctttaaaacgtttgaaggataattatgaaaggctttgcaaaagcatagaaagatatgctaactaaatatttgacgttgtgaaggaagagacataatatcactatggtgttttcctactttctgttttttactgttaggttagcctcccccctcctccaccccccaaaacctgtttattttttaatgcggctatagattttagtgatgattactttgtgtcccaaataatatttattggaagagtagtggtttcctgagaatcaaataaaagagaaagatcttttgagtgttatcattgtttcttgattataattgtgaaactcttcactgaaaattattttttatatggttgcagaaccatagtacagaagcttatatgtatttaaaattcatattctcaagtttaagagaaaacagtcaagaaaaacattctcaaaagggagaataatttttatatattgtttaggcttgcttttatatattgtttaggcttaccatagccactgccatagtattagaaattttttttttttttttgagatggagtctgtctttgtcacccagacttgagtgcagtagcatgatcttggctcactgcaacctgtctcctggattcaagcaattctcctgcctcagcctcctgagtagctgggattacaggcgcccaccaccgtgcccggctaatttttgtattttaagtagagacagggtttcacgacgttggccaggctggtcttgaactactgacctcaggcgacccgccctcctcagcctcccaaagtatattacaaatatttttaagagattctgatttggagatatcagcaaaacttgtgggactaaaggtaaggttctgcttgaagacacatttaagcagtgtcttcaattattagtttggagatatttggggatttagcatcattgaagctaataaattcttagttcttatttctattgatgcacaaaatagaagccttcaattttactttcaataaagaccatctaagttaaagataaaattgttaggtagacagcaaataattcaaattaagtttcttagagaaaaatgggtctaaatattattttggagtgggatgtaattagttgctgagcaagtttctcccaagatacttgtgtctgatctaccatgctaatactgaaatatttttaaaatttctatcctccctcattcccttacacataaacttctaaaattcttacaacatagccatattagtttaatttatggcaaaattatatgtagacattgtttgcccatttcataaagaagattcagattctatatggaagcagagcttttaactcccttattaccatagttaactatatagcatagttaaaccgatagttccctaagaaaacacctaatcaggtacaatattttcaacttaattatggttaattagtgatcaaggtaacatcagtaaatgaaatccttagtgggcacatgcagattgctttagtcatctattccagattttatcaaccttgtatcaatgctgattttaataaaaagttgaacaatttgtattttatgtatttcctcaatctgtattcaggctcagaacagttaatataatgtaagcaaaattcacatataaacaaaaagattaaacaaaaccctaggtcctatttcggtggagtacgcaaagcctgaggtcttgtctatggacagtaacacagaaatccttatggtgcttgactacctatgtaagtgaagattgttgagttagaggcaggaaaatatatttaggcagctgagaaggagaaagagaattcagggaagcagaagagccagagatcaggggtctaggaaactttgatcagaaaacaaatgtcagcccttcagaggtcattaaagtagggccaggagctgtagacagtgaggaggttctatgttgccatatggcaggttaagagtagatctgagtgttgccatagcagtgttctggatcactttttcccttctgttaatgttggagcctctgggttttaaaaggttgatgcctttctagttacaccttcttttagttaaaggtaatagggtttcatcaaatagctcagagttgagatcaattggtggtagtggtgtgttcttgacatcctagtaaatacttacgtagtccaaggattgaattgttttgaagtcttgagaggttgttattagttcctagagtttctcaaacgaagttccttacctattaagtcatcttttggctctattaaagaatttgagaagtcaaattttctagagaatccatttaagtactgtttttaagatattttctttggggatagtaatttttttttaagaatttgcctcagtatccttattttaaccctttcagtgtgatgctattttgggaattaccatccaatcttaaccttgatgatcttttactatcatatgtgatataaagtcattttttaaattaatattttagatctctttaagagtgtacttttaatatccatacagttttggtgttaccacttctatttcccaagtttgaaaaataaaagaaaaaaaattaggctttgcttaaatggcaatcattgctgttatgaaaaaaaatgtatgtcttttcagggataacaggcacctacatgagtactagaagtcatggagtttacttctggtgagcatttagtgatcttactagcatctcaaaagttcttggtttacaggtccttaaaatcaatttttaaaatatttaggtgttttttttggtcctatctaaaggaagctctattttaagcaaaatacccttaataaaagaaaagctggaagttggggttaatgccaaaatagaaccttccttatcctttttcacttacttaaaattagagactatcttcatcttcataatggcaaggaatgacctctcttatctcactggaaactcattacctaaccagcaggaaaagaaattatgggctgggcgcggtggctcacgcctgtaatcccagcactttgggaggctaaggcgggcggatcacttgaggtcaggagatagagaccatcctggcgaacacggtgaaaccccgtctctactaaaaatacaaaaaaattagccgggcgtggtggcaggcgcctgtagtcccagctactctggaggctgaggcaggagaatggcgtgaacccggggggcggagcttgcagtgagccgacatcaagccactgcactcaggcctgggcaacagagccagactacgtctcaaaaaaaaaaaaaaaaaaaaaaaaaaaaggaaattatgtatttactgggttatttttagggatctgtaatctgtaggatagtgagtgagtttaatgggtagaatcctgatatagtttggacatttgtccctgccaaatctcatgttgaaatgtaatccccagtgttggagttggggtctggtgggaggtgattggatcatggcggtggatttctcatgaatggtttagcaccattcccttggtgctgtcttcgcaatggtgaatgattcctcaccacatctggttgtttaaaagtgtgtagcaccttcttgctttcgctgtcttgctcctgctcttgccatgggatgtgcctgcctctgcttcgccctcagccatgaataaaagttccttgaggccttcccagtagcctagcagattctggcaccatgcttgtaaagcttacagaactgtgagccaattaaacctcttttctgtataaattacccagtctcaggtattcctttatagcagtgcaagaatgatctaaaccaaatatagactggagggttagaatagataggttctatattaaatatttgctatatggagatatcttgggtcattcagtatcacttatttttaagtaagtcttttctatcttcacaatctcgttatctgtttagtaataaagcaaactatcaaggcgaatagtacttctctttctaaaagtcaactctgttttgaatctgggtctttcagtattgccactgcttttctttggaggattctttgcattgtagaagtggaataaacaaaatcaaggagatcaaggaacgtcctggagagttagagttttgaagaagaaagtcctggagaatacttagtggaaagaggaaggtagtcttatctgtattgataattcaccttgttgtataatttattagcaaataattttaagcagggcatctcttctgtgtttgtgtaatactgatacaagtggtatttttttcttacttgtatggctattggaaaatttttaaaacagggatgaagaacctgtcactaacatgtgccactgatttaatttcatcagatttgtgtactgttgttctggacaaaaatgattaaggttgttttttttttttttttttttttaaacaggtctttttgaaagcctcttacatgctaagtgtgctttcctaagcattctggagctaaagataaataaaacattgtttttttgtttaaggagtcacagtctagtgatgaaggcagatacacaaattctttgcataggttattttgggagtagaagaggaaaaaggtatgcttccctgacctcagttgtaaaccctttgcagagtttgtgtcagagaggggcacaacatgagcaaactcctcttagaaaaatagcatgtggtggtttaatggcaggtagttctgtatattgtttgctttcataatttcagtgtgacttaggaagaattaaaggagttgaaaagatgtaaacattagttaattaaaatttcattagtcctgtttcttaaaactttgcttttttttcttagtgcaactatgttggatatatctgcttttcctctgagcaagtatttttttcccagatgaatccatcttgatttgtgtggaccattttgtgtgtgaatattcattcttacaatatcttttgtacttacttatttcagtattcattttgtaatggacttgtatattgcttcttatatttgactttgaaatggcgtacatcagtagaatcttgcatttttttctggtaattgaatagtatttagtagatatatattctaagcatgatagtcgctgttagcttatcctttttttcaaatgaagcttttatttctgttatcacttgtaaatttgttgttgaaagttacacttttgtgaaagtatactattgtgagaagttttaatctgaaaaatatttggtgctttttttcttatgagctattattatttccagattgatgggcagaaatgcaaaaataaaaaataatttcagataaaaatattccaaaccattgctttgaaataaagagaaactttctccaggtttttttaacttaagaaataattctaggaggcacttaagccaaacatgaaataatgattctatgatattataatggagttataaattataaatagaagaaaaataatacttttcagaatttttttccagttttaactacagctctaacttggatgatactattcaaactcatattttaaagaacaaaggtaatttgcaaaatttcttttaaaatttacctacttaaatgagaaataggcatcaggatcaacattttacacatttgttttcatatgaccaagtggtgaccaaaattccattaactcaactatgtgtctttgaccctctgagagggcttagtcctcatgaaaatgtatttgtattactcttgaagtttacttttttttttctgaaagaccatttaaatgaacatttagcattacttataattctcatcttacaaacacttgtattaatgcaccatatatattatggagttagtacagtgagagaagcagcttaatagaatgattaccagaataaaagtataagaattgagaatcctttctcagccatcaacaaattgtgtgaccttagaatggcaaatgaattgtttagtcattggacttcaatgtcctcagatctaaaatatcaggattttatttagtaagttttaaggaatcttttttctaaaaagattatggtttcatttaaaatatggtcaaaatcctatgtagaaccaaaaataatactttaaaatattttatgtctgcagagatacatatttgagtacaagtagtttaaaaccaacagctgcttttgcaagaaataatccatcagtttaatatcccttcctttatggaattcaaagcttatgcccccctacttcacagcagaacagctggaaaaaaaaataaataaataaaagattcagtcagtcaactgttttatttgcataatgacaactaattgtttttcagttattttcttctctgaatttgctaatcaattactatagccaaaaccaaggtttttagaaaacaagttaactacttaaaagtttggaaactaaattttctttttgtaacagaggatctaggaaaataatgatgtgtatcaaaacatgccatgtggggagtatctgtcccataggtttattaactgatgaaggtgatccttattattttatttacttcataaatctatttgatcatgcttgattctttaccctataacttcttaatgtctggttaatacggtcctaaaatactccttctaataaactagttttaatagcagctactgctgtattaatctaatgtctaatcttatttaattcatatttttaaaaatggttttaaaaatttccctttatgtcagatgccattagcaattgtgtgtatatgttaaatatacacacaattaaatgttagtagcagttcataattttgccacatgatgtccctaaatacatattttgaatgtagcagttcataattttgccacatgatgtccctaaatacgtatttttaatgtggctttaaaaggaaatttaatgttacgttgatttgtagctcctctttgtcttacctttcttttttttttagaatcagaaaaatctctgtgaaatgctctacttagtcttcttcagcctatcatgcccttatctctgcttcctgtttaatatttagtagacaattttttatgctgtagcagtgtaattaagtgaatggactcatgaataaggagacagaagatgtagaatgatggtttcactatggcgaatttattttatgcttttaactactttaaaattcagtgtttcttccaggccttttaggtaaaatcaaacatagtatctgcccttactagttaatatctgatatatcatcaatcccagagcatttcttcctctttccaagacctggtagtaccttacctccaagaatggttcactttcctgtgaagcttcaaaacagaaggacaataattaaaaaccttagtatccccaaataattagaaactttaaatcaccagaatattaataactccttggattttcatgctccttaagtgacagtatttggttagagatgtattaatgacatgcgggtccttatttgtctcatatatagcaagtaacatttgagctataagaatggcctgcatatgaaattttatgtacacaatagttcatattttaagaaaataatttgggtaactaaataaatttagtttgcctatacattgctttgattcagtaaatataatctttgtactacactaataatattatcagctctactataattatgtttataactttggattaaaaagtatataagagtacaatcatcagaaaacatcaatctcttaaacagttgtattgcctgataatttggtttttgtactttgttactattcttgtgtgtttaaacagtataccttgatttctgtacacaaattcaagggattggcacttatttaaataaaatgtaaaccatgatataaaactccacctttttatagagtagataaatctttgttgacctatgctttactttttcttttgtgcaatttgattgtccttccattatatagtctaaggatgtttttattagagttactttttttctttgtacttttctttaatcctgttttgtatatggatttttgtaagaccgaagcccatttacttaatttttttcttgttaactttgtttcaacaatacatagttccagtctgcttgtttactggccagattatggggtaaatgaatatccacaaaatttgcagcatatgtgccatgtatgtggacggctttttttttcctgctgctgcccagttaatttttggtccaagggtgaccaaatctgtagttacgaatttatgaaagtattggataatttggggcacagaagttataaggttccaggtgagccattatcaatctttggaaaacaggttaagattctgttctgcactataaataattcaagcagtgaaatgcttgttaatttaaaggcatttcacctgtatatatgtgtgtacatgtgtttccttgagagaataagaatcccttaagggattccttggtgtgaacttaggtgtgtgtatcaagtatagaaatagtgattataccagaacattgaaacattatttcttttcacttaagaattaaagggaaagaggcaatactaagcaaaaatatgattgctttcactgtgaaggcactcacttagtttcggagagggatttacaaatgagatagtaatgattttctctatttcttaatattttccctattttacttagtagatttaagatttttaagttattgtattgaaatacatatatgtatgtgtgactcttctatttctcactaatatactagtgttctaaaactcacttttattgatttttttatatctttacattttattttcttatttatgtatttttttattgtgatttatgctccaggcagggtgttgctacattagctaatgtggcttgggagaaggatggacagggttttcatcaatcctctgaggccttggaaagcagcttgatgatatcagatgctctcatttgaattgatatattggagaatgatttcattgcctttagatttaatcagaatttttctgtaatgatttttaattttagtttttttattctgaaattatttataatgagttttctatgacaaaaacttgtataatcaactcccaagtatttagataggaggcatgaaaaatggaaaggaaataatctgaatatagttagcttacttgtttatcctagaatgctctttaaatatatagtatattgattctagaaatttacacaaattcaatacaaaacccagcttaggaaaagttggaaagatgttcagtttctcctccactcaatttcttaacctgcagagatgacattgtttcatactgatgcagtgcacttacctaagtattacattagtctgccctctgttttttcttcatggtttttactggtaagggtaggttgttcactttcattcctgcctcattccacaaaagatttgaggtggctccttaaaaatatgtaaaatacaaaaggattcagattttaaattggagaaattgagacaattggaaattatgattaggaaaataaagccaagcaaaaccaaacaataggttgtttagggatagatgattatgaggtaaaaccataaaaatgccagggaattactaacatttaaaagttactacttggagggagaaattggaaaggattcaaagggacttctgaggtactggtaatttcctatttctaaacctgggtggtgagtacatgttttcatttttttaattatgtaaggcatacacatctatattgtatatatttctctgtttctatatttcattattaaattgggaaaaaatgaaagccagccaagggtgagaacttgtgttattttgtcaaaattggaataagagtctttctactctagagagtctcaaattaatataactcaaggtaaaataggaaagttacatagtatcaaggctaaataattttattatactcagactatatttggaatgttttggttgcttttgggcaccacaatttaattcaaccttgacaacttgggtgagcttggaaacgccataatatgtaataggacagtgaacaactgaaatatttggagctgtttagtgtgtaaatactaatacagaggaaatgtgattgcagttttcaaatgtttgaagtgctcgcacgtggaaaaaagactttagtctttatctttggagctctaggaagtggacttaagtctaaaagagcaaagttttaaggaggtagattatggcttaatataagtcagaactatctaagcctttcagctgctaaaaattctctcagtacaaaacaacaaacaaaaataattttttaacatttattttaaatccatgaaatatatgggggaaggaaagagtctttactagactattgtaactcagaattatgttccctaataccacttggaatataatggccttgccattttcaagccctctgagaaatttactttttaatttactttttgcaaactgattaagaaagtttgatttgggaatttttattctcgtaagaatatcccttttgcttactattcattcctttaggcttctcatgtttagtttattaactggcagatggctgattgttaaatcttgttaaaatgtgttccttcaacaaatacttacctaaggctgttttgtgtaaagttatgaggatcactgtagtgaattagacacagttgctgctttcatagaccttacattctattgagaccaatattcagttagagttctgataaatgctctgaagtagtacggggtgttatgagaacatacaattggatgacctgacctaaactggtattggggtcaggaaatggtacattgcactttagaaagaatttcaggaaaaggaaattaagtactatggcatagcatataggcaacacaggaaaaaagagtatggcatttcgagccagatttcctgggttcacattctagcttcattacttacttgggaaagttacttaacttctctgtccttcagtttcatcatttgtaaaataggaatgatgataacagtatctcatagggtaattacatgtattaaatgagttaaaattataaagggcccagaacattcccttttatatatactaagtaccatgtaaatagtgaagaataattattcagaaaacaaatccaagataccagtttccaatcatatgtaatataaatattagaaataataatagttaagactacatgttagattttgtgctaaatgcctttatatgatgtattagtctcacagttccttgtggtagataggatatgtgtgtgtgtgtgtgtctgtgtgtgtgtgtgtgtgtgtgtgtgtgtgtgacagagtttcgctgtgtcacccaggctggagtgcagtggtgcgatcttggctcattgcaacatccgcctcccgggttcaagtgattctcctgcctcagcctcccgagtagctgggattacaggcatgtactacaatgcctggctaattttcatatttttagtagagacggggtttccctgtgttggccaggctggtcactaattcctgacctcaagtgatctgcctgcctcttcctcccaaagtgctaggattacaggcatgaatgagcacgcctggcctgttgtagataggattttaatgttgacacttctttactttttttttttttttttaacaaacaggcttcagtatgttaaataatttgcccaagatcctagttagcataagaggctgtgctcttaactgccatcctttgtaaattcacatgattccaatgaaaaactggtttttgtctaatattaaacatttggtaacagacagtggacttgtgaaatattattggcaaattatgtttctgtaagttaaaatacaatgagatgggctttcagtcctgccttaccttttttccagagactattttggctttaggaaacctacaggcccatgtaccagaccccactccattgtaatgttgacctgagacatctggttgaattctgagttatcctgagttagaaaaatcttgtaaacatatcttgtttacaaggtagcttcatgatttttaaatttaccctaggatcagcattgccagccaatgaatggcatgtgtcaaggtggcagatgatatatgtctttcccccatccagattctagacagaacatcaaacaggcaaagtttgtttgtatctatttcctggtcccctgttacttggtactcattttactctgattatattcaaaacatcccaatacatagtttagccatataatttatcagtccgaataggtttatgctttttcattgttacttccttaggaacctatcatggcttgctattgtagtataatcaaatactctgaactccacattctcctgttcagaatgctgtactgtttggccccacttaacctaaccgtagccatacatttcctgctgtgatcatctgaatttgccatgctcattggtaggtctaggcctttcccattgctgtgcactgtgcttagaatattctgcttatccttatatacttttatattaagctgttattggacatagtaacccaaaatgactttttctttatgatattactcaataatttttatattttttatttactcaaaatttttcttccatcagtgtatataaagccagtggactgtatgatttgttgttattccctgcattatatgggtgagtactgtctcctttagtactcagcatatggtgctttccaaataatttaaagcaatctacatgctataaagttaaaagataaagattacaaggaaagatacatttcggctgtgctttgagcagaaagaagaaaggattgggaaagaaatatatgagataggaagttgacaggtataaacacaggcatggttaaattatgaatggtggttaatgggctgaaatatctgtgtatatgtcaccaaagtaaaaattaccagtatataatttttaacatgctaatgttggaggtttcaaaatagtagaaacccctgaaatatagacaggggcatatggatgattttatattggatatgtgtatattatatatatgtatataaatttgtatagtggaataggagattaaggttgtaattgttatttttaaaccctctgagaaaacctttgtgtttatatcaaccaaatacagtatagaatataatgatttatgtgcaatttttaaatttcttttaaaattcattatgtaatccacagttatatctagcataatctataacgtttgatcaaggcttcacaaataggaaatgtcagtcgcttattgtatgttatttctaatcttagtttattactagcattatacttttatattcttctacacaggtgtagactgagaagatggtggtgttcctttcagtttagtttcctaaaaataggaagaaagcttgaaaattccaggtgctaatatagcaggcttatttggaatacaccggaatcctgtgcactcagttattttctgtcttcaaaagaagaaatagtatgacatatctgagagtctgaaaataatttttatctttcatatcatttactttaaaatttatatggaattttctgtcaaactaaagaccagtaaaatcttcaaagatatagaatatgcttttgtaattagtttcagtgacattttaaacttcatcacatctttgtagaacaagtcatctatctacaatgttatgttttgttgaaaataatgaaaattaggagcctacttagatttttacttagttttcccttattttggcccttattcctgcataacttatagaaaactaaatataaaacatttaatgatacccattttacagagaggtggtaaagatcctgactctggtctctgaagtttaatttatcctattcttattctccactttttgacatgccttttctttcccctagtctctttcttattgtcttgcctactaaataatcacttttgaaataatttctcagaatatattcattaacagttgttgctttttaaaaaggaatgacacaaataagatggtaaattaaattgggtgaaagtaccagtaagtagcaaccttgcatttgacaggaaattgagactctgctgctaagtttttgcttttgttgtgagaatgatcaccatctcttctatatgccgacagaaatttaattcttatacattggtaatttaaatcccagcatttttcctgttaaatttgatttcattcaaaccaaagattaacaaagctaattctaaaactccaggtggtagatagtgaaggccattatgaagacaagaattgttctgtatttaataatatttctatgtagcatctgtattgaaaatcattatagtttttaaattagtctgaatcacatatgctctattttggtagtaactataaagtgattttatattttatcataattatacattatcaacttctcctttatatatatcactggcaggtttttatcccctcccccccttttttttaaaactccttaagctataacattacatacaaacagaaaagtgcacaaataatgagtgtaaattcagtaaattaccatgagggactatgtcggtataactcaccaccgaggtaaagacataaaataccaacactccaaaagactcttttgtattttccccagacattactttccttcctgctcaaaggaggccactcctctgacttattctatgtatttttgaaacttatgtaacattttatgtcatcttgtctggcttcttttaacattatgtttgtggattgattcatactatttcaggtagcagtactgttcatttgctgtcattgatacctgtatttcatcggagtgttgtatataacttgctgtctttgttgatgaaaatataaagaactatcagtttggggctgtttgaataatgacactctaaagattcttgaacatagtgtttttggtgctcatttgcacacattcctgttgaatatataggagtgaaagtggtgggtcatgttttttaaactgtagtaaatagggccaaataattttccaaagtaagtatactgatttacactttactagcagtaaatgggagttccagttgtttcacattcttgccaacacttagatatcagtcttttacattttggatattctgattagtgtatatttcttactgagattgtaatttttatatgatgataacttacgatattgatcatcttaggaggattatagggcattacgctattgtattggtgaagtatctttcttgttcaagtcttgctccttcattttattggtttgtctgttttttattttattacttaatatagaagtcctttattgaatatatttttaaaatatcttgttctactctatgacttacctgtttattcaggtatgttttgaaacatagaagttcttaattttaatatgattcaattgatcaatcttacttgtgccatttgcatcctgcttagaaaacctttactcaccacagggtcatgaaatattttctttattatcttttagaaacttcatatcatacctaaatttagtgacaatgcgaagtatcagagtccgccccgctcatatgaatattcacttaaccaacaccattttttgaagacttgccattttcccatgactctgcagtgccaccttaatgtaaatcaagtatgtgtatatacactgccttctaatatacacacacatatatgacttattctggatattaacattctattccattgatctgtttgtttttgcaccaataccatattgtcttaattctgtaactttatattttgtaaataatattttctcacttattttttcttcttcacaattatcttgacttttctcagcccttgagtttccatatgaattttagaatcagtttgtaactttatatccaagaccaaaatcctaatgggattttgattggaacggaattgaatctgtagatcagtttgggaacaataacatttttatagtattgggtcttctgatccatgaacatgatacctctcttcatttacctaggcttttaaaaaatttgctctctcagtagtttactgtttaaatatcttctacatctttctccagacttatacctagtgtttttcataatgtcatcataaaaaataacttatcttaatttcagtttctaattgttcctgctttatgtgaaaacgatttattttttaatatattgggtaaaactacttatttgtgtcaaatagtttgactctacagtaatttttctgcatacacttttatcaactaaatgtaaagagctttttcttcctttccatcctttatacacatcttttttttttctcttgccttactgcactggctagaactactttttcaacattgaatacaaattatgataaaaaccatccttataaactttcagtatttctccactaagatatgatgtgtgttatagcttttattatagaagtcgtttatcacttaagatactctcttttattcctgctttgtatgagtttttatcatgaatgggtcatgaattttgtcaaatacttttttgcatctagttaattacatcatttttgtcttttattcttttaatgcaataagttgcattgattgatatttgaatgttacatgaatcttatttccgaagtaaactcaatttggtcatggtacattatacattatactttttatatattgctaaaattcatttgttttttttaggatttttacatctgtgttcattagtgagattgactcattcttttcctcataaaaatagttgggaaatgttttaaatttcactgttctctgtaagaatttatataagattggtgttacatcgtttttgaatatgtggaatattatttaagaggccatcttagagtttttagcccctcttttattaaggttacaaatatctctcctaagtatggttagagctgcatcccatacatttggtttttctctttctttttttttttttttttttgatgctgagtctcatactgtcgcccaggctggagtgcagtggcgtgatctcggctcactgcaacctccgcctcctgggttcaagcaattctcttgcctcagcctcccgagtagctgggattacaggtgcgcacaccacacccagctgatttttgtatttttagtagagatgggatttcatcatgttggccaggctggtctcaaactcctgacctcaggtgatgtgcccgccttggcctcccaaagtgctgggattacaggtgtgatccatcatgcctggccttgtgttccatacattttgatatgttttatttttattatcatttgtttaaaaatattttttatgttttgatttcttcttgaatcttcagtattaatttctaaatatacatttaatgtccttgccgataggcttgggattaagtctctcattttgccatttgcgttctgttttctctgcttgttttattttttcatttcttgccttttttttatacagtgtttattttgactttcttttctttagctgtattagttattcagtctttaatctcttagtccttactctataaatgccaacatgcattcctaacttactgaagtctaatattaatgagtattttatcacatcctagataatacaaggaacttagtacactttgacttctttcatttcttttacaatttatgtagtgtcattggtacttatatatatatatttaaaccttatacatttaaaaccccacaatgcccaatataataaaaacatctagttataatcgtttttatacttaatatacattgatattgatttacacatttatcatttcctttgccctctgtttcttccatctctaagcttccactagaattgtttatttattctacctaaagaatactgattcatattttcttttgtgtggatatgcttatgacaaattatctctattttcatttgtctgaatgtattcttagttcacctgccatttgaaaggttatttttgctaggccagcagttattttacttcagccctttgcagtagttatgattccactgtcctttagcttctgttgtttctcttgggaaatctgttgttgatcagcttgttactcctttgaacatacattgtgccatcattccctgtacccagctacttctactattttctttttatctatgattttcagaagttttactattatggatttgacttttgtatagtcttcttagttttcatcttgcttggtactttcaccacttctgaagtctagattaatgtattagtaagttctgcgttattgtgttttcaaatactgcatttgttcattttctctcttatttatggtaatccagctacacatatgttaaacctttttactgtaacctgtgtattgattatatttcttctgtattgtccatccttttgtatgtcagtctgtatattttcttacctgtcttctgttttgtaatttttttatctgtaaaaaatttaaaaggtttatcctaagaaccattcatttagattcatttctcagttctagaattaaatttgagtctcttttgtgatttctacttccttccaaaaattttagtcttttattttcttgagtgtattaggcattgttatttcaatactcagttctgaaatttaatgatctaaataccctgtggatctgttactgttgtctgctgtttctgttggttttaggtgatagtaattttacctccttgtatgactggttattttttattcaataccagatactgtgtatgaaaaattgtggagacaatttgaaggctagcacgatgttatatttattcatagaagatttattttggcttcagaaaggtggccaaaggactgacaaacccagattgctttaatctaggcaggaattgaagttaaatttagtctctgttaaagtttgtctgtttctggtccatttttactcagttccagtcattccttgttagtagctctttagttctagtttttgtcttcctagcttcatttgtctcttggcaccttctgttaattcccaagagggagcttttgggaattggccaagccttccagaggaaatgcacctcccaaagaggtgcacatacgtttgggttttcttcttgtctgagatcacagccccataattcgtcactgtcttggttctcagtgatttgaaacaaatgtttttgtttttaataatttcttacattttctagttcttaccaagagggttgattagtgttacctagttcatcatgtaaaaacagaagatattgtgattatttttatactgaattataatctttagatggttatttttatatctagttttctataggttatcagaaatttttcatttgtttatacttttatacacaatttcttagcatagatttggatatacatccataacagaaagctttaaggcatatgaagaggtaaccactaaaatagatggatgcccacagttgtactatatatgactaaattagatttcaagtagataaaatttagctgttgggaagaaagatttaagtttagtattattttggccatctatcttttttaagacagcaaggaaatggtgtttcatatgtaaaataactacaccttatacaacatttctatttcccaaatttacttagattctttggctttctgcttatcagaaattgggtgatctcatttgtttttagagtctcttctttatcttagcagggtagtaatatttagaaagataaacgataatttgtttagaaagataaatttttttctgataatgtattaatcataattttcattcaaatatcaaaatactcttctctttgttcatctttatagaactccagaaataactatttgccccttacttctttttctctaaatttgtttttttatttactgatcaaaaggtttttaactaaagttaccaaggattccatgcacttccaagatagggataacatcaatctaaagactcaattattttctgtcttcactgcttacagacagggaacacaatctcttcagcctggacctgtgtagaagaatttggagaaaataaacaggtaagagtttattaggtaaaactctcttaggaatattaagtaatatatttaattgtcagaaaaccagtttcaaattgttctttataatgaaaagaatgaaactttatgaagtattttttataatagccttgttaattatagactcattaagcaaatgttttaaaaagttaaagtggtttctgtattttcaggtcttctcaaaacatttaacatgctagtataccttgaaccaccaagatggtaaacagtattataaattcgatatatttggagttactgtgttatttatagattatccaagtatttctcaaaagtatctgagaatacgactctcttgtttttcaaccttaaacccaagtcttattgaaacaatttgggataaaagttgtatttactaagatttagtgtttagtttattcaacaaggtacttcttgaggaagataagttttagtaggaagttaaaagatagcttatttgagtcaagattattacctcacaaagtctttttttacatgtagaggcaaaagaatgatgttttctaggatgtaattcatgtactacatctgtgtccttgagtaagttaatttgacctttttgtgcttcacttcctcattgacaaaggggataataatagtacttataagtctgttatgtggattcagttgtactaatcttgtgtggttatttttatcacttaataatattgccattacaattaataaaatctgttctcagactcaaagagaaatgcttgttatacttgagacttaaaattttatttttacagatcttaatcttagcataaaaattcaaataagtgataccagtcttagaggtccttacaactttttatagttcaaaatttgaattacaaggactgattttacttatagaaataaaacttgaaaagaattgctgtattttctaaggcttttcttttttgcccacatggtttatttagtgagctacaactttttttttaacctatactgaagcctacctggattgctgcagctctgattgtaattttttctctcataagctgctgttctagtactaactttccaaatagcttagaaagtagcaccaaaaggagttggatataattatctcttaatacaaaggtagcaaactagaagatctagatgtatttctttttttaatggaaagcaactagacttattttcagtacaaataagtatctgtttttttattcttgaccctctttgtgttctttttgtttgtgtgttgccttgcctgtgaaggcatttgagtttttaattgctgtggttaatatatttgaagattttgttctgttttgtttttaatgttttcccattatgtattaactccattgagatttcttccctgatattcaaaattcagtgaaataactgcttctaaggtcaaacaggtttgggaaaaactgtatactaaatacttccttgggaaaatcatagtgcatactagcatcctaggtaattgaggtagcaacctgtttaatgtataagcctatctgttctaaatttttcttgagattatttggctataggatgcttgttttaagaaattcttgcactttaattgtatgggatgtagtttgggaaatactgaagctaacccaaagacacacttgagttttatttgtttttatttaatatgtttctgactttattgaggtataaataaaatacaacaaaatgcccatacttaaagtgtacaatttggttcattttgatttatgtctacatctatgaaatgacaccacaattaagaaaacaaacatttctttcacccccaaaagttgcccgatgccccattgtaatccattcttccttccattctctttctcaggcagccactctagattagtttgcattttctagaatttcaaccccttgctttcgaaggtttaaatcgtaatctttagataatttaaaatttcattttaaagaaatttcatttctttatttcctctgcttatttagctcttgattttctatactagaatagaaagtacaaaataaatgataggtattatttatgcttatatgataggtattatttatgcttatatgatattttaatctctgtgtttgaaccctgccatattttatgttctaggaatgtatagtagtatagcttaaaaaaaaaagtttttttttgcagataaaatttagtgtttgagtgaaagtaagttattgagatagttagttatggttattgaatgttagaaattgaaataataataaaatggtacaatgaggattttttttaaaaaaatttcaatacagatctcataggtatctaaagaaatgcttaaaatatgtattaaaggtctgataaacatacttcatagatgaaaaaatcaggtgtctcatccttaacactggtgggaatgtaaaatagtatagtcttagctaccttggaaaacagttgagcaatttctcaaaaagttttactgggaattactgtatgactcagcagtttcattcctagttacttactaaagagaattgaaaacatatgttcacacaaacatttgtacatattattccttagcagtattataaataatagccaaaaggttgaaacaacccaaatacctatcaactgatgaatggataaacaatgtgtaatctagctatatgatgatacattattcagccattaaaagggatgaagttctgatacatgctacaacatgtatgagccttgaaagcattatgttatgaagtcagttccaaaagaccacataaatttatacaaaaagtccagaataggcaagtctgtagaaatacaaaggctagtagttgctggggctgagagaagagagagtgggagtaactgctaatagataacagagtttctttttaggatgatgaaaatgttctagaattttatagtggtgctagttgtacatgtgataaaaatcactaagttgcacacttaaagatagaaagtggatggatatggtggtagaactcacatagctaacagagaagaaagaaaccaattatgaggaatatattttttaaatgaaaaattagtctaaagagtatctagtcagaaacaaaagaaaaagggagtcaaaattaatttgagaagacacttttatctcactttaaagtctctattaagggttttcctcatctttaagacagaaaagcagctaagaattagtggtgtttggtcaagatgtgtaagacgaattagaaacaaaacaagaaatacattgaagcaatatatctatccactgttcacattttcactgagaaacctactggtattattcactaacagactgtctttgtgttgaatacagaaaggtggtagaccaaattatagtaaccacataaacaggcctgacaagtatgtggtatatgtattaccagtctctactcttgctcctgtgtcagatgtggcataagttgtcactcgctttcctgtttattccagacacaccaccagaatctttctgaatctagaattcctgttagccattactgcttaattagaattgccatttaaggttaagcttatttgctgttctttgtatatatcaaatttgttctatgaaaatatgtgtattccatatataaataggaaattaaagataacatttgatcaggttttctataatcattatgtcagagcagttgttctcttttttttttttgttttccacaaaacaacctttacttcaagtgaaagtttagcgtataaaacaagggaatgcagagctacatgagctgaaatgagaggttggaatgggtatgattaaaattgctggcagtaccaaatgttagaatgtggagcaactcgaagtctcatatcttactggtgtgaatataaaatggtcatactagagaactctttaagcagtatgggtcatctgtcctatgacctagcaatcccattcccaggtattgccccaaaagaaatgaaaacatatatccaccaaaagatttgtataaaagtgttcatagcagctttattcataataaaacttagaaacaacccagatattcatcattaggcaaatagataatgaaattgaagtatattcacacaatgaagtaataaccataaaaatgaagaaactactgaaagatacaatgtgaacgaatcttagaaattatattgagagattgtctggattatctttctggaacaattataccgaaacaagctatttgagtttcgacttggcaaggcaagatatgtcagtggattctctttgtgaatggaaaaaaaaagcatccttattttgtatagaggccgcctctttttgtaactaattttttattggtaaaaattaattcaaatgtgcttaaaattatgttgagagaaagaagatagacataaaaatacttaatgcatattatatgaagtctaagaacaggcaaaactgatctattgaaatagaaatcagaaggtggctgcctccaagtgaaggtctgttggctggaaaagggtacaggaaatttctggattggggatatgttttatatcttgttttgagtatcaattacatagatttatacaattatcaaaactcattgaaataaacataggatgtatgcattttattttatataaattgtatatcagtgttccaagtgttaaggcagttgaataacacttagtgtaaaacttatattctgaaattggctctgtatcattccttaagaagggatctgaagtacagatcccagtctgaggaagaaacagtgggattgaagagctaaggatgttaattgggaagaaaaactaggggtgggcaaataagtatatgctaggaatgttaactaatttattaatatattttctgaaaattagaatttctactttttatttcctatgatacgaaaattatatgttacaatagatctgaggaaaacatgattgtacttttaggttcatcccactaagcattttcagcttacatttcattcattgaagtttggtttgtattgtattttccaaccagctagatgtcttcctgaatatatttagattcttagtgattttagtaaaaaattttatttttgaaatgcttgtaaaatcttacaaacttctgaaaccttttgtttcctaatctttgttatttgtgaaggatttttttcctttggatttatgctacatgaataaagtcatcaacttttaattttgtatttaatttagtctccttgaaaatatgcagtacaacaaatgatcattgtatatttaagggcttaagttcaaggtttacagtggggaccatcaggaatgaagataagctaagcattatgctagtagccaactgcttggctatctgctttctgaaatctttccctgaagataaccttctgtgttcacaattcatgaataggctgcattacctgaagataccttcagtatccacatttcttaaataggctgcattacctcttgagtggatgtaaactcaaaacaaaagtgatttctctttgaaaactacatttccctgtttgcagtagcctgctcttctaaattgtattgttgatgaccacattgttaaaatttgaagagctaggtgtattacagatagatggctaataagaaattgactgtatttgcataataattttcagaaggaaagaatcagacttttttaaataaagcagttacttgggaatacatggagccggtaatggtcccgtttatactcaataccaaacccttcaggtgaagtggatccttttaaaaaaaaaaaaagaaaaaaaaaaagcatgaggcacgttggctcacacctgtaatcccggcactttgggaggctgaggtgggtggatcacttgaggtcagtagttcaagaccagcccggccaacatggtgaaaccccgtctctactaaaaatacaaaaattaactgggtatggtggtgggtgcctgtaatcccagctacttgggaggtggaggcaagagaattgcttgaacccaggaggtggaggttgcagtgagctgagaccgcaccattgcaccccagcttgggcaacaagagtgaaactctgtctcaaataaataaataaagataaataaataaataaattgtatggtacgtagagtcatcctactttggatgttagaaaagtaaatggtatcaaagtaattcctcattcattttcaaaatagtgaaaatatttggaactggttactttaaatgtatttatgtcttcctggaacagatcgctttgttgatcttatggtaccattcataaaaaggttataaaattagtttaattagagttttataatgctggaaattaaacctatatttaactgattttcatttttccttttttttttttttttttcctgaactaggtcctttctgatgttgcttgagcttactctcctgcagttgatctcattcctgttggctaaacattaagtcccatgacaacattaagttaatgcacctatggtgtaggcatcatttatagtaccaggacagtattatagaaaaaaaccttacctgtacattagatgacctaatttcttttcttccattcctagaaacaccataatgtttctaaataatgattttatagtcattgtcacacccttggcttattttacactaaagaacatagttgagtttttggaaggtacaggatttaaaaatttggtctgtaatatacacacacacatataaatgttgcagttaatgaaacaggaaattattgatgcataagatgaatgtttattgtgaaacagtatttcaaatgttattttttaataatttggtttaattggatatttttctgtactataagttgataatggttttttgaagtaactataagttgataatggttttttgaagtttatttaataaaggtgattcattatactgttttatcataccagtaggacttttaatgttaaatcagtatgttgagttagataagtgtttatattagtatttaaataatgaaatattggccagctagtttataccaaatgtttttgcagtccaggggtgaatgtttctgctggtttgatgcctaatacagcttcaaagaaaaaaaaaaagcaaatatgaattcactgttttttatcttttcttcatggactaccccttagaaccaaatttaaaagaagcttctttgtagagcaagagaaatgagacgttctctttttctataatcaaaactccaagaaatagtagatatccaagaattcattctggtaagatctctgaaacattgcgtgagtaaaggaaaggtaatactgacaaaactctcaggatttgcagtgcagtgaatgctgaaataatctttaaccagcaatatagtatcatcaagatttccagtgttagaacattatgttaaaatgtgattattgtttaatgctttgtctctttaaattaaatttgtgtccataaagatgtacagcataattgttcatgtatttatttacagactacaatttccatcgcagctcaataaatagtctttcccctgttagtgctaccctctcttctgggactcccagcgtgcttccttatacttcaaggccttattcttatccaggctatcctttgtcaccaacaatatcacttgctaatggcagccatgttggacagcggctatgtatctccaatcaggcctccttcttctgaagaaaatactaacattagtatgaaaatttgtgtaaatttgtagtatgaaaacttgcaaattaaaatattgttttattttagaatcgggtttgcatatttggttttaaaaaggtatttattccaaagtactaaacatcagctataattcagaataacatggagttgtagaatttataaaaatgcaaagtttaaaaagttattcagtggtttctcttgataaaggtacagcaaactactattctttttaaacttctaggattttcttctactttctgagtgggcaatagaacctagtcatttatgtttttttttttttttgcataattttactaaatagtatttcacaaatattaaagcacttgaagacaatggttatagtagatttgattaccaaggatcactatctgtactggagattagaacaattatatgaccagaagcatctaaccattatgtaaaaagaaatgatgagacaaaaagattaagatacaaattttgtgcagtactaaagaaaaagcagtctaccattgtggtccttgaaaataactatagatatttttgttatttgttagacacaaattataattttgttgttaatgtatttaagcattttatagttatgctttgtgtttttgatattctttgtattgttaataacaagtgttatgggtttttaatgttgaaatcatgtgttaatttttgtacttgaattcaaattttttgacattaaatatgtgatgcttctattatgtgttttctttatattagaatgacaaaacctttagttctcacaatcactttgagcttttcttgagaacaatttcacttactacttacacagtcataggctcagtgcttttatgagactcaagtgaaggatgttgaagaaagttgtttttatatacccaaaagaatataaatcattctataaagacacatgcacacatatgtttattgcagtactatttacaatagcaaatacatgaaaccaatccaaatgtccattaatgacagactggataaagaaaatgtggtacatacacaccgtggaatactgtgcagccataaaaaggaatgagatcatgtcctttgcagggacatggatgaggctggaggccatcatcctcagcagactaacacaggaacaggaaaccaccacatgttcttgttcgtaagtgggagctgaacattgagaacacatggtcacagagagggaaacaacacacaccagggcctttttggggctgggggtgaggggagggaatttagcagacaggtcaataggtgcagcaaaccatcacatatgtatatctatgtaacctgcatgttctgcacatgtatcccattttttttggaagaaatataaattgttttgtaaaatagtaacaaaagttattttcagggactaatagaaatactttgttaatagacccagtgaagtttctgcctttcagttatgaataattaaagaattcaagtcattttcacttaaatattttagtatacatttataatgattgctaatagtttttataattgatgtctgagaaatctttcagatagcaaacattaccttttttaatcaactcattgtgcagctatatgggacagcatttgtaaacagaatttgaaatagttgcaaatatttttttctcgagtttcaagcagaagttatatggaaattaatctcagttttttcaacctttaatgttcattccatataaatcatatgcaatacttaccttccagttactgccttaggttttctaatttaaatgagcatagacactgtgcttaaaaaatactatttttctccttactcaactttgaattgcatagattttgctctttaattgccaggtatatgtggggctcacaggtgcatatcactcagcaagcatacagtgagtattttgttggtgattgtggtaatacctttggaatacagaggttactgagactccaagccagaagaaaaagagacacttagtttttcatagaaatgtttgaaatagcccatcataataattgcaagtttccacatagctttttcactttcaataaaaatcaagacaattgagcttaccaaccacacattgtatttggagatccatggtgattggatgagaagcatataagctgtgttagtcaaatcccactccattaagtaacagctgtttgaacctggacacagttattaatctagccgtacttttcacttctgtagtcatagtatagataggtaaaacgcctggcaaatggaagacattcaggtggtgggtggtattatatgggtatagttatatgaagagcatagtactttgtagtttttcatccctactctctttaactggaaatatagaaattagcacattcatgtcaaacactgtccctttctgtcatgttctggatgagcaattaatcttgtttatactgaataaaattttatttgagttgtgaacatagctactaattatttgctgctgtagttcttgcagaataagctgtataaggcatttgctccaaatgagggttccttagatgatcacaaactattgataagtcttagccatatgatgtatctcattggtcagggaaaccgttctaaagacagacttcaaattttgtatgcaacattacacaaagaaccatggctgacatgtggaagtttatgacctattatgatggagctaggacctgtcctggttaaaatcccttgtaagcagaaagatcagaaggtatgcagaaagtttaattaaccctatcattcttccctagtttgttttatagttagagagggaaagacttctttatgacttaaaatgtagaaaccataatagaaaaggttgctaaattcaattttaaaaaagtctgcatggcaaggaagtaacacaggtatgtcaaaagacgataaatgactccgtctcaaaaaaaaaaagcgatacttgcatgttgttttacaaagggctaatctctaatatttctagatatcagaaaaagtaaccacccatgaaaaaaatggatgaaatgtctgaataggcagatgacaaatggctcccaaacctattaaaaaggtggctcatgtcattataggaaaggcagattaaaagttcagattggcagaaattcatagtttgataaacgtttggcaagcctgtaaataagtattctcatacattgtcattgggattaaaaattggtatttatataagaagcaacttggcagctattgtccaaaattacatacaaacattttgatccagcaattctactctgggatatacttggatgtgtgtatgtgaaatggtacatgtgtaaaggtatccatcattagaggactggttaagaatacatttatcagtacatactatgaagctgtacaaaagagaatgactattcttgatacaggaagagaggatgttaagtgaaaaagagcaaggcttatttaggaatgtatgtataatacagtgttctatgttttggtaaagaggaaaacaacatttgtatgtgcttataggtgcatacagaactccagaaggatatgcaaaaaaaaaaaagaattatgagagaagtggataggatcacagtgtgacatctctttcacttgcagacactaataaatgataaataattttaagtaaaaagacacataattgttctcagaaacaaaatgaagagctctagtgaacagtaatctgaacaaaaacacattaggaaaagctgcactggatctctttactgagtgaccagaagttggtggattttgagtagaaacccagggcaaaagctctgcagatggtaaacagcactgcaaacagctgtgaacttcactgcttttgactcagtgggtcccaatatacttgaaatgtccttcactaattatgatgtctgtagatatgaagcacgttcagtctggtaggaaaatcacagagagggcctgtaggatttgatgcaaagctgtgttcttttaggcaaagaattagtctgcttttgagaaataactcttagccagttattaagccctaataggtactgactatgggatacccatcatgaattgggtgttatttgatcacgaaattcataaagttgagcatgttcaacagcactgctacaaagtggaatatggtgacagtctagaagcttcttcctgccatactaccatcacttggcctgttatatcatggaacgcacccaagatcagttggctgagggagaaatctttggaacctagtatcctaaggataatggaagtcaccaaaaacaaatctctttacacatcctatacaaactatatagaaaaataataaaaagcaaatgaaaccacacatgatccacaccttcagcataaccacagaacactacaacttttcaaattacctgttaataaaaataaatatatatggacatcaagttccagcaattatgtttttagctcttgccacaagcctttggagaagaaggggtgttttgaggggctggaaaactacacaagagagaacaagagtgcagaggccctaaaggtgagctaacaatgtccatcccaggtatgaaaatactgtaagaataccctggtatataaaagtactgactaatggagaatgacttaaaatcacgtagacttgagatggcagttttggaaaggcattacttatgggagaaaagagttaaaaagaactgggaggtaccctttttttgtggatgatgaaagggaaaaaagcaaaggggaaattcagaatcctgcaagacaaagagaaccaaaagagcatgggtgacatcagcaagatggcagaataggaatccctagacctttcttcccttacggaaatgtggatttagtaatacgtagaccaaattgaagcccaataagaagatttgtggcactatcaccagagcccctacccccagcatggtgaggctgaattgggaggaaatttacaactcctgttttcttcctggagagggaaaagggtagaatgtaggtccaacattttgaatttcagatttaccagaggggccagtatttatcatgcttgaatccaaacactgaaaggaatatggcctaccctgtgggcaggggttgtggggcggcggggtaggtgggggtgctctccaaaaacaaagtacaccaaagtctgcggtaccacagaaattagatggagcttcagcactaaggctttttatagcaccagggttgccacagtatggcagaaagacatcagggtagaaactggcaaatctcttcaattaggagattatacacacgagaccagagagggcacatcttcagaaaaggcttgagatatcttcagaatttctagctggagtgagtgaagaaagttctcgttgtatgaaactagatcataaaatttgggagaggtggctgattcttcaagtggcaaaattccagtaaaaaataacaagacatacaaagaaacatgacacatttaaatgaataaatatccagaaaacaaccctcaataaatgtagaaatattaattaccaaagaagtaaaaattaccgttataaggatgttcagtgaattaaaagcacaaatagacaactaaatgaaatcaggaaaactataaaaaacaaaatgaaaatattgacaaagagaaactatgaagaagaaccaaacaaatttttgggctgaaaaatacaatagctgaattgaaaaattcactagaaggaatcaacagcagacttaaccaatcacaagaaagcatcagcaaattctcaagacaggacttttgagattaccaaagcaaagaagcaaaaagaaaatgacaggataaaagtgaaatggtagaaacatatatttcgtgtaattaggaatacaaaaagagtagggatggccatacttagaaaatgtagactttaagaaaaaactgtcagaggcaaagatggattttatatatatatatataaaatcatatatataatatatgtatataaaatatatatattatatataaaacatatatatatgactaaaagggtcaattcatcataaaaataacacatatgcatctgacattaaagctgtcaaatatatgaggaaaatacagaactgaagagagaaatagatagcaacacatggttttaggatacttcaataccccactttcagttatagacaaaacagatagaaaagcaacaaggaaacagaaaacttgaacactgtagaccaattggaactaaaagatacatacagaacactttacccaacaacagtagaatgcacattcttaaatgcagatggagcattctccaacatagactacatgtttggccataaaacaagtcaacagatttaagaatattgaaatcatacaaagtatcctctcacaccacaacagaaggaaactagcaatcaatagcagaaggaaaacatgaaaattcacaaatatgtggatattaaacaatatacccttaggcaaccaatgggccatagaagaaatcataagatttagaaagtatctggagccaaacagaaacaaatcataccaaaagttatgggatgcagcaaaatcagtactaaaagggaactttatagtggtaaatgcttatagtaaaaaaaggatctcaaatcaacaacttaaccttacacctcaggaactagaacaagaaaaataaataaaacgtaaggctagcaaaaggaagaaaataaagactaaagtagaaataaatagaggatagaaaagaaaaaacaaatcagttaaaccaagacttagtttttggaaagatcaagaaaattgacaaaccggtaactagactaagaaaaaaaggggactcaattatctaaaattagaaataaacgagggaaaactacaacagatgtcacataaataaaaataattacaaaagactaactgctataaacaattacacactaacaaactggccaaactagaagaaatggataatttatagaaacaaaacctaccaagagtgagtcatgaataaattaaaaatctgaacagacctataactagtaaggagaatgagacagtaatcaaaaacctctcaaaaagaaaagcccaggaccagatggctttactgaaggattctattaaacatttaaagaaaaattagggctgggcatggtggctcatgtctacaatccaagaactttgagagtctgaggtgggaggatcacttgagcaaagcaatttgagagcagcctgagctatatggtgagacctccatctctacaaaaaaataatttaaaaattagccaggtgtggtggcacctgtccctgtgatcctagctacttgggaggctgaggtgggaggatagcttgagcttgataggttgaggctacagtgagttgtgatcatgccactgtactccaacctgggtgacagagtgatactctgccttaaaaaagttgtaaacaggccgggcatggtggctcacgcctataatcccagcactttcggaggccaaggtgggcggatcaggagatcaggagatcgagaccatcctgattaacatggtgaaaccttgtctcttctaaaaatacaaaaaattggctgggcgtggtggtgggcaactgtagtcccagctacttgggaggctgaggcaggagaatggcatgaacccgggaggcagaacttgcagtgagccaagatcgcaccactgcactccagcctgggtgacacagcaagactgcgtctcaaaaaaaaaaaaaaaagaagaagaagttgtaaagaaaaataattaacatcaatcctcagattatctggaagaattaaagaggagggaatccaaactaattttatgaggccaacgttacccttgtaccaaaaccatcaaaagacaccaagaaaactacagtacaatatccttgatggatactgatgcaaaatttgtaaacaaaatactagcaaagtaaattcaacagcacattaaaaggatcatacaccatgactgcagggatctgtcctgcagaccccagctgcataacggatgagatacgtactcagacaccaatgttcagtgaaagagtgggccagggggctgccagcactggcagccaaagagagtttgcagcccctccaagctggcaaccatttatttactacagatttaattgacaaaggctttgagtgaacacacctgtgggtaattaacctggtcgcccccacccaggagagggccattctgcctgtgaatgatcaaaggttgattttaggaccacatgagtaaacaagctatttagatgaactactctacattcctttgtatctgcaccccaagctattaactctaggtaaggattaggctgctttcagccataaccctatcctgagacttttgcaaaaccttccagccttccaagaaggtttgtgtctatatcctataacttcatcttaaaatttttcccaccagcttgaccgaactcccacatctccctcttccctgttttttttttgcatcaggttctgttgattgaagcatgcagatatgtgcaacaacaggtctgtggggcgaggcagtcattgctcttattctggcattgcatcctagaattagcaaataacataagacagtcatgagtaaaattagcaacattcttttccaatcaaggaacgacctgcagcattgcttggcgcttcagtttgatgtgtgctgttactaaggaacctcactggggataagttaaccccttccagccaagcagtctcattgttagaagctgggaaggaagtgtctgcccagataacagggctgaaaaatggcaggtttagaagatgagcttaattgagtgtagcaggtataggtagcaggcacagggagagaataaaaaaggaatacattatctggagtgaatggtgcctgttcccggagcaggatttgctcagtcttctgacttgtcttcttcagtataatgtctggggcctgtgttgtttgaggaagccgcatcctccggggatgcaggtcctgtagggtcagttccttcatttctggtaccggcttggttcctagccatgccatggtgtggtttgatgcgtcatgctggaatccaaagaggacctgagggggtgtagacacaagcataccctcttccccaagttaacagttcatttggaccacaccgtacattgctgtttacatctttcaataaaactgcaggttttatgtcttgagaggtttcagcaaagtgcttttctacagctgattgaaatttatcatctaaatttagaaaattaagggtaaataagacttgcgccaatagtgttgcagggtctttactcacactcccccttttttattttttgagcatatttttaagggttgaatgggtacgttctcctatggcctgtccttgggggttatacgggatgctgatggaatattggatgttccaagtgtgacaaaattgttggaattgtgaactggcataagctggacaattatcagttttaatttttgtgggctgtcccataagtgcaaaagttaaaagaagatgtttaatgacatattgagtggactctccaggtaaggcatgggtactaattagatgagtgtttgtatcaacggatacatgtacatatcttagttttacaaattcagggatgtgtgtaacatctatttgccatactgatcaggttctaatcctctagggttaacacctgttgaaggagggtacatgcctgtgagctggcaatccaggcattgtaggataattagtttagccagtctctgggtaagttgaaattgtttagataagtttcttcaattttggtgggaaaattgatgtgattgggtggcttggtcaagcagtgatgtcataacctgaaggtctgcttgatcattgccataagccaatgggccaggcagtgagctgtgggcttgaaggggtataataaaaataggatgtgtacattgatctagcaattgctgaagtcagagaaaaagagcacacaaggtgggctccagagtggacttaattagggctatctcaaggttctgaaataaaaagtaggcagaatcactaacaatattgaggggctgagcagaaacagtttccaaagccaatattaaggcccaaatttcagctttttgagtgctagtaaacctagatcaagtgagtgaattatgtggtctccaccagactgctgcctttccatgtttaccagaaccatcagtaaacagtgttaaagcattaggtatgggggagtgaactatttttgtagcaagatcacaggactatgagataagaaatgaaggagtttatcagcaggaagtacatgctctatttgtcctgcgtaatcagagagtgctatttgcagatccatcgataagggcaataatgcttcgaattgctttttacttaaaggaatcctgatgatatcaggatcataacctagcaactgattgcatcattctatatgggtagcttttaattgctccttaacaaatttatgggccctttgtaatttctgtccctttagaggttattattttatttaaattggatttggagagagttatgttaagggtagaagacaaataacaatagtggccattattaggtcttttaaattcttaaattttacttagatcttagcagagaattataatctgggatgtcacttgtatacaaggaacacatgaaattttgccctgggctgcctgtggaactggagagctaagcaggcgggtcccagggtggtggctgtgttgtgcccacctagtcgctgctttttgtttatgctgtttttttttctgtgttgctccctacccctgccaccagtaggctgctactggctggcagacattcccacgcatgccttctacccctccctagcaggccagctcctgcactctgggcctggcttccggtggccaccgccactgtgcaggctgagctcttgggagcaattgccggctttgggtttgtgagcttacccactgctgagcctttccttctacctaccgcttgctcggccatgcagctccagcctctaatgacttttcttatctttttataagtgttaaaataaatgagtttatatacctgattgccttgtcaatctagcattaccaggcaggctaagagctccacttccaatgctgcttgcttaagacagtgtcttatagctgtagcatatcccttgcctttttcccaattcattggaggagggggttcaggcaagacctctgtttcctctttgttattttggtccagtgatggggggctgagggaaaaggaggtggtaaggcaggtgacagttcctcctccttccccattttaggctctttggtgtataacggagtcagggccaccctaactaaagcccatagcattaaagaagatactgggacccgttgcccttgcacatgatgttgtttaagatttctccccacttgttcccagagctctatgtctagtgtgctttctttggggaaccacgggttatgggattcaacagtttgcattaggtcccttaattgagcctgcgaaatcgaggctccactagctttaagcagatgtttcaatacttttgtatactgcttctgttgaactgataattattgtcccagatgaaacccaagcctgaacaatcccccctgagctcccacttgtgggggtctgtcctgcacaccccagctgcacaacagatgagacacgtactcagacactgatattcagtgaaagagtgggccagggggctgccagcactaggggctgaagagagtttgcagcccctccaagtcggcaaagcttacatttatttagtacagatttaattgacaaaggctttgagtgaacacacctgtggtaattaacctggtcacccccaccctggagagtgccattctgcctgtgaatgatcaaaggttgattttaggaccacatgagtaaacaagctattcagatgaactactctacatttgtttgtatctgcagcccaggctattaactcaaggtaaggattaggctgctttcagccataaccctatcctgagacttttgtaaaaccttccagccttccaagaagctttatgtctatatcctataacttcatcttaaaatttttcccaccagcctgactgaactcccacatatgaccaagaaggaattatatctggaatgcaaggatggcttatttgacaaaattcatcatcttttcatgaaaaaagaaaacaatcaacgaagtaggaaactaccgcaacataataaaaaccatatatgaaaagtccacaactaacatcacactcaacaatgaaaatctgaaagctttttctctaagttcaggaacaaagcaaggatgtccactctcacagcaactgtttaacatggtactggaagttctggtctgaacaattaagcaagaaaaaatttaaaaggcatccaagttagaaagacaaagtataattaactcttttggcagatgacatgattttatatgtcaaaaacactaaagattccacacacacaaaaaaaactgtgacaataaacaactatagtaaagttttggaatacaaaatcaacacaaaatctgtaggttttcataaagtaacaatgaccaatatgaaaaagaaattaagaaaataatttcatctgctaaagcatcaaatagaatacaatgcttaggaataaacaatcaaggaggtgaaagacttgtgcactgaaaactacaaaacattactaaaataaatcaaagaaagtacaaatggaaaaacatcccatgcttgtggattgaaaggcttaatattgtttgttgttgttgttgttgctgctgctgttgtttttgagacagagtctagctcttttgcccaggctggagtgcagaggcttgattttggctcactgcaacctccgccttctgggttcaagtggttctcctgtctcagccttcagagtagctgggattacaggcatctaccaccatgcctcatagtagtgatggggagtttcaccatgttggtcaggctggtcttgaactattgaccttgtaatccacccacctcagcctcccaaagtgctgggattataggcataagccactgtgcatggccatattattaaatattgttactaatatgacttaatattgttaaaatggccataccacccaaagtgatctacaggttcattgcaatctctatcagaatcccaatgatattttttacatgaatagaaaaaaaaaatcccaaaattaatacagaatccaaagagactccaaatagccaaacaatcttaaaaaagaacaaattggaggcctcaagtggcctgatttcaaaacagattacaaagcaacagcaattaagatggtgtggtagtggcataaagatagctgtttagtccaatagaacagaatatagaacccagaaataaactcttacatgtatggtcaaactactttccacaaaaaatgtgaaaatgggaaagaacagccttttcaacaagaaagaacacaatgggaaagaacagccgtttcaacaaatggtgttgagaaaactggatatccacatgcgaaagagtgatgaagttgaatctttacaccatatacaaaattaaaatggttgaaagacctaaatgtaaaccttatagctataaaactcctagaagaaaacgtaggagaaaagcttcaggatgttggatttggcaataacttcttggatatgataccaagaacacaggcaacaaaataaaaatagacaaaagaggctacatcaaattgtaaaatgtttgcatgtcaaaggaaacaacagagtgaaaaggcaacccatgacatgggagaataactgcaaatcatatgttttttaaatattttgtgggtacatagcaggtgtatatatttatggaatgcatattttgatgcaagcatgcaatgtgtaataatcacatcatgaagaatggggtatccatcccctcaggcatttatccattgtgttacaaacagtccatttacacttttattttaaaatgtacaattcagttattattgactatagtcacactgttgtgctatcaaatagtaagtcttatttattctttctggtttcttgtacccattagccattgaaagtcatatatctgataaatgtttaatatccaggatatataagcaacttctacaactctacacaacacacaaaacacaattataaaatgggcaacggacttgaatatacgtttctccaaagatgatatgcaaatactcaatgagcacataagaagatgctcaacactaataattagggaaatgcaaatcgaaaccaaaatgagatatcactgcacagccatcaggctggctaatatcaaaataaccgaaaattacaagtgtgttgatgaggatgcagaagttggaaccatggtgcactatgggtgggaatgtaaaatggtgcagccattatgaaaaacagtatgaagtttcctcaaagaaataaaaatagagccgggcgcggtggctcacgcctgtaatcccaatactttgggaggccgaggggggcggatcacgaggtcaggagatcaagaacatccgggctaacacggtgaaaacccgtctctactaaaaatacaaaaaattagccaggcgtggtggcgggcgcctgtagtcccagctgctcgggaagttgaggcaggagaatggcgtgaacctgggaggtggagcttggagtgagccgagatcgcgccactgtactccagcctgggtaacacagcgagacgccgcctccaaaaaaaaaaaaaaaagaaagaaataaaaatagaattactatatgatccagcaattccatttctgagtagatatccaaaagaactgaaaccagcatgttgaagagatatttgcacacttatgttcattgcaggattgttcacaattaccaagaagtggaagcaagcaaaaatgtctaggaacaaatgaatggatcaagaaaatgtggcatatacatacagtggagtatgatgtagccttcaaaaagaaagaaattctgtcacatactacaacatggatgtccttgaggacattatgctaagaaaaataagccagtcacaggacaaaaaatgtgtgattctactcatataaagtatccaaaacagtaaaaatcatagaaacggaaagtagaaagatagttgccaagggcagggaggaggcggaactagtgtttagcaggtgaagagtttcagtgttacaagaggaaaaagttttagaaatctgttacacaacaatgttaatatacttaacactactgaattgtagatttaaaaatggttaagatgataaatttaattttatatatttttaccacaataaaaaaagagacatacaacctctttctgctattaaaaaaaatccattgttaaatctgccctttactacattgagaacagagggcattcttgaacttggaatcttatgaataacacaaaactgccaattctatctgtggaatgaatatacaaaagcaaacctcttataaagccactattacaagaaaacagaaatatgaaaacatttcagcttttgaaaatttcttccaaaagccaaacattaaataggaaaaaacattttcacagcaatcgaaactaaaatatctcctcaaacaggtatttggcaatgtggaagcaaacagacaaacaaaacatcttgtaaaaactcagagactattatcctttgtggcttcctaaggaatctgctagaggatgagctctagggaaactagcaaaagcaatgatagtgagcatttaatatatttacttgtagatccatggcttagcctaggtggggctggtgggaatataatacataaatgttatatgttgtcacaaagtaaaaataatgcaactaaaaataggagaagaataaggaaaacaggaaggtgtaattagctctttgcttttagataatagttagcagtcagatggtgccattaaaaattgacaagccagattgcaaaatgtcatataacaggaactaaaagtcttatgaaaggtacaagtaaaaaagtaacactagattaaaagcacaaacctaaaatattaaaagaaaacaaaaagaacaaagaaaactcatcacatgggggaaaacacggtaaatataacaatacatgtagtgattagatcctaaagtaatgagacagctgtgaatgggcttacctaaaattgactcacaaaacaaggtccaactccatgctctatataagagacagatctaaaccaaagtgatttataaggacaaaatataaaggaattacaaatgtataccagtataccaaaaataaaagtagatatgtacaactgtattcactgcagcataatttgtcattgcaaaacacggcaaacaacccaaaagttcatacatggaaaattggttgaataaactagcacatctacatcatggaatgcttggcaagtgtaaagaatgaggaaaaaaactcagtgaactaatatggagtggtttccagaatacattaagtgcaaaagcaaagtggaagagaagataatgtatgctactttttgtagataaagcaataaatagaaaatgtgtatgtaactcatttttattttaaaaagaggtgagtggcattgcgttggaaggaattactgaaaggctggtgacaaatctctattctttttgtatggttttgaattatggaaccatttaaattgaggaaataaaatttttaaattttcaaattttaaattgagaaattctattttcttcctaaaatagaaatagaaaaaggaatctggttgtatttcaaaaggacttagccactctaaatgggtggggaggaagagttatcccaagtaaattttgaatccagtattttgtctgtatttgttcaaaccctgagtgacaatggctaacaaaaataaaattaagctattaggtttattttacacaatgatatggttagtgattttgaatctatttctgtgttttataagaatgagcaaataaataaatatattgaagaagttgggatgtggggaggcaggctgttcacttctggagaaaggtgttactaatatggaatgggagaaggctagcatgaaccctgtggagtttgatttcacgtagaagtatcagtatgaacttgtatttttaatagaaatctagctatggttgtgtagatatgtttttttttttaaaccatgagatttcccagctgtgtctgctgaaaagactctgagacaatgacactcaagtagacataagcttaccttgcacccatatagtggcttctaaatgccatttctcaataaaatagaccaggactcctgcatgattctcagtctaggctgaagaaaaatacaagatgagcctggggtatcttttatgctagaaagtaagacagcattcaaaaatggagatatgttaaaagtacactagagctagcttaaagggctccctttggtcaattctggggcattttgagcataaaatataataataataaagtataatttcttgcataaaataaggatctgtatatccatattgatgtaaataaaaaataataagcaagggagaaagaaaaactcttccttacaataaaatgccacacaatttgaaagaaatggtggatttggaaaaatcaccattttgcaagctaaatagcaaaactgatcaagacaagaatcatcagcatttactaaaactagtgagtgaatttttgatgagtaacaggatattttcatattgtcaaagtatttcaccacaaattattattaattacaaagagaagattgtatttccagattcttttttttttttatgatgaagtatctatccggtttcacccttttctttcctgaaatctagtctctgtttggacaaacttggtttgtcttacctttttctgtttatcttttgcttttttctgagacagggtctcgctctgtcaccgaagctggagtgcagtgatgcaatctcggctcactacaaactccacctcctgggttcaagcaattcttgtgcctcagccacccgagtagttggtattacaggcatgtgcctcacatctggctaatttttgtattttttgttggggggtggtcctcatgatgtttcccatgatggtctcgaactcccggcctcaagtgatacacctgcctcagcctcccaaagtgctgggattacaaatgttttctaccgcgtctggcctcgtctactttttgtgtataacagaaccttgatgatgacagtgttcataggttaacttcatatgtgatttctcagtttcattgtgaactagtgattcgtatccactcctgaatttatgttccacaagtatctagccgcagctcctgcttagctaagacatggtgttacattaggttagagagaattataccaaggaccaagattgcaaagcctgctattagaccaaaaaatagttctaatagataaaacacacatgaaagtcacagttgcctcattatttcaacaatacagagggcttttgatgattggaaagattatcatgagggctaatgacccaagatgaaaattgtttacattcaattcaacaagcattgattgaacacatcctatgtgctgacttctggaaagatgcatattaatatggttcccaacctcaaagaaatcatagtactggaaagcagataaacatataaacaaataaaatgtaacattgtgatatggtttggctgtgtccccaccaaaatctcatctcgaattcccatttgctatgggaggaacctggtgggaggcaattgaatcatggggacgggtatttcccgtgctgttctcataatgaaaaagtctgttgagatcagatggttttaaaaatgaaagtcttcctgcacaagctctcttctcttgcctgtcaccgtgtaagacatgcctttcaccttctgccatgattgtgaggcttctccagtcacgtggaagtgtaagtccaataaaactctttcttggttatgtctttatcagcagtgtgaaaattgaataatgcaataaattggtactaatagagtggggtgctgctgaaaagatacccaaaaatgtggacgtgactttggaactgggtagcaggcagagactggaacagtttggaggactcagaagaagacagaaaaatgtgggaaagtatggaacttcctagagatttgttgaatggctttgaccaaaatgctgataatgatatggacaatgaaatccaggctgaggtggtctctgatggagatgaagaacttgttgggaactggagcaaaagtgactcttgctacattttagcaaagagattggtggcattttgcccctatcctagacatttgtggaactttgaacttgagagagatgatttagggtatctgccagaagaaatttctaagcagcaaagcatttaaaaggtgacttgggtgctgttaaaggcattcagttttataagggaagcaaagcataaaaatgtggaaaatttgtagccagactatgtaatagaaaagaaaaacccattttctgaggagaaattcaagctggctgcagaaatttgcataagtaatgaggagtcgaatgttaatccccaagacaatgaggcaatgtttcagggcatgttagaggtcttcacatctgtccctcccatcacaggcccaaggcctaggaggaaaaagtggttttttggccccagcccagggtccccttgctgtatgcagcctagggacttggtgcctgcattctagccactccagttgtggccgaaaggggccaacgtagagctcaggacatggcttcagagagtgcaagccccaagctttggcagcttccatgtagtattgagcctgagagtgcacagaagtcaataattggggtgtgcatacctctgcctaaatttcaaatgtatggaaacgtctggttgcccaggcagaagtttgctgcaggtttggggccctcatggagaacctctgctagggcagtgcagaagggaaatgtggagtaggagcccacagagtccctactggagcaccacctagtggagctgtgagaagaggaccaccatcctctagaccccagaatggtagatccactgacagtttcaccatgtgtaagaattaaagaaagtggaaagaaacacaaaaggtggctcaccagtcaagacatttttattttagagaaaacaaaccttagaggagcttctggttgagttaggtcagaggcgcactctcttacagactaagagtttttaaggattcagggtgggattgtttatcagaggcttggactgcttctgtgtctctttgttgtgcttatctgggagggagagttgtgtgtctattcccatacatctttctgcagttgcaggtatacccctgagtctgcttttagcttcctcatcttagtgcacctgaaggaaaaggaatgtgcttattaaggcccactgttttactgggacccattgtgtgagggtgaagtttggcagttacacaagagattttcccccacctccctctgtgctcaagctgtcttatttgtgttttactgtctgctctttctggctgcttgtagttagaacagaagtgattttcttgaaatgcatgaggctagaaagggagctggaacttaaagtggcggtgtttgtctgagatgatggtgcccctgctctgtcattgtgcacctggaaaagccacagacgctcaaccccagcccacgaaggcagccaggagggaggccgtaccctgcaaagccacaggggtggagctgcacaagaacatggaaacccacctcttgcatcagcatgcctggatgtgagacatggagtcaaaggagatcattttgaagctttaagatttgactgccccctgtggattttggatttgcatggggcgactttgttttggccaatttctcccatatggaatggctctatttacccaatgtctgtatcccccttgtatccaggaagtaaataaattgcttttgattttacaggctcataaaccaaagggacttgtcttttctcagataagactttggattgtggacttttgagttaaggctaaaatgagttaagactttgggggactgttgggaaggcatgattggttttgaaatgtgagcacatgagatttgagaggggctgggggtggaatgatatggtttggctgtgtccccacccaaatctcatcccaaattcccacgtgttgtgggaaggacccagtgggaggtaattgaatcgtgtgggcaatgctgttctcatgatagtgaataagacttatgagacttatgagatgtgatggttttaaaaagaggagtttccctgcacaagtactcttctcttgtctgctgccatgtgagatgtaccttttcccttctatcatgattgtgatgcctccccagccatgtggaactgtaagcccagtaaacctctttcttttgtaaattgcccagtcttgggtatgtctttatcaacagtgtgaaaacagactaatacacatagtgaggccagaaaattgtcaaaagcatctggatagaaattactggaactagaattccagggtcttgtagaagattattctgtgtcctgaatcatagaaaatttcatgattcttctgttgcccagtatgccataagtgtaggtgaaaatatattttagactaacataaaaattttaaaaactgtttatataagctaagcctcccttcacatttaaacattcctcactgtcccctattatactatgatggtaacattctaaaataagcaataggagcaattctcaagaaagataggagcagctggctgtaagttacctcttgcccttaatttgaaaagtttcatccttgaatatcttatatgttcaatttgtaaacctcttatattcacatactcagcagatatttaatttatgcctactacctgcaagtggtaatcagtgttggatatacaatgatgagagtgcactgtccctcttctcatggggtgcagcactgaccaatcaatatataagtccccttgagtcaaagcttctgtatttctcagtgacagggatattcctgagaacaagtgtctgcatcaatatccagtcctcaataaacaaggggaacatcaggattgcatgaaatcctatagagcacaaatgttcaggtaaattacctctgctctgattatgtaactatgtacctgttccaaaagggctctgtagaatcttttccaacaataggtaatgcttaaaaacgatattcagaaaacacgtaagagaggaatgcaaaccaaattgtcatccactgacatcctggccttttaaattcctcaacatgccactgaaatagtacaagtgattaactatctggggtgccagtaaacaattattgataatatgctgtgtgaagtaggaaaagtagttttctaagatgagaaggaggcatggtatttcagttagaaaaaatagtatatgcaaacatggtattgtgagatggcacagcacttacagagaattagaagaagtttggaatgaaggaagcctaaattgcagaattagaagaaggtgagaatgagataatcaaacataagcctggagaggaaggcagagatcaggtcaggaggacatttgtgagcttgttcttcgttctgtagttcatgggaaacagataacagccttaaatagagaaaagaagtaatattatttgaatttctgaaagtcactttagttgccaagacaagtcctggaagacttgcagaaggcaagttagtaatgagtgacgtcttgaggaagagattccagttaggaagcttgttttagtaatccaggtgatagatggatagcctgaactaggacatagcaactgaggtagaggggaaaggatgggtttgaaaggtttgggaagggattggctatagacattggggatgagaaaagaaatcaggagaagctttagttttcctactagtagaattaggtggtatgcagggtatgctatattggcaatgagttttatttatgctcttctttattccctcctgtattgtaagggcagagaggctaaaaactacattttccagattcctttgcagtggtggttctgggtttgattcaggtagtgtgaataagatgcactcacaggacccctggaatttgaaggtgagacagaggccctctttctattgctgtgctggctggtgacaatagttaaatatacatgttttcagtagcagatggcaattcctagtgtctagtcatgaactttgtgggtgtgaggcactcgtggtggcagtagttgtggtagcagcaacaccagcagctacctgattaaattgcagctgggggcaagggggtgtgatcttgaaatccaaattgtccatgggtgggctccttacttatgtttctgtctagcaattttttcagcacccaatttcttgtgctaagtccccttctgtgtgaaatatctagaatgttttctgtttcttgtgctgaagcttgactggcatggttgggagtcaatatcttgctatatttggtatgtggaaaccatctctactaagttgctggttatgttcatcagtcactgagtatctgaaattttcacctttccagagaattaagctgagacattgaaacctatgtaggtcaatataggtgaagtgtcaattagatcagaaaaaatgcttaaaaatttagaaaataccatgagattcttgccttgcaatgtgttatacgctgctaataaagatatacctgagactggataatttataaaggaaaaggtttaatttactcacagttccacatggctagggaggctgcacaatcatggtggaagtcaaatgagaagcatcttacatgatagcaggcaagagagtgtgtgcagggaaactcccctttataaagccatcagatctcatgagacttattcactatcatgagaacagcatgataatgacccaccaccatgattcattatgtcccaccaggtccctcccatgacatgtggaaattatgggaactacaattcaagataagatttgggtggggacacagtcaaaccatataattccacacctggtctctcccaaatctcatgtcctcacatttcaaaaccaatcgtgacatcccaacagttccccaaagtcttaactcatttcagccttaactcaaaagtccatagtccaaagtcttatctgagtcaaggaagtcctttccatctatgagcctgtaaaatcaaaagcaagttaggtgcttcctagatgcaatgggggtacaggcattaggtaaatagagctgttcgcaatgggagaaattggccaaaacaaaggggctacaggtcccatgcaagtccaaaatccaggggggcagtcaaatcttaaagctctaaaattatttcctttaactccatgtctcacatccaggtcacactgatgcaagaggtagattcccacggtcttggacagatccacccctgtggctttgcagtacagcccccttcctggctgctttcacgggctggcattgagtgtctgcagcttttccagttacacagtgcaagcttttggtggatcttgcattctggggtctggaggatggtggccctcttctcatagttccactaggcagtgccctcatgcggactctgtgaggaggctgcaaccccacatttcccttatgcactgccgtagcagaggttctccatgagggttccgcccctgcagtccacctctgcctggacattcatgcgttgccatacatcctctgaagtctaggtggaggttcccaaacctcaatttttgacttcagtgcacccacaggcccaacaccatgtgtaagcttccaagtcttggggcttgcaccctgtaaagcagtgacctgaggtatacattggccccttttagccacgggacacagaacaccaagtcccgagactgcacaaagaagcaaggccctgggcctggcccaggaaaccagtttttcctcctaggcctcctgacttgggatggaaggggctgctgtgaagtcctctgacatgccctagagacattttcctcattgtcttggcaattaacatttggctcctcattactcttgcaaatttctgcagctggcttgaatttctcctcagaaagtgggtttttctttcctattgcatagtcaggctgtacattttctgaacttttatgctctgcttcctttttaaacatatgttctaattccaagccatatctttgtgaatacataaaactcagtgctttttaacagtacccaagtcacctcttgaacactttgctgcttagaaatttcttccactagatattctaaatcatctctctcaagttcaaagctccccaaatctctaggataggggcaaaatgccaccagactctttgctaaaacgtagcaagagtcacctttgctccagttcccaacaagttcctcatctccatctgagaccacctcagcctagactttattgtccatttcattatcagcatttgggtcaaagccattcaataagtctctaggaagttccaaactttcccacatcttcctgtcttctgagccctccaagtcattaggaagttccaaactttcccacattttcctctcttcttctgagccgtccaaactgtttcaacctctgcctgttacgcagttccaaagtcacttccacaattttgggtatctttacagcagtaccccactacccagtaccaatttactgtattagtctgttctcatgctgctaataaaaacatacccgagactgggtaatttataaaggaaaggagtttaattgactcccagttccacgtggctggggaggcctcacaatcatggtggaagaggaaggaagagcaaagacatgtcttacattgcagcaggcaagagagtatgtgcaggggatctcccctttacaaaaccatcagatcttgtgagacttattcactatcatgagaacagtataggaaaaacctgcccccatgattcaattacctcccaccaagtttctcccatgacacttggaaattatgggaggtacaattcaagatgagatttgggtggggacacagcaaaccatattatgtatgacccaccagaaaaaaaaaccctggtggatgaacaaataaagtgttaaaaattgaacacataatcatgtgcactccacaataagagaataatcccagatataaaatgagcctcaagttgtcaccccattttaggaaacagtcacaagctagcctaccttcttaaccacctccttagatattcctgccctgcaactctgtataatcagagaacccacagctattctaagggcagaccagaaggaggaaatttcatgcatcatgcttctttttgtttgaggtttatggggaggagaaaacaatgagtatgtcctcttcacctagatttgccgaaattatgccaaagaatgcacctcagtggtgactttttccaaggtgccttctctcagaagccctgaaaagaggtgggaccactgttttttccttcccctggcaagaatgagtgttccagaagctgttaaaggttatgaagttacctgagttttcctgcagggggaaacatcctccagtttatgaggaataaaatatatatcaaaccctacagcatcagcaatccggcttagtaaagattgtatgtgctttttaaaaataaaagttgtatgtgcttgattcctatgctatttttatttagtgaaggataattctgtgcctttttttaaataaaaaaggaactttaaaaggatatgtgttatcttagataactcctagttgacccttgtataacatttattgcatgtatagttcttggatggcctgcatcatccgtgagcataactggccacctactataatttgttattaaaattgcagagctagaaagcgtgactacaatcagaggtaaaggctaaaggaatgagtgagatattcagaaaagaatagggtaggaattgccgttccttcatgcattcactcaatcaaatttattaactgtgtctcatgtgtgagacactgtgctacgtgctagggataccaaagtgaataatgtttttgactttgaattcaaagtgaaaaaaattaatgtttgtcaataagcattgtaaacatttcttttcaatttgatttttataactttatttttcagaaaggtaaatgggtcatattgttgtcatctgatttggcctttgagcctagaaaggagagatcagttttactttctttatgatattttacctggtcctcaaccacttcatggcaatacccagaggactttgccagatcttcactttccttaacttttctgcatcatttagtgccatttcttagaaggctttacttgtatgcaatttgcaaagtggttacacaagtactattttttaatcctcctttcaagttctctaatgttaacagttcagtgaagctgagttacagtgaaattatgtgaaatgacaagtatcacttctcccacacctaagcatgttatcaacgatattattattactatatagatcttcttcatgggacctctagttatctagtgggtatctaaaactcaacatatctataacttgaccaaacatgactcttatctcttaagtcaattactctttttccaaatgtgtataagcactaaagtaccttcattgttcaggtctctgaggtttaaaatcctgatcctcttacttccatcagtcacaaaaatcttcccttttcacttccaaatgtattttgctttatttccatcttgtttacctgctgctgacactctctagagcctgaaacaatggttcaggttagttcttgcctggacaattgtagtagctttcaaattgagcttgatattgaagtctttttttctttaataaacaaagcttataattacatattgttggtgagtgtattttttattacctatttccttgaaggcaaggaaggacccatgtatatacagcacttaggataatacataaaagtttctcaataactgttagttgaatgaaagttggattgatgaatgctgctgtaataaatcttcctggatgggcacaatggctcatgcctatatttccaacactttggtaggctgaggcaggtggattgcttatgctcaggagttacagaccagtctgggcaacatggcaaaactccatctcttaaaaaaaaaaaaaaattagctgagcatggtggcacgtgcctgtggtctcagttacctgggaggctgaggtggtgggatcacctgagcctgggtggttgtggctgcagtgaaccgaaatcgcaccactatactccagcttgggtgacagagtgagaccctgtctcaaaaaaaataataataaaaaaaaataagtcttcccaaagcctagttctgattatatcaaccttgccccgaagcttccacagccaacccaggtctgaactccattgtcactgtctgccctacacctatttttccagttgtttttcacagggatctttgtttataagacacttaaattaatggaaaccagtttaaataaaaacgggcatctattttggaaagttgcagatgtatgtatctcacggaatgtgatatgcaagagcatataatgcaggctagtctcatgagggattataaccaactgtaaagaaactcatccaaagtcaaggttccatctctccttcacctagtctcttatctgtgcttttcttttggtgtctgcatcattcttcaccttttctgtggactggctttcattcattcactaattcaataaatttttatagagtaatgctatgtgctgggtaccattctacactgttctggatataggtaaacagcacaaatccctgcccccctggagcttataatctagttggagagaagcctaattaataaccatagaaatatactgtcaggtaggtgctttgaagaaaacagggataaggaaaagtgagtgaagagtcatcttatacaggaggaagggtgacatttgagaagataattggataaggaagtactgagctccagtgacggatcaaggtgggagtctaaaggtacaaccattttagcccagtgaaagataataatgaggcgccattcagtgccagaccttcctgtggtgttggcacaagatgtcaggcctgcacagacaacatctccctccattcctttccccacttcccttccttgcataggtatcgatcccaaagtcactccttaataaacattctaaacactaacctctaccactgggtctgcttcctagagcctgctacctactcttggttggtaccaagagtctgcagagaaagcaagtgataagattgagttttggagtcagaccactctctgctgagctgacaacaaaggctccatctctggtaggtagagtgcgaatagctcctggtaccagcatatgctgcaactgttaaaaactaacactgtaggtgaattgggatgatacactggtaaaaaggaatatggtcactggtgcaatgcatcaactatttgaaagtacagaggaaatgtaaactttaagaacaatggaatttgatggctgtaggtgaatttgatggatgctctaaaaattatgagaagctgaaagcatttaataggcaattgaaaatcaaatgtgaaagccagagggcctgtgtatcttacaaagaggctctcatcttttgaagagggagatcagataaagctgtggacccgcccaggacttaattgtcagagcaactcagctccagaaaggtttaaactactaacctaggcaggtgggctatacaaaggtaagagccccctggttgagatagaatggaaccctgacatatagactggtgacatatcaggggattccctccatctccaaatcttgagcacccagattcccctgaattaacccctctacatgcctggagacaatgcaaaggcccctctcctcaaagtcagtgtgttccccacccccactcctcgacccacccaggatcttcccctatgtctcctcctggccttgaggcctagacagacctagagtcaagtctcagcagaatccagctgggaagctctgggcctaataacggaggaaagggaatatacctcaaaggcgttgcaagactgagtcaccacgtatcagcaaaagacaagatcctataaatgggaaaggattctaagggtgcttggtcagtcaagaaggctaacataaaattgatgaatgcagaatgtattgatttgtgggcattcttctgtaatacaagatttgataccccaggaaggatcccagaagatggtgtgaattcaataccaggatggttgctaccaggatgggtgccagggcgctgatgtacaagctgaaatgtgaaaaagtggtggcaagtagccaagccaagggaggttgtgggtggctggcattgggacagggcaatgttaggaggcttctcctgagttgttggccaggcctcactgctcttgctgctgctcaatcactgctgcagactgtcctgttctcctcaaagagtctgctcctcaaactcctactccccaaggcacagaatttaagcttctcagagctttctacctccagaaaatctcatcctttccttatatgcatgtggtggaagtaaatataaatctgctttaagtttgtttctaaataagaaacgtaagaataccccagtggttttctctaagcagcagatgtcctggtaggaattcagacctgagcatccagaggttatcttaaaaatcgtggtctattgcctccttgtcctccaacagctcaccttccaatgaatattctaaaacttaatctcttaccatctctccttaaatatattaatgtgagagaacagaagaaagttttaggctagatattcatttggttggagatttcaatgtgaacagtttctgaaagtatttaaaaagagggcctagaaataaaagatacaactcgaagagcctgtggcttgagcagagcgtgtgatgattgcaatggcaaggtatgaagcaggagagctaagaagaggcagatgatgtcaggttttataaaccaggctaaaaagtcataacctagggtagtagtgagcaaaaggagggctttattcagagctgcatcatcgtcaagttacacctttttatagtctggagaataactttgaaagggggggattttactgagtacattttacttggtaactttaaatatttattgaagtaaacatatatgcaatatttataaaagtaaataaaatgcttatgaatttcaaaatacatatttaatacatcataaattgtattttataagtgaaaataaataatatttattaagtcccttttaaatataaaacatatgttaaggcattgaagatggggatgtcaatagcagagcaggtccctgccttccacattaggatacgtcctggctccagtgaggccagtgctaaagctgagcataccgcctatgtttttagctaacaaaacaaaagcagtaacaggtgtaatgacctagaggttgcacaggaggttgaaggattcaactcctcaatattggttaaatttcctaacatgtcattcttgttttgtttttcttagagctatggatgggaaagaagttcatgaatgggagagaatgagcagtgaaggaattaaactacactgatttccataataagtaaaaccaaagtcaatataagcaaaagggatagatatttaaggaggttcaagtttgcatttaaatttagttatattagtgggctccaatagacaataaacaaaaaatttcactgatttgatatttgattattatgagtttctttttacatcttcataagtagagtattttcatcaagaaaggagaaatcctgaaagttgggcaaaattgcaaaccaacggccatttttcacagatgtgaggtaagatttaattatctaatggtaattaataattatgtcactacaagcagatgctctgcctcagtgaaaatagtgatcttattcacccatgtctgtgcatacataatttcaaaaataaattttatgttttttaaagtacaatccgtgttggtgaatttctcactgaaaaatttaatgtgtaaaaatgtagctgcattggctttctctttactgaaggcagtaaagagtgtataagaagatctccaaaccacaatgtatacaaaaatatgactataaagtcatgaatgaatggtataaataaatatttcaaaagctctactagatgggccatataaaaaaaattaatctcattatcttagtatcttcttatagcctcaaacatgattattaaagtttgttcaactcattcaccccattacttccaaatgacttttggatttttcaaaaatcaatctattcttaatgaatgaatgctatcactaagactaccttgaatgcaggatctgtttttgaatcattttgtcacataacatattgtctggctcacggtagatgctcaacaagtgaatacctgtgcaactgaggaaattcctcaggaattcctaaaccttttcagtgcagagaacatatctcctacttcaattcctgagatgtcacatcactcagcagtcatgacccacaactttgagatggaaatggaaacttattcatggaagtctttgtaccatgtgtggaagttttaggtaaaaatgagtcatagtaaaagtaatataataccaacacttttcagtcttgtatttctttttactttttcaagttatttaaaatgcatttaaaaattttaccctcctaacaatcacataatatgagtgtaaagtacaggcaaaggaagttttatggtggaagctaaagtttaaataactttggaggtgctctatgagaaaaataatataaaattaagtgagaaagtatatttatttagaatgagaaaagaaatcacaacgaatttaaaatttgaaatgacgataataccataatcattacaaaatccagaaaaataacattttatatatgtgtacattgtacatatatacataaatatttataaatatgtgtatatttttagagacagggtcttgctcagctgcctgggatggagttcagtggtgctatcacagttcacatcagccttgaaatcctaggctcaagcagtcttcccaccttagcctcccgagtgggactacaggtgcacaccaccacacccagctaatttttaaattttctgcaaagatggggtcttcctatgccaagctggtctcaaaccccaagcttcaagtgttccttctgcctcagcttcccaaaatactgggattacaagcatgagcaatctgacacatatttctaggacattttccctatatctttggcaacataattttttattgcctattcatgtgacaataattaatataatttttatggcaaagtcagaaagataatttagtctttcttttagcttgtttttattgtttttattattggtagttgagatgcataaaatatgtgacttcctacatagttgcatttgtggtttatgggctgctacaaatttgtacccttttggcaaattctatgttgcatgattcttaacataaaggaaatatttatggctcattgataattgtgtatattagattacaaagtaaattcctaacaggagaaaatttccatttggacttgatcagtgtcctccaaaaagttaagaattattactatatttttatagtaattaaaaccatttaaataaaactactctgaaaaatacacataaattaaacattaaagactttacatcacgtaaagagatataaaatttaagtgattgacttttttacattttgcttatttctaaaaaagtttaagatagacctattgatgtatacaatgcagttctacgacatacattttaagcagatgataaaatgaggcagagtaaaaacaaggccatagggaagcaatatgagagccagacagtgacttcatacaaagatactatactaataaactaagcctagtatacttgaatattatattagttgagcaaattacttaactatttagagcctgttttcttatctgtaaaatatgaatactagcaatgtattaggctattcttgcattgctataaagaaatacctgagactgggtaatttataaagagaaggggatggtgctaaaccattaatgagaaatctgccctcataatccagtcacctcctaccaggccccacctccaacactaagggttacatttcagtgtgaaatctggggggacaaatatccaaattatatcattcctccctggctcctcagacctcatgttcttctcacattgaaaaatacaatcatgccttcccaacttcccaatagtcccccaaactcttaactaattccagcattaaatcaaaagtatcaagtccaaagtctcatctggagatgagttcctcccacctattaccctgtaaaataaaaaacaagttatttacttttaagatacaatggcatatagacattgggaagacattctcattccaaaaggaaggaattggcccaaaaaattgggtacagaccccacacaactctgaaatccatcagggtagttattaaattttaaagttccaaaataatcttttctgactcccacattcaagacacactgatgcaagggatgggctcccaacaccttgggcagttccacccctgtggctttgcagggttcagcctctctggctgctctcacaggttggagttcagtgcctgtggcttttccatgtgaagggcgcaagctgccagtggatctaccaccattctggggttccggagggcagtgacctccttccacagcttcatagacagtgcacactctgtgtggggcctccaaacccacatttcccttccactgccctagtagaggctctctgtgagggctcaactcctttagcagacttctgcctgtataccagcctttttcatacatcctgtgaaatctaggcgacactgccaagtctcctttactcttgcactctgcatacctgcaggcttaacagcatgtggaagtctccaacgcttacagcttgcaccctctgaagcagcagtccaagctgtaccagtggccctttcagccacagctggagctggagcagtggggatgctgggaacagcctcccaaggtggtgcagggctttggcactctgggcctggcccatgaaaccattctttcctcctaggcctctggacctgtgatgtgtggggctgcctcaatctctgaaatgccttgaagtccccttttcccattgtcttggctattagcacttggctctcttatagacatgcaattctatctagcaatagttgctctgcagcctgcttggatttctctcccaaaagagccttttctttctttgccacatggctagggtgcaaagttttcaaacttttacactcttcttcccttttaaatataacctacaactttaagtcatgtttttgctcctgcacttgaaatagcttgctagaagcagccaggccacatcttgatcactttactgcttataaatttcttccaccaaataccttaagtcatcactcttaagttcagactttcacagtttgaacttaagttccctagggcattaatagaatgcagccaagctctttgctaaggcatcacatgagtgacatttgctcctgttcccaatatgttcctcatttacatctgaggccttgtcagcctggacttcactgtccatatcactatcagcattttgatcccaaccatttaaccagtctctcagagactggttccaaactttccctcatctttctatgttcctatgagcccttcccttccaacctctgcccgttacccagtttcaaagtcatttccacattctcaggtattttcaaagcaatgtcccacttcttggtaccaattttctgtgttaggacattcttgcattaagaaatacctgagacttggtaatttaaaaagagaagatgtttaattggttcatgtttctgcaggctgtatgaacacggcaccagcatctgctcagcttctagtgggggcctaggaaactgagaatcatggcagaaggtgaaggggaagcaggtgcctcacatggtgagagcaagtggttagcggggcgagggggaatggcaggctgccacaggattttaaacaactagacatcaaaataaagcattcactatcatgaggacaatgccaagagaatggtgctaaaccattcatgagaaatccacccccaggatataaccacctctcatcagaccctatctctaacactgagggttacatttcagtgtgagattttgggggacaaatatccaaaccgtatcaaataatatctgcctcatagagatttcacgtgaggattaaatgacttaatacatggaagggacttagcacataattaacactacataaatattaggtaatatataactaagcttgtgaacttcaaatattattatagttttttattagttatccctttaagtaatgaccagcagataatgaattttttacaggttagactgtaccctgctctaatatttgagtatcttcaaaatagtctaaccagggaaaccaaaaacagtgataatttttctttgtgctgcaacaataaatacttgaggtctgtttgaaatgagtttgaagatttgatttagtttgaaggtgggatctctccaatagccaccaaacaatttcaaatatactcttcggtggttacctgctatattagtcagggttctctagagggacagaacaaacaggatagatacatatataaaggggagtttattaaggagtattaaactcacataatcacagggacccacaataggccatctgcaagctgaggagcaaggaagccaatctgagtcccaaagctgaagaacttgaagtccaatgtttgagggcaggaagcatccagcacaggggaaagatgtaggctgggaggctaagccagtcttgtcttgttttttcatgttcttctgtctgctttatatcctagctgtgatagcaggtgattaggttatgcccacccagattaaaggtgagtttgcctttcccagcccactgaatcaatgttaatctcctgtgacaacaccctcacagacacacccaggatcaatactttgcatctttcaatccaatcaagttgacactcagtgttaaccatcacacctgtattcataagccaaatttcagagaccagggaaaaagtaaagagagatatagagaaagagcaatgggtatgtgcatggagtcagtgtctgtcttattcctgattatttcccacaatctcatcaatgtctactacaaaatacaggcacttgaaaactgctgctaggcttgaatttagtggcaagtaaaactagaaaatgcttgaactattggttttatttactaacacatacttccagtattcttttcctagagaattgaatatgttattagcttttaatggaaatattgcaataagaaattttacaattaattctttaactcttattttactggctgatgataaaacatctttcctaaaatgtgactatgctaatggaatggaggaggcaaattaaaaataagtaaagtagtctgggtgtggtggctcatgcctgtaataccagcactttggcaggccaaggtgggaggatcgcttgagcccaagaatctgaggctgcagtgaactatgattgcaccttggtgacagagtgaggccctatctcttaaaaaaaaatagaaaaatgtctgacagctgctctgccccctcctaggtcatgatcttcacctgcatgttcacaactgggttgttggcaggtctgtctttcaattttcatgaaagagaaaagagccagactcctggaaaggaagcttgtctatgaaaaggagatgatctggaagttgtgacctttcctttctttcacttcccatcttctcaaactaagtcacatggccacaggcagctgcaaggaagggcttggaattgtaccccctaactgggcagccatgtgcatggaagagggaaggacagacttggtgggttcaattcgcaatctgccacatttgatatgatcattttaagcagcatccatgatttttatattgaaatacatcagaatagtagtacacattttcctttctttaggtagtaaagtatattcaaaagaatctcaagtggatgacaacatgaaataaagcactgctgacaggacagtcagactgctgtgtgggaaacaaagcatttcatttaaactgatggtgagatatgctggtgggccagacttcttcaaaccactgcactctagcatgggcaacagagagagacctgtatcaaaaaagaggaggaggaagaagaagaagaagaagaagaaagacataaaatgctgtgtggtgagaatttttttattagaacagtttaaactttaccctaacaaattcagaaataggtacctgggaatggtgttccatcaaaacaacacattatgatatgttacatattagtgatcaaaaggtaggtgacacacatgcacacacacacacacacaaaaaaaaacagccactgcagtctaggatgctgttgtccatttatcaccacataataaaacatttggaaaacattatcctgataaaatcttttagcaaactagaaataaaagaaaagagaactttcttattctccaaaacaaccatagcaaacatcacaattaatggtgaaatgttgaattccttcctctttgagactaggaagtagacaattatgtcttccatcactatgtccattcaacactttactcaaggttctagtgagaccaataaagctagaaaaagaaataaaagatacaaagattaggaggagggaacacacctgtcattattcacagagagttatacgagagtttgcaaaaatgatatgcaaacatgaattgaattgtataaagacatcattcacaaaagcttaaaaaatatgaagcattttggaacgaatccaacaaaatatgggccagacttcttcaaattatattaaaagactatggaaaaatattataaaatggatatatatgttaatgaataaaagactaaatactatatatgttggtttttcccagtttcatttagagtcaacaccatcttaaccaagatccccacagtgctttgtgtttaccttggtaatctaattctaaatttatatagaaatacaaaaggtcaggattgccatgaagaagagcaagttgggaagattttcttactagctatcaaacatttttttgacaatatagtaactaaggcaacatggtattggtatggggctagacaaaccagtagaatgggctagagagtccagaatcagaccacacactaaagatactggatatatgaagagctggactgcaggtcagtggagaagggataccatttttaatcaacagtgccaaaacaattaggtatccctgttgggaaaaaaataaaagttgactctacttcataccatatacaagcatgtttgaaacagtcaaatatctctgaaatcaggatgtttttagaatgtacaacatatcatagtttacttagcaaacattttttcttttcttgtttcaaataaaataatggtgggtgttacatttgagatgacttaagttttatgaaatatggtgccacagtttgagtttggtcaggaaaataaaagtcaatctatataggctcccacaatcaatgtaaggacaaagggagtgaagagcaagggattgtcactgctgatcttaccaagaagtgcttgagagctcacctgtaagctgctagaagccttagaaaccttcaggaagctactgacaactctcttagtctgcagcatcagagacagagtgattctcagaaagcctctaccaatgaccttggctagacctgggcacctagaggtgaaaaagctaatctgaaatgtgaattcctgtgcccctctgatgttattagcaagctattataagagagacatgatcaggttagaattagtggctttcatccagaagaagagattaaaaattcagaaatttgggactttacaggttagaaaagctaatgtcttctgtaccccaaatagcaggcgtaagacttcacaatgagcctttccctgggacctcccattaagacttctcagccaaacaaaggaagagagccctgtgatcaaaggtcagaataagagcatttccttctcacacaagtttgttttaggtgcctcaatgtggcttccattaaataagggaaaaaaactatgaacctagcagtatagcagtacacaaagcgcactgaagatctatgtccagaaaaagactgtgagtgaattcctggtacataaaaccggctggaggcaaatcagatgagaagcctatcaagtttttgagggaattataaagccatagaagctacaagcttaatctgtgattattcaaagctattcacagtgaagagtatttttacgtgtcaacttaactgaataacagatactcagatagttggttagacattattctggggtgtctgtgaggatgtttctggatgggattaacatttgaaatggtagacaaagtgaagcagattgccctccccactgtgggtgggcctcctcagctaatccactgaagccctgaatagaacgaaaggctgagtaaaggagaatttgctctctttgtctggctgtctttgcgctaggacgtcagtattctgtttttgactcagactggtaccagaacttataccatcagctctcctgattctcaggccttcagattccatctgcagctatatcatcagttttgataccagtataagagccttatattattttataattaactcttcccaactatatgaatgaggtgttttaattatctccattttgtgaattaagatactgaggcatacggataatttgctcaagtccacacagctagtaactggtagagttagtgttcacacccagcggccctcctctagagctgagttcctgcaggctgccctgtgatgagaacgctgctccattccctgctaggcagctccctgatgcctgttcaactccttccctgtagtgagctctttccataatctagtagcagctttcccctcctcatatctgccaacattcactctgcttcagactggttcactagaggattcattgctgcttcccacctgttttgtcagtggtgatttaatttttaaaatccttcatcagaaatggtgtgatgtaggggtatattcatcagttttaatccacctaggcagtgtttagtggcctgaagggggaatacacaatttgggggtggtgatgtggcatctaatcaaagctctctcagaggagagagagcctatgagctcttcaactctcgttagctgtaatcaacacgagatgctttgtcaattagcaaaaggaatgttagaaattaaattttcattagtgaaatgaattgtgttcaagatatgtggattggccagaaatctggacagcatgtaagaatctagcaggcccaagagtctgtaccatttggaatggtgcccctggcttgattccagaatgttgcctatgggccgcctcatgttcagaaatatctttttgcctaatgctgaacacaagatcagttgtccctgcctctggaatatgatcacttttatctctattgaccctctcttgccagttatggtcaggacaactaaaaatttagacaaagagctgggacttgacctcatgaaacaggtttctatttatttatttgtctgcttgctaataaatgtttataggtgtaaaaactttcactttaagaggtatttttattggaaattgacagtgagatggtagggaggctctgtagagctgttacacctgatagctattacctgtgggtggctactgacatctattctaaacttccgataattacaaatgaccatgctggcttaatcagtttgctaccacacccattccaagttcatttgtcttctttaaactctctcataggtattgtttcctgctgagatactgttcatttcatctatatacatctcacatatcatttcattgcccagcttaaaattccacacctcataaaacctttgctgactcttccagtattttttgattattgttatgaactcttaaggtacttatgtatggcatgcattgaaaaagcttttggtggcatggtggttcacacctgtcatcccagcactttgggaggccgaggcagacagatcgcttgaggtcaggagttcaagaccagcctggccaacatggtgaaaccctgtctctactaaaaatacaaaaattagctgggcatggtggcacacccctgtattcccagctactcaggaggctgaggcacaagaatcagttaaacccaggaggcagaggttgcagtgagctgagattgtgccactgcactctagcctgggcaacagagcaagactccatctcaaaaacaaaaacaaaagaaaaagcttttggttatgcatgcatttccttgacagttttcattatgtgatttagacacagcttaacaagatttgcattaactggatcccagttggttataatgctggtcacaactgggaactattcctttacaattgggagagcagtgttgctttttgctctctagcatttctgatttttcattgtgtggtgctttgtttatcattgcattcctttgttctcttgtttaccttttgaactttgctagaagcaaaattgcaaaaataaaggtcatgggtgacagagaaagaaaaaacagttattgactatgtggattagagatcaaaggaggaggactttacagctgcttttatcagttttaatccaccaacttattgtttttaacttgcaataacaacatgtacttacaggatattttgttttaaaaatgatgttttttagtgaaattcctgcagggttaatggttttgcatagtgagtctgaagttgtttagctgaacctgtgtctctttaaattaatagtgtttacacattttttgatatcttaagatttcttaggaccttatgtgtgtaattataacagcatataccacacaccactgtgataaagtatgtaattgtttagtggttgaaatattatttactgaatgggatttaaaagtcctcaaaggatggtaacctgttgaacacttatttggattttcctaatgcttaacacaatcctaagcacacaacaggaggaggcagaaggaaagaggaggggaagagatccagtatcaagtgttgattgattaaagtcaagctttaatgggctttagttaaaaagctctgagattcttttctcagcttggtctattctgctattaatatttatgatggcattataaaattgttgtatgtttttcagctctatcaggtcagttatgttcttttctatcctggctattttgtctgtcagcttctgaattgttttattgtgattcttagcttccttggattagcattttaagtaaattcactggcagaggaaatcaactttgtaattgtttttctaaacattttgtagacccaagaattcatagtaacagacctcacagcaactcgtgtggacatgcagaacttgataatgcatagaaaatttcctgtaagacagacccagttcaaacaagggattcaggtaatagaatttctaaaaaacacaaatggagggaaggctttcctagatgtcataattactctgggctcaaccactttattggaaaaagctaatttgatttttttacctgattttataaataatcatattgttcttacttgtagcttgatgtaatgggaaaagaaagcatagctctaatacttatgtcaacagaaaaagtcaaattctgtaaagtatttgaagagatttattctgagccaaatatgagtgaccatggcccaggacacagccctcagaagatcctgagaacatgtgcccaaggtggttgggatgcagctcaatttttttttttttttttttttacattatagggagacacgagatatcaatcaaatacatttaagatatacattggtttggtccagaaaaatgggacagtttgaagcaagtgggctttcaggttataagtagatttaaaaattttctgatggcaattggttgaaacagttattatctatagaaaggactgtccaggttttaagaggttgtgaagaccaagtttttgtgatgcagatgaagcttccaggtggcaggcttcagagagaatagattgtaaatgtttcctatcagacttaaggtctatgttgatgttaaatgctggtcagattttcctgaattccaaaaggagggagggcataattaaatatgtccaacactatcccttccagtaatggactgaaccaaccttttaggttagctttggagtgccctggcccagaagaggaagtctattcaaagggttgggggaggagggagcttcagattttatttttggtttgtacttaccagcagggtgatgtaagctaaactacttaatatctctgatttaactttccacattggtaaaatgggaaaactagtattccataagttaatgcatgtgaaagcactcagcactggcatataactagtaatcaacaacactagattgctgggtaacaagctgaaattattaattcagagagctttccataagttgtatcagataaccaattactgaatgctatttagaggcagtattataagatgaagagagcaaattcaatcacttgcacttcgtagcacctgtgactgctacttaaacttcatgtacctcagtttcatggcttgaaaactgaagatgaaaagtcctcccttgcagtgagattaaattatttgttatatgagaagcatttacaacagttcttgtcaatggcaaacactcaataaatctcagtgagtattaaattacatataaaggttatgctaggagttgtaaagaataataacactcaaagatgaatgtgattcaattcttttttcaaagactttataatatattgcatacggtggaaggcctcattctatgttaatgaattagcattgcatgcaaaaccacccttacctgattccaaaataccttcccattctcttctactcctacattttccattgcctcctacattccttgaaaataataacagaatgacacacgtctttcagaattgtcctgcacaactcctagtaatttgcaataaaaaacttttaaaagttctctgtgagcaggaaaataacacggtccattttgtgcttagggagcaaagcaaatctctgtgcacagaggatatgagaggttggaggaaagaagagcagttagaacacatcctagttgtctcagtgggcagacgttgttagttgcctgcccacactttgtttttgctaatagaactttgattttgttcagatagttggtagtctgaggtgaatcaggaaatgttggcttgtgattggtttagggaatagtactacaacctacttacggccaaggagacataggagaggtttgctcggtaggactcctggaaattgtttcctagcccagagaaaaagattcatttgaggaagtgcctcttttatgttttgaggttgctatccatatgtggttcctggaactgtcctgtgatcatgaggggagtcagcaaggataacaagctgaggtgctgattgatgtatctgtgtgtgaatattacttattcccagaatgagacagagctcgtcaacaattctatttatattattcactcttgcagattttattgggggaaccagcccccaatatttcaacataggttcttttctattttccctaagtgttggccagtctgagaaataaagggaaagagtacaaaagagagaaaattttaaagctgggtgtctgggggtgacatcacatgtccgcaggttccgtgatgcccctgagctgcaaaaccagcaagtttttattatggatttcaaaaggggatgggtgtacaaatagtgtgtgggtcacagagatcacatgcttcaaggtcaataaaatttcacaagggaaatgggggcagagtgagatcacaggcccagggtgaaattagaattgctgatgaagtttcatgtcccagtgggcatgcattgtcactgataacatcttatcaggagacagggtttgagagcagacaaccggtctgactaaaatttactaggcaggaatttcctaatcctgataagcctgggggcgctacaggagactggggcttatttcatcccttatctacaactgtataagactgacactcccagagcagccattttagagacctccccctgggaatgcattctctttctcagggttgtttcttgctgagaaaaagaattcagtgatatttctcctattcgcttttgtaagaagagaaatatgactgttctgtccggcactgcaggcagtcaggcccaatggttatatcccttgttccctgaaaatcacagccatcctgttccttttggatgcccagatttcagtgttcaaacacacatactctacaaacaatttgtgcagataacgcaatcatcacgggatcctgaggcgacacacatcctcagtttacgaagatgacaggattaagagattaaggtaaagacaggcatagcaaattgtaagagtattgattggggaagtgataaatgtccatgaaatcttcacaatttatgttcagagattgcagtaaagacaggtgtaagaaattataaaagtattaatttggggaactaataaatgtccatgaaatcttcacaatttatgttcttctgccatggcttcagccggtccctctgttcggggtccctgacttcctgcaacaagatttagatgctgagaaacttttttacctaaataactaaaagggaatgaaagaagttttgttttattagtgtcttatttttttgaattccttttggattattgctctaatataaaaaatgtattttgatgatctatcagctgacattcggtcctcctttaattctattgaaagtgaaaaacatagttatctaaatatcataacaacaaaaaagatttaaagatttgtaatgcagtcagtagagccattcactttctcaactgagaactgatatttctaactgtccctttgttcggtatgcaaaggtttttaacatcccaagcctggggtaccattacaaattctgatgagtaaagaaatgtgtgtgtgtgtgtgtgtgtgtgtgtgtgtgtgtgtttccccttcttttgggggtggaagagagattctgaagaaaggaatgatgatgggagagaaaaaccagaattaggtctgaaattcaggcatgtcttaaggcaggtatgttttaggaaaaaaactacataaagacataaaacaccttgacactgatctcatggtattaagcctgttccagtactccttgaaatgtctcacatactccaggattataaagatgatgaggccaacaacttctagaatgaaaattgtaaaagataatactgaaagagtctgttgagactcagccctgtggcaaagatgagattaggagcagtgagcctcatgttagcctacattaaattgaaaaagagagagtcttgctggagagagaaagcaagaaaatacaacacactctgagaattctgtctaggaaacagcattgagtgtggttattggcacatggctatgactggaaataagtagtccagaaggcattggaagaaatgatattgcaaatgtcaggagccttttaacaactctcagcctcccaaacttaaatgagtaggaagcagtcacaaaagccatatgaccctaaagaagacatacttctcgacacccacttcagatgtggccattgaggacaatgtacagagaagaatcatccaaaatgttatgaaagaaaaataaaatcttaggaccccaattcatgctgctaaaaggaaaaaattaatctgaaagctgacttatgcaagaaactgcctttcctttcattcctaagcagatagctatagataaaaagttaaaaaatatccacaggtagtacatatgtacacattatcttatgtaaagtgctgatttactgagtacaagacaaatacataattggactattgttctacctactcctcttctcttgcaacatgtgaattcagtaatgtgagcatacattccctctttccttttcagcctgcttttcccctttaaatattatagctctcaaaataatctttggaaaaagacatggaccacatattccttttttctaggcatgttgttaaccttggctaaataaacctctcaattgactgagacctgtctcagatactttttggtttacaaggtcaagccagggacatagagaacaatgggcaagggaacttcctccagagagaagaatcagtacctgattaaggaaatcccccagcttccaggatagagcttcctcaaaattcctgtctggaagaattacagcattgttatggaccagtgactatttatcatttttccaatggaaatctttattgcagttactgtgtgttgagggggacagacgacaacttatatttttaggttataagtcactgaactataaaaagacacccctatacatgatggaggggaacatgcatcacccaaagaccctggtattggagctagaggcagtacctggatgggacattggcttctatccctctaggaggggctaactgtgtttcttgtgtggaaagaagagtggaatggatatttaatgagcagaaggttgggctgtgccagagcctgagtagccatttactaagcctattccctctttttctcctgagactacagataggttgtatttcctggccttctgctatggaatgaattatatcccctccaaattcctctgttgaagttgaaacccacaatgtgactgcatctggagataggttcttcaagagacaattaaggttaaatgaggatataaggtggggacctaatctgatagggctgtggtcttgcaagaagaggaagagagagagatcttgctcctctttttctcttccatgtgaggacacagtaaaaaggaggtcatcttcaagccaagaaaagagccctcacctggaaccaaattgactggcaccttgatcttggactttctagcaccagaactctgataaacttctgttgttttggccacccagactatagtattttgttatggaagcccaagcagactaagaaactgtaaggtacaaggaagtgcttcggtgaagaattaggctgaggcagacatccaggcctgcatgactcagcgggattggagtgcaggcataaaccttcacttgctatataatctgtttgtgtaagctcatacttggctctatgccactattgtctgtaaaacatataattgccttgctgacactgtacaggtgttgctggtgcccagagagaaaatgtgaagctgctgacccctttgaggcagagctgttcatctcgcagatggacatggggggcaggagccagaaaccagcaagtgcgcccagagggaaagagttaagctgctgagcggggctgtgtgtagagacagtaaagccacggaacctgtagggagagctggctgtgcagctgtgcatgggagcagcaggggctgcagaaccagctgctgagaggagccacagagtcggagcagacagttgagataaaggtggatagtgtgagagagctgctgatgagagagctgctgaataaaaacatatttcacctgcctacggcccccccaagtgttctttcagctatttaccactcatccacccactcctctcaggcgtcagctggggctggaacctaacacacaccttccttagatgtggtcatatgaatgagttctagttaatagtctatgaacagaagtgctgtgtgcatcattttcagcattgaccaaagaatcaaaaataaatcaaaattaaaattttgtcttattttccattctcttttttcttctaatggctccatgaagacatactcaattaccttaaaagccaagtgttaaagatgacaaagtcataatacaaaaggtgcttgagtctctgagtcactactggcagagagcagtccattgattaggaccactattttggacttacatgtgcaagcaataactttcattgtgtcaagccactaagattttcagaggtcatttattacagctgttggcataatcctgataaaataggaatgtcaccagataacgcagggggaaaagggacaaattttttttgggggagaaatatattggttcaatgtttttgatgtcccaacaggcagctgggaattcagatcaggatctccagagagaacaaaatgagaaggacacaaacttaaagaatgtctacttttaaggagttagaaaattagggagacccaaccagagagattgaggagaaacagagagatgagaaaaaagcccaaccaattaaagcactttaggagatgaggagggaaagagattcaggtgagaggtgaataatacgtcagttcccagggggatgaggatgaatttgcagagaaatgaatctgtaggtgaagcccttgctctgagaagcttgacaacggaagaaatgatgcatagggagcagcaacttgaggaaaaaggactgccaaggatttgcttgtttattcttgtttgttatggcagagaatacttggggatatttatttatcaggaagaaagaattattggtggggacaggggattgaaattttgagggagaaaaggattcacagagaaaaacagattcttgaggagacagaattgcctgcacaatttctagtgaatacttccttaatggatttggagcctctcagctttcacatttgcagaaaggtaaatttcatcctatttatctttctttaatttttttctaactcattcaaattggaacagatggatcttcccttgcttctttttctaagcaaataatgagttgctatgagtcaaaaaatattttgtacgtatatttcttactaactagcattatttcttgttttatcttatttgaggcttataaattactttgactaactctggatttagaagactgtgaatttaaatctggagcttcactttatatctttcaaaatatgagtagtataacttgttcctctatgtccagatttttggatctttatctgcttttttattgttcacaggtcagagaaagaatgactgtaacacctactgtctattggaaagagaaggagagcaggagagagtgatggcagaaagaggagcgagagagagagtgagcgagctatagaacttccggacatttcaactttattatttcaagtgtaacaccaattgttgaggagaaaattagcatgcagtggcttggggtcaatcaggcctatcttgaattatctgtttctgtaaaaatgaggggaaaatgagatgtaggtctctgtgaggattaggagtggaaattacgtaagataacataaacattgtatgtgaaacttcttaatagcagagtacattgtagggggatcaataggcattgatttgtagatattaatagatactttttcataattttaaactctgtttttctaagtccatgattaaaaatattttccagcatattaactactgccttttattcctaatgtcctttgaaaaatgattggtcattgaaataaatgtactaatatctctaacttctggtctgaagatatgcttaaaataaatcccatgttgtaagaagagtcttaatacttcagtgaatcagcacctttagaagtcatgataggggaacaatgaactatcaataatttacttaacatttaactgtctggtttttttctttaaaaaaaaaatagcctaactttgatagttatctgatagctatttattatgataatcaaattgaaccaatttagcttcacaatgctagaattcaatcttacaaaatgatagaatgcttgtttatgggatcaataggttttcacatgattgagtcttaacgtaaagattagatataaattttcaaaatgccttttaatctttgcagttagatacatatctatctccatctccatcttcatctctatctttacatgtaggtcttcctattatagatctcacatatatctgtggcattaatataggagatatgacctagcaactttcagaaaatggaaatgttagcagagaattgtatttaaaacaaaaacaagctaacattaaccttttcagaatgatatatatttttttggtgagaaataaaacaaaacaagagaaatgaacacatcactaaaatttaatttcatcaaagacatacgggcaaagaccaaattcatgatcaattcagttgttttctttgcattaggaatatgcccacttgaaaaggagatttaaatggactactttagtttaaaacaaaagcaatatctggcacaaatctatttttcaacatttccatgtgaaaattttctgctaagttgcactctaataaatattcaaaggatttaggattcatttagcattaggaagctcacttatttttttatttttttaatatcttgaagcatttctgtttcagttttgaaagcaacagctgtgtattttctccctagatactcactttaatgattccctggacacccaccctaatgaagatactaagtctctctaggattctcgtttcttcacttgacctccttctgatgtttaatgactcataagacatagtttggtgatatacctaaataagcatattatcaaggggtgatatttggatggcttttgaaaggacactgaaaccaagatatatttatagtgaaggcacccttgggaagcccaggcatttaaatctctgtgaacattgttaagtctccttttttcatttcaagttgtagttgtagaaccaggtgaaatcattcaacccaatactttgatggaactagccttcctgggaaagagttcaggacagatgatcacaattcctttgaagtcctacagataagctgtgcaagttttcctagatttccttacatcctgcatttggttctgaatcttgacaccatgatcagagtaagagagaaatgacaacttgagtgaagttatttgcaaaatctaaaatgagtgatggaatgatatttaaaagtatctgtatttacaagaaatacttccaaattactgagaagcagagaaaaaaaagaatgttaatgggcaattaagagaagatgaaactgaaaagagaaattcttacacagatccacaaaggaacatgtttacagatgttcactatagcagcatttatgatagcagggagctgaaggtaatctagtatgcattcgggggatggggtggatagatggataatcaaaaacttggagcttcccactaggaactactatgctacagtttgaagctagattttcatatagcaacatgaattgatggtaataacagaattctttgaaaaaatatgtaagaatcaggatacaattgtaccttaagaccatttatgaacacttaaaatatatatgcatggagcaacactacatgttttgcaagaggtggaacaggaagaatgtaaatagttaataattatacacagcatctctgaagctttcctaaaatagggttacaggactgtgttggttgtattccagctcttggtggagaagtgaaatttgatgccatattggaatacagctcctcaccagctaagctggaaatgaaaataattgtgttttcctcaattatctgaaattgaaatgttatggcatgaaatctacctttgtgacaagaagtatagaaacccaaaaacattcctggtaaaaatatgggtgatgtcagtggtggccacaatggcattgtaagtagaggaccctaactctgtggttactctagtcagtcatacacagtgctagctgataactccgtagccatttcattaagccctggacaaattggagaagtacaacaaatagcttttaagaaattcttccaggttatcacttcagattttattctccaaaacttactgagcatggaattcccttggggatttagaggcattaaatggtactgtaggccaggtcctaattcagggggcccagttttttactgtcacaaatctaccagtagacaagttatagggtgagaccatcctctccatataccacttaggcaaacacgtcaaaaacctggtactgcttctcataactgctttggctaaaaattaaaaatatcacaatctgtatcttatatcatgattctattaccaatactgccaataccattctcttccatcctttcttactggacaagtccattatctttaaggagatagggaaggaggaaggttttcccatcatcacatgtcaggtctgtgattggctagtacccagtttgcagcagagttttattaggttgtcccattttgtagagggttctttataaagcataaaaatggagatacatctaactttttcccagtgttatcagaatttcaaagccgacattatcatgtcaaactgcttttagatgtctctgatagatagccaatcttatcaatttcttgggggcatgagtattaaaatagacttcttatgagcctacaatctggtcttgtagatgttcctcaatcaattctaatattttatggtgtcactaggcatgtgaaaagattagtaaactcgaaaacacagcacgagagattattcaaaagtacacagagaagataggattaaaaaaaaagaaaaagaaccacacatcggaaaaattcagttgtcctaatgtatataatgacagtgaagaaatatctttaaaatattgaaagaaaacatctgtcaacctagaattctataaccaagaagaatatctgcaaaaacaaacgaaatgaagtttaaaatcccctcctttagcctttctctttctcatgacttcctgtttcacggactctctgtcaattagcatatgcaaataggtacttgggtgtatcaactttgatattcacttaacaacaacatccaacctggaagtgctgccatatgagttatccccgcagaacttaattgggtgtttacttaatttttatttgcataaccaaaagagcctactgttgtagtgcttctccaaacaaaaagagagtatgctccaaaggcaaattccagtctctattttagaagctagtgaggcttaggcaggtgatcacttgagcccagcagtttgagagcagcctgggcaacaaggtgaaatagtctctacaaaaaaatacaaaaattaactgggcgtggtggtgtgcacttgtaattccagctaccttagaggctgacgtgagagaattgcttgagcctaggaggcagaggttgcagtgagccaagattatgtcacagcactccagcctggatgacagaatgagaccctgtctcaaaaagtatatatatgctagcaagtatattctttggttagaaatgtttctaagatcaaagtctttaaaaaattgttcagaataggcaaatacatagaaaccaactatacaagtgattacttggggctgggaagtggagggatagaatggtgagagtgactgggagaaaatgagaaataactagtaatgattatgaagtgtctttattggatgacaaaaatgttctaaagttgattgtggtgatggttgcacagctctgtgaatgtactacaagacactgcattgcaattttaaatgggtaaattgtataatatatgaactatgtctcaataaagctgaaaaaatttatatggttttgggaaaatatttatagtaataaaaaatggtgaaaaacagcaacaaaaattatattaattctccactgggtccttggtttgttggtcaactctgttgtaattttttctgactttccatggtatattagaccattttcacactgctaataaagacatactcgagactgggcaatttacaaagaaagaggtttattggacttacagttccatctggccgggaggcccacaatcatggcaggtgaaagtcatgtctcacatggtggcagaaaacagaaaactttcgcagggaaactcctcttctgaaaccatcacatctcataagtctcatcagtcttattcactatcatgagaacagcatgggaaagacttgcccccatgattcaattacctcccactgggtctctcccacaacacatgggaattcaagatgagattttggtggagacacatccaaactgtatcattctgcccctggcctctcccaaatctcatgtactcacattttaaaaccaattatgccttcccaacagtcccccaaattcttaactcatttgagcattaactcaaaagtctacagtcccaaagcctcatccaagacaaggcaagtctcttctacctataagccagtaaaataaaaaacaggttagttacttcctagatacaatagtggtacaggcattggataaatagagctgttccaaatgggagaaattggtcaaaacaaaggggctataggcttcatgcaattccacaatccagcagggcagtcaaatcttaaagctccaaaatgatcccctttgactccatgtctcacatccaggtcatgctgatgccagaggtaggttcccatggtcttggacagctccacctctgtggctttgcagggtacagactccctcccagctgctttcatggattggctttgagtgtctgtggcttttccaggtgcatggtgtaagctgtcagcggatgtaccattctgggctctggaggacagtgaccctcttctcacagctccactaagcagtgccccagtagggactctgtgtgggggctccaaccccacatttcccttctgtactgccctagcagaggttttccatgcgagccctgcctctgcagcaaacatctgcctctacattcaggtgtttccatacattttctaaaatctaggcaaaggttcccaaaccccaattcttgacttgtgtactggcaggctcaacaccaagtggaagcttccaaggcttgaggcttgcaccttctgaagccacagactgagctctacgttgatccctttcagccacaactggagtgactgggatgcaggtcaccaagtccctaggctgcacagagcatggggaccctgggcccagcctatgaaaccacttttttgtcttaggcatccactgctgtgaagacctctgacatgccctgaagatattttccccactgtcttagggattagcattatttggctcctcattacttatacaaatttctgcagccagcttgaatttctcctcagaaaatgggtttttcttttctaccacacagtcaggctgcaaattttccaaactttcatgctttgattcccttataaaactgaatgcctttaacagcacccaagtcacatcttagatgctttgctgctcagaaatttcttctgccatatactgtaaatcatctctttcaagttcaaagttccacaaatctctagggcaggggcaaaatgctgccagtctctttggtaaaacgtaacaagagtcacctttgctccagttcccaacacgttcctcatctccatctgagaccacctcagcctgcatttcattgtccatatcattatcagcattttgggcaaagctactcaacaagtctctaggaagttccaaacttaccaacatttttctttcttcttcagagacttccaaactgttccaacctgcctgttacctagttccaaagtcacttccacatttttgagtatcttttcaacagcaccccattctacaggtaccaatttactgtattagttcattttcacactgctgataaagacacacctgagaatgggcaatttacaaaagaaagagttttattggacttacagttccactcacaatcatggcagaaggtgaaaggcaagtctcacatgggagcagacaagagaagagaatttttacaggggaacttctctttttaaaaccatcagatctcgtgagacttattcactaccacgagaacagtatgggaaaggcttgcccccatgattcaattacctcccactgggtccctcccagaacatatgggaattcaagacaagatttgggtggggacacagccaaaccatatcacatggcatctctctattgttgcactgtctccctttccccatttttctgcctgatttttatgactggaaatcttgttccagcatttgacttcctactaccatgtttttgtttctctgtattgatccacatgtactcactggctttctgtgtgttgtaaatttaagacttgtttaaattatgagggagagagtgagcttgatagggtggggaagcaagactacctggggatttcttccttccccttggagtcatttaaaccacattccaacaatcatttgtctggtttctttgatccttctgttagttctaatgaatgcatttattttgcaataccaaggattagcaatcattctgcaaaggactcgaggtaacatttgaattacatttggtctaaatatataaatttatcttcattctctttctctccccagttgtgtttacttttactatttactctttctataatgtcatgtttttgaggcaagggattttcaggctcattgaaatttgatttggcatttttctgccttgatgaggaccatttgcttctggaaatgggactctgtgctttcatttcacttccaatgcctagtctcatttttctcttctttcttttctcctcaggcctcagattggcagcataatggactgtgtaatgttcttttttatgttttaagtgtccaaaggcaactagtagccaatcattcaaattaactaataccctgtgaaggcaggaaacttcaaggtccaaattttcactctgaatttcacattacacaactttgaatgaagcattagttgccagttgggaaataaaatctatgtttatggacattggttataattaaccggtatttaattgaatacaatattaaagtttgggtgatggggaaaaagaacaatgcatgaatttattttgcattgtattatatttatgtatctctttgccttatttgtctgtgagctttctaatatgctcaaagccttccacagtgtgtggcaaatagtaagtactaaataaatattttttgaatgaaaatgaacaggcaaactataggaacttcaggcaaagaggctttcagtgaacttgtgggtagtaactattgccttcttttgctagttttttgaaaagccactttaaaggaagtgctgtgcctggctttttctagttctgatgttgagttatatataaattcttatttttttttcctccaatgatggaattttttcccttgcctttgttttaatgtaataccccatgaagttttagcaattccagaaatagaaggttgttcaattccagtaacaatatgcatctgcttggccatacaatttacaggtctttactttgctgcagtaatttaggtgaatagtctgaaaactgatgaaaagtgattcatatgaggccttttctatggaatttgtttactatatctgccagaggaaaacatttccattttaagcaagcttcaattactcaatgtacgctgtagtctaaatggcaaatacaaacaaaaaatcgtacttcctcttgtttctatattttttagaatgattttcatatcttaacacataggtatctactgccaatgtaaatcattcattcatttgtttatctcttcattcaggactgggaatataagagatgaatatgacagagtcccttgctcttgaaatgtttcataattagttattgtatttcaaagttaatttaattgttaaccattttgttttataaaaggagtcttttactgtggaattaaaggactcaagcccactggtttgccactgggcaaataacactaactatatatgtaggattattgatttgggtaaatccagactggaattattccagtgaggtacacatttgaattccattacaaagcagaaggaacctacaatttatttgacttttagtttcatcagacaggacatccagattgtctgttccactgacaacgactaaaaaactggattaaataatgtaaagtaatcttttcaagtacatcaaccagctggctagctggttaggagtgcagagaagtaagcattgaagctgcatgaacttaaaattttgttttacttttcctgaagggctcaacctttgcttaaagcgagaatcaagtacaatgtataagaagtttctatttgcaaaacccctacacaggagaaatcaaagccaaatgctgatatatatatagccacaatagttttgagcagttgatactgttaacacttagggcaacccaccagccaaagctaacaaatgcttgggaatattagcaaccccaataagccaaagtaaaaactcattcctgaatgcacacaggaaatcaactggctataatttatggactcatcctgcctaatctaggacagaacttcacccacaattggcataagtacaatcgaccttctagagtataaaaacttcagactttcatcttttatggagccattcactgaagcttttctcttgtcattgtctccttgtctggtataataaactcagaacttattttgtgggtaactgtgttggtctttttctttcctttatcacagagacctcatacataaagccaggatattgaaaagcagcccataagtgcaaagatgaagtagaaataaatttgcatgttcaacccccttcaagttaagttgggaaagactagcatgtctcaaacatgggtgcaggatggaagtaaaacaatattccctgagattttgtaaacacccattggcttttccgtggatttgcaatccaaattcatactatctgcgtagtacaaaatcttcaagatatataataaaactgtcctaggttgccatggctctaggtacataggagaagaaaacacaaatcctctctaaagtactggccttaaaaaaatcctatagataaagaaattatctatagtactggctgcaaaaaaattcctatagataaaattacaagaagcatgagcccatgtcatcctcttaaagaaataaaagaaaacaaaacacagaattccccaaaaaatatggcaacattagtgagatccaggaaaaacattaggtagcaaaacagattcacaaaaaaccttcaaaaagtatacttaaacctagaataaaagtatgattaatatattcagagaaatgaaagagaggattgaaaacatagttgacccttgaacaatgtgggagtttggagtaccaactctcacgcagccaaaaatctgcatataacttttgactccccaatacgtagctgctaatagcctcctgttgactggaagtcttaccaataacatgaacagttggttaaaacatattttgtaggttgtatgtattatatactgtattcttacagtaaagtatgctagagaaagggaaacgttattaagaaaaccataaagaagagaaaatatatttactattcattaagtggaagtgaatcatcataaaggtcttcatccccatcttcatgttgagaaggctgaaaaggaggagcaagatgaggggttcgtcttgctgtctcaggggtggcagagacagaagaaaatctgtgtataagtagacccatgtagttcaaatctgtattgttcaagggtccactatatgaacaaggagcaagagatgacccaaatgacaagcgaatgtgacaaagaaacaattagaaattctagaaagaacaacaatataatcaaaacgaagaactcaatggataaacttaacagcaaattagacccagcaaataaactattcagagaacagtagaagggaaaaggtagactgaaaataagaaacagaaattaaaagacatagcagagagagaagatctaactttatgtggcctcagggattggtccatatctttcgcagtccttgtctcttactggacatgattcactcaggctttcttcttactagttgctctctggatgcaattggccagtttaggttctcacacttccctaacatgccgagggctacaatatctctccactggccaaaaaaacctttggttttttcccacatatcaatctcataaatatttttatttatctcccacttccactcatgtgagcaaaaatcagggagtcaggcaaataaattttcatttgctctgttaattggaacaactattgactaaatctacccattaagtgagtgaatgctgattatgtttatctagaacagcaagcaaggacatcctaaattaaatgctcattcacagcatcctgctctcccagtttcgtttctaccccaacctttgttaatataggggctgtgctgctatcaggatccacagaatccttcgagattagatagccctcacaatgcagaaatgcattcatttcttttatttttaaaagggcttctctgttaacaaatataatgcatattcactgtggaaaactaagaaaatactaatatgcaccaaggaggcaataaaaatgaatggtagtcctgcctcccagacataacaattactactattttgttgtatatttttcaaatttttctctaagcatacaggtgcatgtaatatactccttttttttttttaacaaagatgtcatatctttcagtaacttgttttttccattgtatatcttatggttatcttttatatcaactgtctactataaatcatttttaatagctgcattctatttcatccactgttccatacatgccaatggcccttttctgcaagaacctgctacttcctgctttctctgttggcaagtgtgtgcttagcccttcaggacaggcaggaaaagtaaacccttgggaacaaatttcaatgaacgaccaaataggatttgacagataagtactccagcttccctgcccctctggtgcaacaaccctgaggtaggttctaaacattttctcagaggtctcccacagcaataacctgctcatgaatgcttcttgtattggcttctacctttcttgatctcacctcctaatggttcatgggatcaccctcatataaactactttctccaggtgtgcctctagggaaatccaaactaagatggtatttaagtaggcccttgcaattatagcttattttccttaacattcatatattttttaattaattaattaattttttgagacaggattttgctctgttgcccaggctagagtgcagtggtgcgatatcagctcactgcaacctccacctcccggactcaggtgatcctcttgcctcagccccctgggactacagtttgcaccaccacacccggctaatttttacatttttagtagaaatggggtttcaccatgttgcccaggctggtcttgaactcccaggctcaagggatccacccaccctggcctcccaaagggctgggattacaggtgtgagccaccatacctagcataacatccatattttttatttgattgctctgacatctaggcagccctatcaattttcatttgggtgtcactagagtagttctaaagtcactgtacaaagtaaaactccacatgatcaaaattatccttaagaattacttcaggatttcagttctatgtttttcagcttaagaaaaatcctcttgaagagctggcaagatggtggaataggaatagctctggtctgtagctcccagcaagaccagtgcggaaggtgggtgagttctgcattcccaactgaggtacccagttaatctcactgggacttgttagacagtgggtgcagcccatgttgggcaagcagaagcagggtagggcattgtctcacctgggaagtgcaaggggccagggaactccttcccctagccaagtgaagctgtgagggactgtgccatgagggattgtgctatccggcccaggtactatgcttttcccatggtttttgcaacccacagactgggagatccccttgggtgccttgccaccagggccctgagtttcacgcacaaaactgggcagctgtttgggcagacactgagctagctgcaagagttttgttttgtttttggtgcctcagtggcacctggaaccccagtgagacagcatcattcactcccctggtaagggggctgaagcgagggagccaagtggtcttgctcagcgggtcccactaccatggagcccggcaagctaagaacaactggtttgaaattctggctgccagcacagcagtttgaagtcgacctgggaagcttgagcttggtggggggaggggcacccaccattactgaggcttgagtaggcagttttcccctcacagtgttaattctgactgtgcagatctcaccacagtgcagcaaggcacctggggccgaactgcctctctagattcctcctctctgggcagggcatctctggaagaaaggcagtagccctagccaggggcttatagataaaactcccacctccctgggacagaacatctgggggaaggggtggctgtgggagcagcttcagcagacttaaacattcctgcctactatggatctcctgcacagggcttgagctctgctaagggacagactgcctcctcaagtgggtccctgatccccatgcctcctgattaggagacacctccctgcaggggtcgacagacacctcatataggagagttccaactggcattaggcgggtgcccctctgggacgaagcttccagaggaagaaacaggcagcaatctttgctgttctgcagcctccactggtgatatctaggcaaacagggtctggagtggacctccagcaaactccagcagacctgcagaagagaggcctgttagatgtaaaactaacaaaaagaaagcaataacatcaacatcaacaaaaaggactcccacagaaaaaccccatccaaaggtcatcagcatcaaagatcaagggtagataaatctatgaagatgaggaaaaaccaatgcaaaaatgctgaaaattccaaaagccagaatacctcttctcctccatatgattggaactcctctccagcaagggcacaaaactggacagagaatgagtttgacaaattgacagaagtaggcttcagaaggtgggtaataacaaactcctctgagctaaaggagcatgttctaacccaatgcaaggaagctaagaaccttgataaaaggttacaggaattgctaactagaataaccagtttagagaaaaacgtaatgacctgatggagctgaaaaacacagcatgagaacttcgtgaagcatacacaactatcaatagccaaaccaacaaacagaagaaaggatatcagagattgaagatcgacttaatgaaataaggcatgaagacaagagtagaaaaaaaaaaaatgaaaagggatgaacaaagcctccaagagatatgagactatgtaaatagaccaaacctacctttgattggtgtacgtgaaagtgacaggaagaatggaaccaagttggaaaacacacttcaggatgtcatccaggagaactttcccaacgcagcaagacaggccaacattcaaattcaagaaatacagagaacaccactaagatactccttgagaagagcaaccccaagacaaataatcttcagattctccaaggttgaaatgaaggacaaaatgttaagggcagacagagagaaaggtcaggttacctccaaagggaacccatcagactcacagcagatttctcagcagaaaccccacaagctagaagagagtgggggccaatttgcaacattcgtaaagaaaagaattttcaacacagaatttcatatccagccaaactaagcttcataaagtgaaggagaaataaaatcctttacagataagcaaatgctgagatattgtgttaccaccaggcctgccttacaagagctcctgaaagaaccactaaatatggaaaggaaaaactggtaccagccactgcaaaaacataccaaaatatgaagaccaacaacactgtgaagaaactgcatcaactaatgtacaaaataaccagctagcattatgatgacagaatcaaattcatacataacaatattaacctcgaatgtaagtggactaaatgccccaattaaaagacacagactggaaaattggataaagagtcaagacccactggtgtgctgtattcaggagacccatctcatgtgcaaagacacatataagttcaaaataaaaggatggaggaatatttaccaagcaaatggaaagaaaaaaaaagcaggggttgcaatactagtctctgacaaaacagactttaaaccaacaaagatcaaaaaagacaaagaaggacattacataatggtaaagggatcaatgcaacaagaagagctaactatcctaaatatatatgcatccaatacaggagcacacagattcattaagcacgttcttagagaccaacaaaggtacttggactctcacacaataatagtggaagactttaacaccccactgtcaatattagacagaccaatgagacagaaaattaacaaggacattcaggacttgaactcagctctgaaccaagtagacctaatagatgtctataggactctccaccccaaatcaacataatatacattattctcagcatgacatagcacttattctaaaatcgaccatataattggaagtaaaacactcttcagcaaatgcaaaagaatggaaatcataacaaacagtctctcagaccacagtgcaatcaaattacaactcaggattaagaaactcactcaaaactctacaactacacagaaactgaacaagctgctcctgaatgacttctgggtaaataatgaaattaaggcagaaatcaagaagttctttgaaaccaatgagaacaaagacacaatgtaccagaatctctgggacacagctaaagccgtgtagagggaaatttatagcactaaatgcccacatcagtaagtgagaaaaacctaaaattgacaccctaacatcacaattaaaagaactacagaagcaagagcaaacatattcaaaagctagcagaagacaagaaatagttaagatcagagcagaactgaaggagatagagacatgaaaaacccttcaaaaaaatcaatgaatccaggagctgtttttttttaaagattaacaaaatagataaactgccagccagattaataaagaagaaaagagagaagattcaaatagacacaataaaaaatgataaaggggatatcatcactggtcccacagaaatacaaactaccatcacagaatactataaacacctctacacaaataaaccagaaaatctaggagaaatggataaattcctgaacacatacaccctcccaagactaaaccaggaagaagttcaatccctcaacagaccagtaacaagttctgaaattgagacagtaattaatagcctaccaaccaaaaaaaagcccaggaccaaatggattcacaaccgaattctaccagaggtacgaagaggagctgttaccattccttctgaaactattccaaacaatagaaaaagaaggaatcctccctaactcattttatgaggccagaattatcctggtaccaaaacctgacagagataaaaaaattaaaaaaaaaaaaaaagaaaatttcagtccaatatccctgatgaacatagatgtgaaaatcctcaataaaatattggcaaactgaatccagcagcacatcaaaaagcttatccatcaacgtcaagtcagcttcatccctgggatgcaaggttggttcaatatatgcaaatcgagaaacataatccatcatataaacagaaacaatgacaaaaaccacatgattatctcaatagatgcggaaaaggactttgataaaattcaacactccttcatggtaaaaacactcaataaactaggtactgatggaacatatctcaaaataataagagctatttatgtcaaagccatagccaatatcatactgaatggccaagagctggaagtattccctttgaaaaccagcacaagacaaggatgccctctttcaccactcctactcaacatagtattgaaagttctggccagggcaatcaggcaagagaaagaaataaagcgtatttaattaggaaaagaggaagtcaaattgtctctgtttgctgatgacatgattgtttatttagaaaaccccattgtcttagcccaaaaactccttaagctgatcagcaacttcagcaaagtcctgggatacaaaatcaatgtgtaaaaatcacaagcattcctatacaacaatggacaaacagagagccaaattatgagtgaactcgcattcacaattgctacatagagaataaaatacctaggactgcaacttacaagggatgtgaaggacctcttcaagaagaactacaaaccactgctcatggaaatgagacaggatacacaaacaaatggaaaaacattccatgctcatggatgggaagaatcgatattgcgaaaatggccatactgcccaaagtaatttatagattcaatgctattcccatcaagctactattgactttcttcacagaactagaaaaaatgactttaaatttcatatggaaccaaacaagagcccatataggcaagacaatcctaagcaaaaagaacaaagctagaggcattacactacgtgacttcaaactatactacaaggctacagtaaacagaacagcaggatactggtaccaaaacaggtatatagaccaatggaacaaaatagaggctgcagaaataacaccacacatctacaatcatctgatctttgacaaacctgacaaaaacaagcagtcaggaaaggattccctatttaataaatggtgcttggaaggccagctagccatatgcagaaaactgaaactggaccccttccttacaccttatataaaaattaactcaagatgcattaaagacttaaatgtaaaacctaaaaccataaaaaccctagaagaaaacataggcaataccattcaggacatgggcatgggcaagacttcatgattaaaacagcaaaagcaattgcaacaaaagccaaaattgacaaatgggatctaattaaactgaagagctgtacagcaaaagaaactatcatcaaagtgaacagggaacctatagaatgggagaaaatttttgcaatctatctatctgacaaaggtctaatatccaggatctacaaggaacttaaacaaatttacaagaaaaaacaaacaaccccatcataaagtgggtgaaggatatgaacagacatttcccaaaagaagacatttatgtggccaacaaacatataaaaaaagctcaccatctctggtcattagagaaatgcaaatcaaaaccccaatgagataccatctcacaccagttagaatggtgatcattaaaaaatcaggaagcaacagatgctggcaaggatgtggagaaataggaatgcttttacactgttggtgggagtgtaaattagttcaaccagtgtggaagacagtgtggtgattactcaaggatcaagaaccagaaatactatttgacccagcaatcacattactgggtatatacccaaaggattataaatcattccactgtaaagacacatgcacacatatgtttattgcagcactattcacaatagcaaagacttggaaccaacccaaatgtccatcagtgatagactggataaagaaaatgtggcacatatataccatggcatactatgcagccataaaaaaggatgagttcatgtcctttgcagggacatggatgaagctggaagccatcattctcagcaaactaacacaggaacagaaaaccaaacactgcatattctcactcataagtgggggttgaacaatgagaacacatggacacagggaggggaacatcacataccagggcctgttgggggatagggggcaaggggagagagagcataaggacaaatacctattgcatgtgggcttaaaacctagatgacaggttgatgggtgcagcgaaacaccatggcccatgtatacctatgtaacaaacctgcacgttctgcacatgtatccgagaacttaaagtttaattaaaaaaaaaaaagaaaactcatctttcagatcttgatgctaggttgaatgtggccacgttctatgccatgatgcggcatggttgggtgagcaggtgatgggggcggtgcgtatgtaactccaccagcaggtctcctctctaggctccatctacctaattgggcatcaactcaccatctctccatgagtccaacacacctaggttcctcttggaccagattgttgcttcatagggaagacaccaaaggcggtaattgtgcttgtgtgtagtgaaaatggggtataaagatacaaacatttagcttttagcttcatgtacaagtgaggggagctgcttatttcttattccccagagagatgggggcctgagacagtgagggcagattgagggactccatttcctgttcatgctggtgcacatgctcactgagtgtattggcaagctagcagcccatactatttcagaagattcttctctttctcatttggctaaattttacctgttgaactttagtatattaaatatgtctaagctgtaatttcaccatactcaatttatctgagttccattttctttgaataatgaaaataataatttctattcatctcatggataaagttttaggagattaagataacataaaatgtgaaagtctttagtgaaatacaaagttctatataaaggtaatggtttattttttattatttttagaagactgaatggattgttgtggggtgtggcttaagttactgttatctgtgggtgatgatgaaattctcagagcacgtccccatactaccctgcagcctgggaggctctattgatcaaacactggttcctagttcatgttcacactgtgtgttccaggccttgggtaggaaggagcctcatgtgggaactctggccttggagttaggagacctttgctagtaatcaccaaccaaactggcaagcaccaaattctcttgactttgctttcatcatttgtagaacaaaccaatttgattttacaggatgatctctagggtccttaaaacttcaagttcatgagtcaaaacaaatgtttcccaaagtatggtgtagaggaaagtcagcttcattagaattatctgaagagcttgttaaaaatgcagatgagattccttcttggatctcatcctggatttaatgattcagagtcgccttgtttgcagtcccagtatctgcattttaattaagtatgggaaaaggcattttaagtcctatattttttacttcagttttggctataaaatgtaattgaggctagtcttaatgaacaacttaattggaaagcttgaaaggaatgtgaacattcttgacactggttctttagaaagcaaaaccacagatagccattatcttgttagatggatatggaaaatacgagtgatttcttacattcctgttaccataaaagtatacttattctgggctgggcgcagtggctcacgcctgtaatcccagcactttgggaggccaaggtgggtggatcacgaggtcaggagatcgagaacatcctggctaacacggtgaaaccccatctctactaaaagtacaaaaaaaaaaaaaaaaattagccgggtgtggtagcgggcgcctgtagttccagctactcgggaggctgaggcaggagaatggcgtgaacctgggaggcggagcttgcagtgagccgagatcgcgccactgcactccagcctgggtgacagagcaaaactctgtatcaaaaaaaaaaaaaaaaaggatacttattctataatatatggtgtcatcataaaatggatcttattttgcccaaaacttttacttaaaagggctaatagtctttctttaataatgaaatgtttgtttcaataggttcaaaggctgttgccttatcaccttggagctgtaagttggaaaaatacaacttatccaaactgaaaatataccccaaaagaatgaaaaacccccatttgccaagaaaatacatggccctgttctttctattttgtgcctccgtctaagtgaatcactgcctttcttctcatcaattgatctccagggataatctgtgttctctcctcacaaatgaaccttacaaaaacttttgttcatctctcatgttttctctcacttattgcatggagatgggaagatgaattttcacttgctctgttatttggaaaaactctatgtgaatcctgttggtcaccagtgttgcactgactagcactgctttttcttttcatcactatgaagtgggtgaaatttgatcacgtttgtctagaatatcaagcgagtgcatcacaaaggaagtgcaacacgggcccagatctgtttttccatcaatctccaatcatctccaagtctctctctccatccttgacctttcagttaggtttaatttccctactttgaactgcctactgtaccacctttgtgggggaaaacagtgtttgttcacctaagctatagactatgtacgtcataggcagttgaattttacccagtgacattaggataattaactcaccatctctgtctgtattgaccaaattatgtaacctcatttgtgtagcttgttgtagcttggcttcacataatatttggaaagcctcaagatccttgttaaattattaaatttgatgataataaaaattaaaaatacacattaaatatagttattgtaattgatgcattaattcaaccaacatttatttcatcttgatctaatctaagttctacagtaagtgttggtgatacaagactaactttattctgattcttagtatgtaaaagttatattaagactttttttacacttttctgggaaaaaggagaagtactgcaaaaaattaagaaggagtaaattaaggcaaattaatagactgaggaaggtactaatactaatgcatcagtgaaaattaagaaacccttcaatttcaggcatccaacataatttgcattcttcttctcatatccaaggacatctacttgggcaggtgagtacaaggaaaaaaatcagatgtgcatcatttctaaagaaattccattaatggctttggggagaagattaacagaaaacaatgagagtatttgccaaacatctgtagaaagtagtgtacgtttttggaaatgaactgcaaatcatatacgcttcagggtactacgctcatttatctaactgcttactccatatctttacctgtttaatagctcactaacacttagaatactaaaagtggaattcttgatctcctccctctccaaatatgctcctttcatagtcttctccttctcagtgagtgacatcaccatttacccagttgttaggccagagccccttacatctatcccttacacaagattagaaaccttccaaatctgatcactcctcgccctgcccattgcttctacccatatccaagtcagcatcacatcttgctgaaatacaacctcttaattacttctattcttgcttttccttcattctattctctctctatacaacattcaaagttctcctttaaaacggtgtatagattatatacactctatttaaaacttttagtgatttctggttataattaaaatgctgtacaatggaaatctattcccacagccaacgtggggcagtgcataacctcattactcttcacccctcacactccactccctatgattctccctctcacccagtctgcaccagctacactggcctccttcctggtcctggaacactccaagcttattcttgatcgaaggctgctgcatttgcttttctcttagcctggaatgccctcctcccagatctttgctggctgactcttcttgttatttagactgactttctcctcggctgccctctctgtaatagcgatcaaccagtcactttccttcccaccacccctctcaattttccctttagtgtttgtctctctttgaaattattctttccattgatttgcttgtttattttctgtcttccgcaaatagaatgtgggcttcataagagttgtgattttctctgtgttgttctctaccacaccctaaaaagggcatgaagtgggttctcaatacatatgtattgactgaatctcagcatattaataagacaaaaatgtattggttttggggtaatgcataaaatcatgtaaataaagggtttccctattattgcattgtaataataaaccaaattatgtagtttaattttatttttacatagcctaagcatacatgagaaatactttgaaaagtataagagaaaatgtgtaaagaaaaaatattttaaatgcatattttctgtttctacatttttaataattaaatttaaacttagacaatcattctctggatcactcatctataaaataggtgattaatgtagaaaattacctcatggattttttctggcaaagcagtaatttactgatccactattataaacctttctgttctcttcagagggctataagtcatcaaatcaaaactactacagaaatccaataatattggaagcattggttgaatattaagaatattctggtttattgaagggggtgtagagaagcacaaatatcaaataaacctttgatattcagttgtgctgtaggttatgtagaccagcgttatgtttaccaaaaagacaatctcaacatcaaggaaagtatataattcagtggttagacatctatcaacaattttaagaattggcaagtccttaattttagcaagtgacattttgctccacatgtcatgattttataaatgtgtaatactattaaatgacctcatatttggaactcaggtgatataccaaagaaaattaggactccaattattcctatctttgtgatgttgagttcttttatggcagtaatttttccataaggaagttgagaggcatgggggagaaaaacaaccaaccaaccaaccaaaatcagctgtcatctttccttgaggacaaaatatgcacaatgaccataatttaaggtaaacagtacatacctgtgttagtctgttttaacactgctataaagaagtatcagagactggataatttataaaggaaagaggtttaattgattcatagctctgcatggctgaggaggcctcaggaaacttacaatcacggtggaaggtgaaggagaagcaagtacctttgtcacaaggtggcaggaaagacagagaatgcaggggaaactgtcacttttaaaattatcaggtcccatgagaactccctatcacaagaacaacatgagggaaccatccccatgatccactcacctcccaccaggtctctcccttgccacatgggtattttgattaggaataagatttgggtgtggagacagagccaaaccatatcaaccaccatgcgtatgtaagagatggggacctttatgtcctgatctcttgcatgcacagagccttggttacgtccttcttggcctgaagtggctccttagggcactcctgtacttccttggtcttaaccctgggggcctatctggtcagccaggggcttcttgcaggccttctctgccttcagcttgtggatgtgttccaggagaatctgtttgattctcattcacctaaaagggcaccaagtcctgaggctgggtgtggtggctcatgcctgggtgcgtgacacccagcactttgggtggctgaggtaggaggatcacttgagcccaggagttcaagaccagccttggcaagatatggagaacacatctctacacaaaataaaaaaaaattagcagggcatggtggcttgtacctgttgtctcagctactcaagaggccgaggtgggagaacagcttaaagcctgggagtttgaggctgcagtgacctgtgatcatgccactgaactccagcctgggtgacagagtgaggccttgtctcaaaaataaataaataaaacagaacaaaataaataaaaattcaaatggaaagagagacttaggggtgatttcagagtaattgagatatcagatatgggttgctagggtttcagattcactcataacaattttccaagttgctccattgaaattctactcacctccttcgatggaagcccactgcatatccatcctcttttgctccttgtaaaggccaattctgagaccttcactttgaagtgcatgcaaagctctaagctgctaagtaatcaatgaaaaagaaagctcttcaaatgagtagacatgcaacactttttcattttgatgtgctacttcttgtgactgccatcattgcaactctctgaagcgggcagagcaaagcaaaagcacaagcacctggaactagcacaaaagcacatctttttttgcagcaaacaggccacttggcttgaaccaatatgtgcatccaaagagacaaaatacagaattaaaatcatagtatcaagaacatcaaagggacctagacagcatctagctaatgcccattattttatgctgaaaggaactgagacctagagagggtatataacttgcttaaggtcacagagctagtcaatgcatacacaggactacaatactcagtaggtttctctcaggacagtggttccaattacaccaggctttctgttattttgtaacaaaaaaaaagtgggtatatacccacgaattaggaaatcacaagcaaaatgcttacacttagttttaaggcattaattatattattaaaatgaaaaccaatgtttcagttgtataagccatttacagaatcatctctatcagggagagaaatgaaggccccagggttttagcaaaagcttatagattttgttattttgttatttcagagtaaaatgggatttgccaagcactaacagtgaaaagagccttaagaagatatatattccttttgcctctaaagatggactgacacctcatgtacttgatcagatatgggttgctctttctgcaggctccttcattgttctggccagaactgaggaaaatgggcacttctccgaagactgggtatttcagttcaaattgagggtttttttaaaagtagtttgatagttcaatttgagaaactggatgaaacttttggaaaagacaagctttctattaaagtgcccagtgctgtttacttctgctggaaggcatgagccacagctgtagcacttggagtggtggataacttttccacctcattcctgcctgctggtggaagtggctcaagagccttagggctctttaaccctgtaagcaacattttctgggcaaatctgttattttgtcttcagtgactcaagattgagttttgtgttttttaaaaaattggattcctgtcagtatgaccctgaaatctttgagtattattcaactttcggtcccctttaagaagagagcattaaacaaaacagaaatcttaacatctccatatcattccctaattgcatttattaacagccttagaaatattttgttggagtttaggtgagtgattcatgttctgagtcttttttatcctccccaaaacatttctatatttaaatattttcaaatgcataccatccttaaagagggcaagtacaatagacaataatgttttaaaaagtaacaggtttagtccaggtgctgtggctcatgcctataattccatcactttgggagactgaggggaggggatcacttgagcccaggagttggagagcagcctgggcaacatagtgggactccatctctaaaacaattttttttttttaattagccacttgtggtggtgtgtgcctgtagtctgtgctactagggagactgaagcaggaaaattgcttgagcctgggaatttgaggctgcagtgagctgtgaccatgccactgcactccagcctgggtaacagagtgagaacctgtctcaaaaaaagtaataggtttattaaagtaaaaattcccgtttttaggtgtgcaattcagggttttcagagtattcacagagttatgcattcatcatcatcatctaatttcacaacactttcatcactccaaaaacaaacctcatattcattaccagtcactcccaattccttcctctctccagccgctggtaaccacaaatctactttctgtcttcatatatttgcctattttgaacatttcatataactggaatcatgtaatagtggtcttctgtttctgacttagcgttttcaaggttcatccatgttgtagcatgtatcagaacttcattcctttttatagctgtataatattctgctgtatggatatgccacatcttgtttatccattcattcatcagttaatggacatttgggttgcttctaccttttgactattgtgataacactgctacaaatactcatgtccaagattttgtgttgacatattttttcaattcttccaggtatatacctaggagtggattgctttttaatggtactagtcatttttggcacaaatggctctcactgtaaccagaagttggttctaaaatggacatatgtccttttattttcttatgagtgagatccatttgctagaaaattattgctatgaagtttagttcttctgtatcaaatcaagattagttttataatggacacaaatgtaggtcaaacaatatgtgaaaactactcgtgtgttgtttcctatgagcaaagaagctggggaaaaaaatctaattaggtcaacaagtcaggaatgactaaaatatcaattactggataccatttctttatcaaacctttcctagttgaatacctagctacctttcttgccggtctccttttgcattgcaggggccggccggcatagaatgtaaacaaatagcatggtcagtaataatacacatgcaaggggcccttttaaattactcaagtgccaggctcttcacatggttgggtaatattattcctattttataaaagaggaaaccgaggcccagagatgttatttaacccaaagttgcacaatgggtgcacgatagggctagggttcaaatcccaaaacagtaaaatgtgtagttaggagcaagggcttggagtcatatagacctgagttttcttcctggctctgtactagctgagatcttaggcatgtttctcagacttgctaagattcgatttccctacctgtgaaatggaaaagataatatttaatgcagagagaggattgtagggtccagccctacggggcttagtgggtgttctctccgtgtgcggagacgagagattgtaataaataaagacacaaaacaaagaaataaagagaaggcagctgggcctgggggaccactaccatcaagatgcagagaccagtagtggccccgaaaggctgggtgcactgatatttattgcatacaagacaaggggggcagggtaaggagggtgaatcttctaagtgatcgataaggtgaagcaagtcacgtgatcataggacagtggccccttccctttcaggagccgaagccgaagcagagagagaaggcagcatatgtcagcattttcttctatgcacttataagaaagatcacagactttaagactttcactatttcttctaccgttatctactacgaacttcaaagaggaaccaggagtacgggaggaacatgaaagtggacaaggagcatgaccactgaagcacagcaccacagggaggggtttaggcctccggatgactgcgggtggacctggataatatccagaagctggtggagcagagtgttccctgactcctccaaggaaaggagactccctttcgcggtctgctaagtaatggatgtcttccaagacagtggcattaccacttgaccaaggagccctcaaggggcccttatgcgggcgtgacagagggctcacctcttgccttgtaggtcacttctcacaacgtcccttcagcacctgaccctatacccgccggttattcctaggttatattagtaatgcaacaaagagtaatattaaaagctaatgattaaataatgtttataataatgattgataattgtccatgatcatctctatatctaatttgtattatgactattcttattctaactattttctttatttactgaaacagtttgtgtcttcagtctcttgccttgacacctaggtaatcttttgcccacagaggattaagagacaaggtacataagagtgaagcatgtgcctacaatatttgctgagtgaataagtctaggagtgtctcactccaaatgctatgccctaacactgtgtcacaccactttggcttactcaccagcataataaagccacaagaagctctgattcaggaaaacatggcagggctgcgacatagattcagaagctctggttacaataaaaactacagtgggtgcagcttggttttctctttcttaccaaggacctctgaggctgctagagaactgtagttgtgggtaaaaataatttgagacaacaccctggttttcttcttctcactgatgttgaagcagcggtggggaccagcactggaggcaccccttactattgtgtatccactgaccatgctcaggtcattcaggtcaccgagagagaagtcaagcattatggcatcccaaccagataatttcttcatacctagctggagtctgggttctgaactcatatttcctttgtatcctgatgagctgggctgtaaggttcccagctaaaacatttttatttgctaaatctggtgactctagctggaaggcacagtctagaattgggcctgagagtcccttttccttttctatcctttaaccataaagtgagtaccagagctccctacttcatttcctcttggtcttccaatggcttctcgcatgcagaatcaaggcctttgctaaagcagaggtgctgtccctcactgccagcctagttaaatgggacacccacttgcttttagctgatgtccttgcctcatacttcattgagaaagcaggggcaatcagagggaaactccatgaactttacccaccaaatctcctgactctcttgcactttgcctgttagttctgcctttaatgggtagccaaggctgagactcacccattagaaaggaagctacatgaagtcagggattgggtcagtttttaagatgttttctctcaagagtatagactagagccttgaatattatagctgctttataaatacttgggaaaaattaatttcggttaaatgattttagttagagagagaagcaggggcaaggaaagaagtctgatatcctcttaaatctagaatgggatgttattataagtttttttggtgtcgtgccatttccctctactttgtgagtctgtgatgtttgccatgaggagcttggtgtggggtagggttatatgttggccgacaggtatttagagaagagtttagaagatggagcagtctttagcttcacggtgcctgcctatatagaaagttgattaccagattcttatttttgtatttcattcgctaatttcttaggcaaagaattttaatttgtatattttgtacatttgctataagatgattttattatcatttactactcttttttagtaccaaaagcttaggcaacatatgaaagtaaaagctatcactctcttctgtcagcctttagggtttatttcttctaagtacttattaccccctttttaacaggagtcaagcattctggagggaaccctgggcagaaggcaaagggcacccagcattaggtctgcctaccctgcctcatttttttcctcactcctaaagatgactcagtggctctgactgggccttgggctcatcttctcagttctgtccagttcaatacatatttgctgggccttgagcttcatcctctcagttctgtccagttaaatacatatttgctggtagatgttaggaatctattattcattaggtacagggctagaccctggggacagaaaaatgatccttgtcctttagatggtcttgtcctagtagatgagggttcttgtaagcaagaacatttcaataaatgttggtcagtgctcagatagatgttaacatgacaggcccactcctaacattttcagggcctagggcaaagatgaagcccatatgtcatatatatctagagatttggcattgataaatcaggctagcagaccattgctaaataagatatgttatatcctcctgctttgataaagatacctgttcaggcaaatatgaatttagaattatggaaccccttggagttctacacagaaacatagcagtgaagggaaaaccagttgctgacctgtagcctgacttcctctctttccttttctggctgcttccgcactgtaaggggcctcacaagcacacctgtggatactccaacctgaatattcagaatgcatccacatggacacaaacaggtggctttggctactcctcagcctaggcgtgcataccctgaggctttggaagtgaattctgagccatttggacagaaaattctgggtccagggaacctacagcataatctgaaagggataggtagagccctgggggggcattttacttggccctgagaattctccatgaagtggaggatcatggccctgcatagttcagagcccagggaagaggtttcccggactgggtcataggacagcagtcagcactgatattcagcatgaggatcactgggtgtgtagagttggacgcttaaacccctctcccccaacaaaaagggatcagaaagatttcaagacttctgagaggaaataatatctgagctaaaatttggaaggggaggctagacagttaagcaaaggcagagagtccattgtaaggtgagagatcagcaggggcacatttgctgagagatgacatgccatcgtgtgtgtgaagaactacacgcaaattcctcattaccagagtggaaataggtaggagctgatgcctaaatggtgggtggggtcttggtatcgaggaaattgtctgcctttctaaaaggcctggatttaatctgtaggtgatagagaactcttacatacctccacttatgcacccatttttggctaatagtgtgatcttcttaggtcctttaagtccaaaagcatcgtccactgcagagtttgtgatctaggctgtaattctggctggaaagcactaaggagctatcctgctgactttcagagccctggaaacaactctctgctgctccctcttggcagctagaatttcactctttggtgtttcagggaccattttgcaacaagttgtgcttttattatatttgttattcttctctttcttttcaagacagtttctggcaccatccatccatttattcatcatcatttcaggtgtttaacagtgctcatgtgctcatgtgtttgcagttattgagcttctttaagatgtttattttgagttatttttcagacagttcatggatctctgtttctttagagttgaatagagatttattagtttcccttggtggtgtcatgtttatctaattcttcttgatccttgtggacttgcattggtgttggtgcttttgaaggaggagccatctcttttaatctttacaggctgattttagcagtaaaagaccttcccttgtcaggtctcaaacaaactgcctctgagactgtggttgagtggggctagagctggatcataaagctgctctcggtctgcatttgagtctgtggttgttgggccctaccactgggagcgtgaatgggcatggctcctgctgcttccacacacggacagggctggtggcaggactgtggaccagtagggctggagccccaaccacaggggatggggctgcttcctgttctgcagctggctctgtggtcagtaagcctactaacaaggcacaggcctgtcttctttaagtggcttttctcagttttgggctccactggtgtgtggaaacttcctatctggattctgaagctcccttaaaggcacttttgtctgtggatagttgccagatccatgtttctattggagatgaggactgtagatgttctgttccgccatcttgctcatatcactcctctggaattttttttttccaggtacagaaagtatcgtggataacagtttggggctcaatttaagctgctgaccaagttgttaattgctttgtgaggaggcagcatgacgcagctctaggtttctcaaatttcagacattctgatgctgccttttaaatttttgccatggcaccatatagaaacttatctgcaaaccaattgtattattattggtaatattttatgttttcctttaaattgaacatttaagaaacttcaatacatttaattttaaagatattttgtatcatgcccttaaaaactgttttattcacaccaaattcacattaaattaacacagaaaatgtctatctttgtacaccaaaaattatcacatgtactgccagggggtatccatagcacatttttgggaaaaactaataacgtagaaaaagcactgattttggagttatcaacatttggtttagaatctcaggtctcctatgaaggtaagttatttctccaagacttacgttctttatctgtaaattgcagatccttgacttctaggagaggacagtgagaggatgaacagaacacaatgaccacagggtcgggcagagtgaaggcactccatagattcttcttccatttactattcgcctttataacaggctcaatcatctgtttttggcaattactaaagtgtattttcattgaggtacaatttatatgcagtgaaatgcacagatattaagcgtacagagcaacattatttttttaactcatggttctatgtttactgtttgaaccagtgtctgaaatacctggactctggtatcggatttggtattcactaaatgtttgattttagaaatgtcacaacttctgtgaatctctattcatataaagaattctgtgtgaatctgggttaaaaggactgaatgtttacaattgtgaaagactgcccaagattattgttagtaatactctttctgttattcttaatgttaatgtgaagacttggattttcaaacttggacaaatctataggttcttcttcataccttgcatgggcatacacagcaaccctgatcagtataaaccacttagcaagccccaacttgcagttcaaaatcagcagctcattggaggcaagttcagaagcatgaaacaatcactcaaggcttgcttagtccgtatttctgtctcaaactgtgagaaattggcaatttccctctttggagggtgtttccacagctggatcttgatcaatcagaagcaggaatcaggaattctgataaatgaaaccatgcttagacatcacgtattaatatccatccatcattaattcattcaccaattttttgtgtgtgttctatgaacctagtcagtctggcaacacctctgccaaaaccctccctaagcacagcagtccttactgacctctcttctctgactcctatattcatgagcttgctgagtctctaccccgtcacaatagacttttccccagtgacccatactcttcatgagggcagcgtgcaccgctggggaaacatcatgtctttgttactgtcttgtgtgaagcatatcttatttccataaatttgactccttaatggtcatatggaactgtgatcaattcagtggatgtttataagaaaaattcccatttaatgcaagaaggaactttccaacagccagaaatgagtaccaacatgatggcggccccaagagagtgagtactctcgaatgggtacgtttaagcaaaagctacatcgtcatctgacagtggtgatgtaaatcggaaactgaaaagttcagaagggctcaagaatcaagatctgcaagcctagttgagtgcagtggttcatgactgtggtcccaggtactcaggaggctgaggtgggaggatcacgtgagcccaagagtttgaggccacagtgagctatgatcatgctattgcactccagcctgggcaacagagcaagaatctgttttgagaaaaataaaaattaaaaaagttaaaattagagttctacaagtctaaatagtgagtacgctgtagtaaaactagccttctctgctgaaatactaataaagcagagttaattagtgttgtgttagttatttactttaaatactttaatataaagagtgggaaattaaggctatcattattagttaggttaagccacagcccagatagtcctatttttccaattgggccagctagcattccaataaggaagtctatattgagaggcaacttttacagacacttccatgaccagggaacttgtgaagaccatgaaccctggaatcggactgcctcaattcaaatcctggctctgctatttactagttaaaacatctcagtaacttaacttatctgcatgccagttcctgcatctgtagaatggggataatattagtgcctactttataggctgctatgaggtttaaatgtgttaatatgtgcagtgtttagattagtatctgccacatagtagatgttatacaagtgtttgttaaacaaacaatgtcaacttacatgtgacactttgcttaaaaacacaccaaatataagaaatgagttcttattggtgaaattcaaggtattcaaatgaataaattggttaacataactttgaaacactcctcactcttctacctttacatcaacaaaatataagaatctaatgaggccagtagggatgacatccaagatttaatcctcccctgggtccagcaattgggtcagaggattctggttcctgatgtcaactgaaggaaacagaatccatcctctagaatattatcattttttctcaattaagcatttgatgtatgctggtaatcggaacactaaaagcacagagaatcggagttcgtggagtttgcaagcagattgtatgaacacttgtgtgcctgcttgctaataaatacttgtttagtaagcatatccatggctggtgcagtggctcacgcttgtaattgtagcactttgggaggcctcggcaggtggatcacctgagctcaggagctcaagaccagcctgggcaactaaaatacatctctactgaaaatacaaaaattagctgggcatggtagtgcatgcctgtagtcccagctacttgggaggctgaggcatgagaattgcttgagcctgggaggcggaggttgcagtgagccaagatttcatcacctcactccagcctgggagcagagggagactccatctcaaacaaacaaacaaacaaacaaacaaacaaaaagcatgtaacagaatttggtcagagacttgcttttattatagtccagtagagagattgtagggggagaaggtaactctcacacacatcacatttttagagattagggttacctataaaaattacctattttaagaattgtgcatgttcaaattgaattaggttcagttcacaacaaaagggaaatagcctaggatatactaaggaggagtagttcagtatgatccactgaattcagtaattcagagggatccaaaggattgccagcagacagagtaaaatgtgagataagcctctgggaatggatgaaatgtaattaacagtagtagggaaggtaagaagcaaagtatgagattgactgagatcctgtgttcatgagtagttgaagaagaaaggttggataagaagggtaatgtcaaaatggggaaagattagagggtagtccagtttttattttcttttttggctggacagacaatacatagcttcctaatatggcttatcgagacacttcataaacctgttctcctgcacatcacctatgacctcctaaatcccacagcaagtggccttatctcagttcttccctttgtccccatttctgtggcatttgagctctgatctaccgtccctttgggaagatgttatggcccttaatagagctagtcctggagatcgagatttgcaaagggagagtactgatgctgtgacaaggcataatatcactgggcgggtgctgagtgcccagatgcagagaactgagatggaaccttggaggatggaggcatttagggggaagggaggagagatcagagacaggaagggagtaaggggagctcagagacagaagtcaaaggacactgtgggtgttcattcatgtgttaaatcaggcaaatcatggcactatttgtgggtggcattggaagttgccagggatgaaggcagtatctaggtgtgtttgcggaaatactaaggaggacagtaaattaccatggtaggcagtgggagaataggagatatattagactgcctaccaacttattaactccatggaagcatccatctagaaaatattgatgattcactgagataatgattgtccttgttttcctttgttttcttttttatctcttccttcagttcctcttccttgcttcctgggtaaatcaaatcacaaaatgatgaaacctgcgtctcatcttgacaaagcataggccctgttgccatgggacttctgtggttttccattataagaattattataaagatatgtgagcaagaagaacagataaaaggtctctttaaaatgaacgtgtaactacatacatagtttttacaatgctgtcttcttacctgtgggaaatgtttgcacttaaagcacttagaaaaaaaaaacaattattttaagcaatgttgcgtttttttttcccttgcaggctctagatgtaatgataagctttctttaatttatgaatagaatttgaaagagaattgtctagtagaaggagtcacttatgtacgcaaaatatatttattgaattcatttcatgtgctagtgagtgtcctagacactggagatacaaggtgaacgtaacaaaaatgttcattgaacttgcattctggatcttctgtaaaggtgacacagacaatgaattctggccatatcagctgttttacttaggtaagtttttaaatctgcctctgtttcctcatctgtgaaataggattgttgtgaagataaaaaattagaacacagttaaatactcaacaaatgtgttaaagtcagaggctaacatattcaaaggtgacctgaaaactataaagcagcataagtaatctaatttgttacttaccctgggatggaccaccttagagggtcatttggcttatgacttttagactgtctgcacttggcagtgggtggaggtggttaattttgtctgactgataaactgttctctatttctagttcccctgttgaggattcaccagtcattgcaagtccctggaaacctaccacctgcagcttgctcactggggagtgatttggcttgctgtgtataaagggtctgaatgaattttaaaactcttgaatctaccctatatgatgtttatgagaagctaaaattcattttgaacatttacaaaaagcttttgttactattatgtttaaccctttctgctggagcaaaataaatggaacgtttctgctatctcgctctgctaagtttatcaggtcctgctggagtgggcgtatatagatgaggaccccaggagctatacaacaataaaagagaaatcattaggtttttttttctcccgtgcacattgtcctattatgttctggctggaggctgggggagttagatatcctgcctgttcttggtagaattattgctttggggcgcaaggtctggggaaacaatgaccctatgcatgataccttctggtatttgtgaataacagtcatataaaatctaatgaatatgttggcttctatagtgaaatcaagtccaaacaaaggatgcggtgaagcttgaatagagtatgtggaaggtagtgtaatattatagtcttaaatccaacagcaaaaacagcatcagactgggcatagtggcaagtgagggccaagatgggaggattacttgatgccaggagttcaagaccagcctaagcaacaaagcgagacccccatctctacaaaaaaaaatttttttttttaattagctgggtgtggtgatgtgcacctgtcttcccacctactcgggagtctgaggcaggaggatcccttgagtccagtagttcaaggttgcagtgagctatgatcaagccattgcactccagcctgggcaacaaagcaagaccctgtatcaaaaataaacaaacaaataaagcagtatcagcattagtattttcatgtgcgtccgtgtgaagagaccagcaaacaggctttgtgtgagcaacaaggctgtttatttcacctgggtgcaggagggctgagtccgaaaagagagtcagcgaagggagataggggtggggccgttttataggatttgggtaggtaaaggaaaaaggggggttgttctctggcaggcaggagtggagggtcatgaagtgctcggtaggggagcttttgagccaggatgagccaggagaaggaatttcacaagataatgtcatcagttcaggcaggagcaggccattttcatttcttttgtggtggaatgtcattagtcaaggcaggaacaggccatatggatgtgtacgtgcaggtcacagggaatatgatggcttagcttgggctcagaggcctgacattcctgtcttcttatattaataagaaagataaatcaaaatagtggtaaagtgttgggacagcgaaaattttgggggatggtatggagaaataatgggcgatgtttctcagggctgcttcgagtgggattaggggtggtgtgggaacctagagtgggagagattaagctgaagggagattttgtggtaaggggtgatattgtgggactgttagaagaaacattagtcatttagaattattggtgatggcctggatacggttttgtatgaattgaaaaactaaacggaataagagaaggagaaaaacaggtattaaaggtctaagaattggaagaagctaggacatctaattagagagtgcctaaggagattcagcatagttctgccagcaaagagtatttatttacttcaagagttaagagtggcagtttggggatagcaccaggagatatctgctgtgatggcttggagaaacagtgtaaaccggcagtgtaaacaagagcagggcatgtatgagtagttgagaacggtgaataggagtatgactagacagaagatagtagggatgacaagtttttcgggggtacagtccaagttggtttggtgtctggaatgagactggggcttaatagaaaggagcgtctatacaggagctcaaatgggctgtaccctgtaccattctaaggacaggcttgaattctgagaatggaaagtggtaaaagtattgtccagtcctctttaagttggtggctgagcttggtgaggtgtgtttttaaaagacctttagtctgttctacttttcctgaagactgaggaccataagggatataaaggtttcatttgatactaagagcctgaaaaaatgcttggctgatttgactaataaaggctggtctgctatcatgatgtatagaggtgggaaggccaaatggaggaattatgtctgacagaagggaagaaatgactgcagtggccttctcagaccttgtaggaaaggcctctacctatctagtgaaagtgtctacctagactaagaggtattttagttttctgactcggggcatgtgagagaggtcaatttgtcagtcctgggtgggggcaaatccttgagcttgatgtgtaggaaagggaggaggcctgaagaatccctgaggggtagtagaatagcaaatggaacactgagaaatgatttccttgaggatagatttccaggatggaaaggaaacgagaggttctaagagatgggctagcggcttgtaacctacatggaagaagttatgaaatgacgacagaatagaatgggcctgtgaggctggaaggagatattttccttggtctaagaactatttgccttgtgtggaagagattgataggtggaagtttcagcgggggagtaggtgggagtgactgatgtgaaggagaaaaactggctgtgagggacagaagttggaaagctagctgcttgtctagccaccttatcagcataagcgttgcctggagcaatgggatctgacaccttttgatggcctttgcagtgaatgactccagcttcctttggaagtaaagcggccttgagcagagtttttattaaagaggcattaatgatggaggacccttgcgtagtgaggaaacctctttcagcctatataacagcatggtggtgcagaatatgaaaggcatatttagagtcagtataaatattgatgcgtagtccttttgcaagagtgagggcttgagttaaggcaactaatttggcttgctgagaggtagtggagggggacagagtggtagcctcaataacagatgtggaagatactattgcatagtctgcctttgctggtgagtggcgattaggcctggtggaactgccatcaataaaccaaatgtgatcagggtgagaaacagggaagaaggaaatgtggggaaatggggtgaacatcaggtggatcagagagatgcagtaatgagggtcaggtgtggtatccagaataatgtgggaggctagattgaagttcgtgccaggaacaatggtaattgtgggagacttaacaaagagtgagtacagctgaaggagccagggagcgtcaggtgtgaggaagaaaatagatcttggaagttatgagaaatgtagagagtgagttgagcacagtttgtgatttttagggcctctaaaagtattaaagcagtggcagccgttgcacgcagacatgagggctaggctaaaacagtaaggtcaagttgtttgggccgaaaggctacagggtgcggttctggctcctgtgtaagaattctgcccgtactaaccatgcctaggaaggaaaggagttgttgttttatagaagggattggggtttgggagattagccggacacgatcagcagggagagcacatgtgtttttatgagaattatgccgagataggtaacagatgaggaagaaatttgggcttaactgaagtaatgggggctgtctgtgaagacttgcggcagtacagcccaggtaatttgctgagcctgatggatgtcagggtcagtccaagtgaaagcgaagagaggctgggatgaagggtgcaaaggaatagtaaagaaagcatgtttgagatctagaacagaataatggattgtggcgggaggtattgaggataggagagtatatgggtttgacaccatggggtggataggcaaaacaatttggttgataaggcacagatcttgaactaaactgtaagccttgtctggttttaggacaggtgaaatgagggaattgtaaggggagtttataggttttagaagcccatgctgtagcaggtgagtgataacaggctttaatccttttaaagcatgctatgggatgggatattggcgttgagcagggtaagggtgattaggttttaattggatggtaatgggcatgtgatcagttgccagggaaggagtagagatgtcccatacttgtgggttaaggtggggggatatgagaggaagacacaaaggaggctttgggttggggagaagggcagcaatgagatgcggctgtagtcaggaatagtcagggaagcagataatttagttaaaatgtcttggcctaataagggaactgggcagttgtggataattaaaaaagaatgcataaaagaatgttttctaagttggcaccagagttggggagttttacgaggcttagaagcctggccatcgatgcctacaacagttatggaggcaagggaaacaggcccttgaaaagaaggtaatgtgtagtgggtagcctctgtatggactaagaaggggacggacttaccctccattgttagagttacctagagcatctgtgattgtcctgtaggcttccgaggcgatcaggcagtgtcagtcttcagctgctaagccgagaagatctgggaagaagtcagtcagagagccttaggtcagagttccaggggctctgggagtggctgccaggtgagttgaacagtctgattttcagtggggtccgacacaggtggaatgcgccttaggaggaatcccgggctgtgggcattccttggccctgtggccagatttccagcacttgtagcaagctcctgggggaggaggttctggaggaacccctggcagctgtggttcgggcatttggagttctcatgtgctggagatgtggctggggtttgtctcacagcggaggcaaggaattgcaactcagaaatacgttgctacttggctgcttctattctattattgtacaccttgaaggtgaggttaattaagtcctgttgtggggtttgagggccggaatttaattttgggagttttatttaaagtcaggagtggattgggtaataaaatgtatattgagaataagacagccttttgaccttttagggtctcggactgtaaagcatctcagtgttgctgccaaatgagccatgaactgggctgggtttttcatatttgatgaaagagcctaactgctaactgatttgggagaggtcgcataaagaaaaaggaaaattaaccttgactatgcctttagcttcagccagatttttaagaggaaattgctgggcaggtgagggagggctagtcacagaatgaaactgtaagctggaccaggtgtgaggagaggaggtgataaaaggattatagggttggggagtagaggctgaggtagaactgggacctggctcagcctggtgagcggcagcctggggaggaggggagaggtcagatgggtctgtagaaaagaaagattaaaaagactcagtgaagcttgaggttgggactgagagaacaggtgggagggaaagaaggagtatttgggacaagtcgcattgggaacagagaatagggagggaacaatgtgtaaaagaatgcctggacgtcaggcacctcagaccgtttgcccattttacaacaagaattatttaggtcttgtaggatggagaaatcaaaagtgccattttctggccatttagagccatcgtcaaatttgtattggagccaagtggtgttgcagaagaagataaggcatttaggttttaggtcaggtgtgagttgaagaggttttaagttcttgagaacacaggctaagggagaaggaagaatggagggtggaaagttgcctatagtgaaggagacaagcccagagaaaagagagtagagacatggagggaaggggttcaggggttcttaccctccagaaaagtgggaaaggggccggggcatggaaataaggggttggggcacagagataagaggttggggcatggaaataaggggtggggcgcagagataagaggtcagggtgtggaaataagggatctgggggtttttgccccctagaaaagtggtacttgccactaagggtgaagaaggggttggggggttcttgacccccagaaaagtggaaaaggggtagagacatggagagaatgggtcagggttcttgtccctcccccagaaaagtgggacttgccgctaagggtgaaggaccaaggcaggtgtccctgcgtggtcagacacctctggaatgtgggtgaattatcagagaggtatccctgcaatgattaaacacaagggaaggctgccttcccgactccgtgaccgccgccagagttttgggtccacagataaaacgtgtctcctttgtctctaccagaaaatgaaaggaattgaaattaagagaagggagagattgaaggatggtgccaagattgaaaggagaaagtggttgagggatagtgagagaggttggagaagacagtaagaagaggccacttacctgatttaaaattggtgagatgttccttgggctggtgggtctgaggacccgaggtcataggtggatctttttcacggagcaaagagcagaaggacaggggattgatgtcccaagggaggtcccctgatctgaatcatggcaccaaatttcaagcatgtccgtgtgaagagaccaccaaacaggctttgtgtgagcaataaagcttttaatcatctgggtgcaggcgtgctgagtccgaaaagagagtcagcgtagggagatggggtggggccattttataagatttgggtaggtaaaggaaaattacagtcaaaggggggttgttctctggcgggcaggagtgggggtcacaaggtgctcagtaggggagcttttgagccaggatgagccaggagaaggaatttcacaagataatgtcatcagttaaggcaggaacaggccattttcatttcttttgtggtgaaatgtcatcagttaaggcaggaaccagccatctggatgtgtatgtgcaggtcacaggggatatgatggcttagcttgggctcagaggcctgacattttccaacttggttccattctccctgtctctttcatgtaccctaatcagcggtaggttcggtctctttacataatcccatatttcttgaaggtttgtttcattcttttttctctattgttgtctgcctgtcttatttcagaaagacagtcttcaagctctgagatcctttccgccacttggtctattctgctaatgatgcttgtgattgcattgtgaacttctcatgttgtgtttctcctgtctatcaggttgattatgttcctctctaaactggctattctggctatcagctcctgtattgtttcatcatgatttttagcttctttgtattgggctacaacatgctcctttagctcagcaaagtttgttattacccaccttctgaagcctacttctgtcaagtcagtcatctcagtctcagcccagttctgtgcccttgctgagagatgttgcagtcatttggaggagaagagggactctggctttttgagttttcagcatttttgcattaattctttctcatctttgtgggcttatctacctttaatctttgaggatgctgacatttgaatgaggctttttggggtcttttttgttgatgttgttgttgttttctttttgtttttcttttcaggccgctctaccatagggcttctgcagtcctatggcagccagaaaaaatggcagccacctccttcctctggaagctccatcccagggggtactgacctgttgtgagcctgcacacacctgtaggaggtggctagagacccccatggaaggtctcaccctgtcttgaggaatgggatcagggatgcacccaaagaagcagtctagctgctttttggtggagcaggtgtgctgtatttgggggggactcttccttatccatccgcctgtattctccaaagccagcagtttggaacagctgaatagactgaactgcagagctggcagttggccctccccttgggagctctgacacaggagagatcaaagctgtccatagaaccttggctggagtggccaaagcccctgcagggaggtgcctcccagtgagaaggaatggatcagggtcctacttaaagaactagtctggccactatttggaaattgtgggggacccttccttgtctggatcttctgtattctccacagctggcaggctggaacaactgagtctaccaaccacagagatggtggccatccccctaccttgccaaacgcagacagtctcaggcagactccaatccactgctgttggctggctgggatttcaagccaatgggtcttgtgaagtgtgtagaagtggggcccacagaacctcactgcctatctccctggattcagctccctttctagggatatgtacagacatatttcccaccttgccagggatcctggggctggagtatataaaacttttgggttggccaggcacggtagctcacacctgtaatcctagcactttgggaggccaaagcgggcagatcatgaattcaggagatcgagaccatcttggccaacatggtgaaatcccatctctactaaaaatacaaaaaattagccagctgtggtggtgggcgcctgtaatcccagctacttgggaggctgaggcagaagaatcgcctgaacctaggaggtggagtttgcagtgagccgagatggcgccattgcactccagcccgggtgacagagatagactctgtctcacaaaaactaacaaacaaacaaacaaacaaaaaaacctcttggatctctgtgtgtgcctgagtgactgctctgccaagactccacacaactctgtgtattggacctaaggtcctgatggtatgggctcacaagggaatctcttcatttgtgggttctaaagatccttgggagaagtgtggttttctgggcagggttgcataatcactcactgcttcctttggttgggtgggaattcctttggctccttggcacccattggccctgtatgctttttttcgttctctatgggttgagctgttttcctagtcagtcccagtgcgagaacctggatgcttcagttgaaggtgctgaattcacccgttttcacttctctctgtgagtgctgctgactgcagctgcttctaactggccatcttggatccctcctggagtttgtattaattcttcaatttattacttcaatgccacccactcacctgaaaaactaggcaaagtcttccacttctttgtcattagtcagaaaactcctaaaattattcatgcatttttctgaagttttctggaacatgtgattactttttcaggcttgactgcattagtcactcataggaaaggtttattttgtttatctggcaggcagaattaccaggttgtttaagttgctctctctcactttttcttctcaatgtgaataattgaatttgcttagattgaaagtataatgattctattgcttatgaaattgtgttgaaagttataatgtcctgcatataggtaaatgttgttattgttgatgctattattaaagagtcttcctctggaaaaagaaatgtgtgtagagacctcagaaaggcatctttggggttcagacttttaggatgagaaagcgcttctactttatgtgtagctgatatgtagacagaaaatgctatagaatggttgctttccactagcctgaaccaataagcatcagcccctgcccagagagaggcagtaactagggctagcagctagagggaagaagtggtaagtgggtgactatgtcagttgggtcctctggagagcaggcattgagatgccaagccagactctgcctgaggagctgttctgataactaagcaccatggggctattgggcctgaccacttcttctcagtctaagtcttctgtaaagaacaatctttgctctgaagatccctattggattatctggacttcgccaggcctactttgtggtttgaagctctccagctgaggccagatcctggagacactgcagttagaggcactctgcatgctctacagataagcaacaagttcttttctgataagagatgtaagtggcacacattcatagctgatgtgccagggtctctgcctaggactcgggtcaatgtcaggggtttggtgtctgaggataatgcaacattgactggatggccactttaaattgggtggcctatagggttaattaagatggggaataatggccatttggtaagtatttgggttaaaggaaggatcccagtctctaaaactatggctccagtttagtactgcatcagaaataatttgttcttgaggtaaattcactgcaatgtggacccggagcttctttacttcccactgacaatgaaaaaaaattgaccctggatacagagatggggcagagactttagggaggggcaaccaagttgcctaacatttagagggaggaatataacaggtagagagcagatatatttaacaaaaagttttctgcttggttggagtgccttggccaaaagcattcttgtaaaatgcaacttcatcacttcctctatactacatgaactcccagggtcagcattcatttattggatcagcaagatatttgaggctaggccatactctgggactcttctataactcctcaataattgccttttattaagagctaaagatgtatcaagcatttttcaaatattatccatggtgttcacaactgtcatgatccactctgttatcttcatctgacagaagagagatcaggtgacttgttcaagattacatagagtatatatatggtagagctgcaaacctgggctttttctaagactgctctggttttctaatagtttatgagtcacgatttatggcatatattaatcaagtcattgcaaaagtaatgaaagaggcatttgatggccctttattgttctgggatttgaacacccaagataacataatggagaaggaaatgagggaagggtgttaagagattgtcatctttatatgatacattttacagttgtcctgtgatatttgcccttaaactgctctttagataagagtagaatctattgttacttctacaccattatatttctcttcaagatgtgcccaaaggcacatcttctttgggaggcaccaaaactaaaaataataagatgatctatgtagcatctgttctccttcatattacactggtcttcaagttaagttttgctcactgggtagctttcccatcactgctgtttgcccatgcctgtgcatttgaggatctgctccgtgttcccgtagctcctcctagtggaagttcacaagtgaatggacttccaggatttatattaagaatttgaaaattatattctagactatgtttctaaattatgtgaaaacaagattgtgtgaccggaagtaatacatttgttctgaaaattgaaaaacataaatagggtattttaaaaatctttattctaatattcattacttgataaatattactgtaaagatatttctcaacaaaagatgcacccgctataatttctaaattgcaaataataaaagccagtgctcttaatatccacatcctcttattttgcaatattctttaaaataggggccctgttagtcctcgtagctgcagtgtctatcagctaacctggttcttaatagcgtagagaacaaaacccttcaccattggagaactcaaagaaaataaactgtagttagttcaaaatacctcttcactgtttcagctagacctgaaacttggggtaaaaaagtcacagtctgtaaacccaggtaggtgggaaacaaatttccccatggaccaaatgtttgatttcttgctttgaaagggtaactaataccctatgaaaaatggagagtgtcattgtaaaatgtcacatctgatttcatttagataatgactttttatctttactcttctaagtgaatggcattcagagttgattgttttagaagaacgtcatgcagaaccaaagtgttttctctgtttatatttttattttgattgaactgaaaatatcttctttgtggtcatttagcttatcaaacttctgtcaagttttgtagatctgttttttaaaaatggactaataattccacagggctcagtgggcagtgcctatgtcccctttccaagaaagggaataccctaagtgagggctggtatccaaaaagttcccaacatctgggggccatttatcggggacctcatttgatgggtcattactgaatattaaatatttgaatattacccttgtcctaaaccagcacacaacactcattccctcagttgctgagaggttggtggttcaatgctctcaactgagtccctctccaggaagttgaagagaatagcctggcctaaagttatacctcacccgcttcccagttagcctgagtctaatgactggcccaagacagaatataaagactggattccttgcctcaacttgaggttaagctgaaggcctatctcagccgtggaactcccagcaggatcatctggggcctctgtgtgactacagtgcagttcttctacccactctgtccagttctaattccttcctcctcctcagctgttgaggccaagagctcttttcaataaacttcctcagtgtatgtttcccaaagaactcaaactgtaacattcacacagtataattttgggcaaatataacagtagcatgcatgtgaaggactcagttggacacaataaggctttataactacacaaaacaaatcaactgatgtaggaagctgaaggtctgtgggtcgtgaccaacacagcattctgctggaggctatatgatcgaacagcaaactttatcatgaatgcagaatgtgggcaaacttgcgactgcacctgctgccagaaggtttgctgagggcagttactccctggtgtcatgctccttgaggttatctactggaatacctggagactactgttcaaagaatgcagtcctgcaggcctgcacccagtcaagcagctgaccacaaccacccccttctccctatctcatttactcaataaatatgaagggctatagaagctcagggcccttgttcactagaagcaaggagcccccgaccccttcttccaaatatactcttttgtctttgtctttattc

SEQ ID NO: 462 - DNA, 576330 bp, Homo sapiens
ctgtgccacacaccttttgaggctagaaggcttggccccatgtcttctgaagctggaagccttggccccacatctgtttcttttttgcaatcatctcatttattcaggtgtcatggtggctactgaatctttgccccactttccattcacagagaaacgcctctctcactgacgacttggaccaatttatgggaatactgcacacattgcttacatttttctctgcctgcagcctcttgtctcttctaatccaggggtccccaacccccgggctgaggacctgtactggtgtgtggcctgttaggaatgggacctcacaacaggagatgagccgccttggagcaagcattaccacctgagctccaccctgtcagatcagggtggcattcgattctcacaggagtgtgaaccctattgtgaactgtgcatgcgagagatctaagttgcatgctctttatgagtctaatgcctgatgatccgaagtggaaccattttatcctgaaaccatccccactgtgtcctaccccctgcccctaccctgttcgtggaaaaattgtcttccatgaaactggtccctggtgccaaaaaaggttggggaccgctgctctaatccaccccatctccgctgggtgcggtggcttatgtgtgtaatcccagcactttgggaggctgaggtgggcagatcacctgaggtcaggagttcaagaccagcctggccaacatggtgaaaccctgtttctactaaaaaatacaaaaactagccaggcgtggtggcaggtgcctgtaatctcagctactcaggaggctgaggaagggagaattgtttgagcccgggaggcggaggttgcagtgagccgagatcgtgccactgcactccagtctgggcaacagagtaagactccatctaaaaaaaaaaaaaaaaaaaaaaaattccatcccatttcatgctgtagctggacacatgcttatacagcaatttctgatgatgttattcccctgttcaaatgactctaattgctcccctcttgcttataaaataacctccaaacttttcctgcatggagacaatgcattctagtgaaaagagcaaaagtgagtgaatcagagacacaagggttccaactgctgcttttgccagatgttagatatgtggccttggacaaatttccaaacttctctttgcttcagcttccccaaatagaaataagacttataaacttattgagaattgtcataaaattaaaacagccttcatttattgaaagtttattgcatgttagactttttaaaatgcaacacctcatttaatcttcataaccatgttctactattcctctattttctttttttttcttttctttctttttttctttttttttcttttttgagacagaatctctctctgtcacccaggctggagtgaagtggcgcgatcttggctcaccacaacctccgcctccggggttcaagtgattctcacgcctcaacctcctgagtagctgagactacaggcatgcaccaccacacctggctaatttttgtatttttagtacagatggggttttgccatgttggccagtctggtcttgaactcctggcctcaagtgacccgcccaccttagcctcccaaagtgctgagattacaggcgtgagtcactgcacctggccttattcctctattttttaggatcaggaaactcggactcagagaagctaagcacccagcccaattccagatccttaactgacctgtgctgaggccttgcctagtactgcaggtagacagtacatgtagttccctttgtcttccataatctgactctgacacaccttcaaaagcttatctcatgctagttttctcccagcagttgtcatctccatggtctgaactacctgaccggctgcgactccacctacaaggcccttccctgcatttctacctattgaagtcctactgctatcctaaactctagctaagtgtcacctcttcctagaagacctgattgcaaatgttcctgcctccctggaaatctcataatacttgccatttctcttacgcaaagatcatgttttctcttatattatcattttttcccttttgtgcatatgttttattttccttcttgaatcacaaactctttctgggcaaggagcatgttgccaaagtcttattcaaccttgtttgccttttaattccaggctcagtccctgggacagatgaggcacttgcaaaattctgtagaatatttaatttttgcacaaatttaatccagctttgaagcgttgagctcaatctacagtctgcatgaagtgaatgtgttcctcacgtgttagaggtgatatcacagggagaacagtaattacaatgtgagatggagatggggccaattagtctttcttctttgccaataaaaaggcagagagagtgaacattatatggttttaggcaaagtacctgacagcagggaccagcggtaggaggtctacttaggtttgctatcttaattagcctatttaaaaaagatttctggcactataaagatgtgcggatttgcctttgaaggtatatggatttaccatcactctcgcgtgcacgcacacacaccctcccacacacaccccacaatccaaataagacagtagaaagggttttaaaagaaaactcttaatctaccccatttctatttcagcagcttccaaattcacatgcccgaatgcaataaataaaaatactggagaagaaaatcagataatacaagtgggaactcagtcagagaaaggttctctaacattgtaggaaatatcactctaggcagaaaactgctaccagatccttaactctgagaaagaacaggtggagacatgatgagtcaacgccgctgaggcttcacgcagcagccaccgtggcccggcttgggtaaatatttttattacaaacacagtgatgcgtaatgggccaaacgatcagtcctgacaaagattgcccacaggactgtgacactgcagtagctgggaaagtgggctagaacccgagcttacacgaacctgacgagcagcatcagggttgatgtcaggttagtgacagctgccgtcacctcacaggaagcaaaactgggaaatgcaaaattcagttttgagaaatctcagtcgatggcaagacgtttctttaaaaactgcaagattcgcaggaccctccacgatcctcttaggcaaatatttcttcttaaggaaacagtgtcttttctatttttctttctccctcaaactctcacaggctctgcttcttggactgagctgaattcagtcaaaccaaccgtttagatgtcttctttcttccttccttccttccttttcttttcttccttccttctttctttctttctctctctccttccttccttccctcggtccctccctccctctctccctttctttctttcttttttagagatggagtctcaccctctcacccagactggagtgcagtggcgcgacctcggctcactgcaacctcaacctcccgggttcaagcgattctcctgcctcagcttccaaagtagctgggattacaggcatgcgccactacgcccagctactttttgtattttttaagtagagacagggtttcacaatatgttggccaggctggtcccgaactcctgactgcaggtgatccgccggccttggccttccaaagtgctggattacaggtgcaagccaccttgcccagcctgtttagctattttcaaaacacctgcggatcacagggttagaccaattgtctggtgactgtggcattcagtaagatgtggagagttaagagagcagaggggccgcccagcccctgcacctggctccctttacacagttaccttctcccccgacccccaggctcaggctgagaagaatgagatccaggagatgggctaagaggccaggagagagagaactgggctgtggtggtgagaaagtgagaaagctaacggggcaattagaaggctgattcatttgtttatctagatgattatgctctacttagttgaatagttttgaagtgctctgtggttcaggaaatttcctctcaaaggcttatcaggtccacagccttccatgtgcctgacagttccacgaaagaaggctcctgagcacagggtatgggttttgagggaccttttaataatacgcttgctaatataattaagtcaagtaatgcataccaaacctcaagccgaggagaggtgaaaaaaaattcaactaaggttacttccatcttttaaaagaacagagaaaaaagacatggcctcttaaatatccctaactcagggtttcccaagaagtgtttctaaatccccaactggacctgtgattctagaaatgcaacatagattaacagaatttttgaacaggaaggaacttttaagcaatatcttaggtttgggcttctctgatcaatatttcacagaactctacaataaaatatgtgagtcacagaagaagctgaaagataattccatggatcaaatcattttaggaaattgcagattaaagaaaggtaggccgggcgcagtggcttatgcctgtaattccagcactttgggaggctgaggcaggcggatcacctgaggtcaggagtttgagacctgcctgaccaacatggtgaaaccccgcctctacttaaaatacaaaattagccgggcatggtggcacatgcctgtaatcccagctactcgggaggctgaggcaggagaatcacttgaacccgggtggtgggggttgcagtgagccgagatcaccccattgcactccagcctgggcgacaagagcgaaactctgtcttaaaaaaaaaaaaaaagaaaagaaaagaaaaaagaaagataaattggtttctttagcaaagggtgtggcagcttacagacggcaacagattctttgcctttgctgggtctgcgtcctccgcccttgtctctgggtaggttctgtctttgacagttgaagtgatcctgccagtttctgggcactggccttatggggttggtagcttcaatgtctggtctctggctgggcttgcactggagggcacctcaaagctgccattccccagcagatgggcagcatcagttgcccaccatgtgaatgggtcttgtgggcttgagcccttgcctcccatgactgccacaccagccaacacctgactgcacctgcctgaaacccaagtgagaacagcctagctgagcccgatgaaccctcagcactgagcgagatgacaggaagttactgtttaagccattaagttttggggtggttcatgttgctgtatggcacacagctggcaatcagcaactatttatttaatgaatgaatgactgagtgagtgactgagtaaatgtgaatcttccagagggtgatatagcacgtcacatttcctaaatatgacacctgaacacttcaagacaaattttgcagaacagggcttgacggaatgctagtctgagaaacaataaatgagaaggttgaaatggtagagtttgggaaatattggtcgagttatgcccttttatgttatagattagaaaagtgagccagacaggtcaagagaattgcccaaggaaacaaaactaattgttagactccacctgtgaacgaatctcctttcctagctaaagtaaagggtatggatacaatggtctccctcccatagccacattttagctaattaaatagatcaggcttctaacttggtagccctctctttctgttccatgataaagtctttgtgtccaactagccattttccatgagacctcttttacgtggcagacttccaaagatgatataagagtatgaattaggctaggtgcagtggctcacacctgtaatcccagcactttgggaggccaaggcgggcagaccacttgaggccatgagtttgagaccagcctggccaacatggtaaaaccccatctctactaaaaataaaaaaaattagctgggcatggcggtgcacacctgtaatcccagctacttgggaggctgaggcagaagaatcgcttgaacccacaaggcggaggttgcagtgagctgagatcgcaccactgcactctagcctgggcaacagagcaacagagcaagactgtctccaaaaaataaaaaaaaataaaaaaatatatgtattagcctaaagtctagattaagcgttctcaaaatagcagcacccatagcaacatcttggttctttggttcttttggttttcggtccagttcatttgcctggactgggtgcggtggctcatgcctgtaatcccagcactttgagaggccgaggtgggtggatcaccagaggtcgggagttccagaccagcctgaccaacatggagaaaccctgtcactactaaaaatacaaaattagctgggcatggtggtccatccctgtagtcccagctactcgggaggctgaggcaggagaatcgcttgaacccggaggtggaggttgcagtgagccgagatcgtgccattgcactccagcctgcgcaacaagagtgaaattccgtcttaaaaacaaagaaacaaaacaaaacaaaacaaacatttgtctgacggaaatcctcgcttaaaatgtaaatgtctggaagaacagattttcagtggaattagctatcagtgaggaatccagattttaaaatttcttcagtcttatgttacaaatttaatttctcttcctccatatgagaagtaaatcacatgatctgattttaaaacaatatagtgaagaatgttaacactagccagctcaaaatctagggtattccattttacttttctttctttttttagacagtcttgctctgttgcccaggctggagtgcaatggcgccatctcagctcactgcaacctccacctcccaggttcaagcgattctcctgtgtcagcctcccaagcagctgggattacaggtgcacgccaccaggccagctaaatatttttttgtatttttactagagacaggatttcaccatgttggccaggatagtctcaatctactgaccttgtgatctgcccacctcagcctcccagagtgctgggattacaagcatgagccactgcgcctggcctccatttccacatttcaaataccattacagcctatgccactgcttcctaatcaagtctccaaagccaagaaccacttcaatatcagttgaaagaaagttttatctaattatcttcattccccactttgaattgaccaaccatgtatctttttctggttttatcaaaggggctgccaggacaaaagcacatccaattttaagtaggctttagttagcagacttaaaattgatcatgtattttagtttcagtaacttgcaattcctacaccctttgataattcactttaaagagcaaaccgtctttaatgacaaggcttaaaagagacgacctttctgaacaaaatatgaaagctcagaagagatagttcttttaaggaaactatgaattaaaatgaccttgtgttctgaaacttttctcccaccatttttgatgttttacctttcctttttactcttagaaagcaagctaagacaccactgccttctatggatggtgatgcacttcaataagagggctgttaattgttaattccaactcacagtttcttctgtctgcactgtctctgcagatgcctttaatgaggttgctcaccactgtaagcatacacctgtttctgaagaaatcactgttgatatgtgacatcacaggataatgtttgaatctgagctatttccctttaatcacagtcaattcttttgtacggtctaggaagcaagtccgtcattctctgttccctcagtcttcctgttttcttcattatgccccgatggctgccttctgtgaagttcattgttgagtggggaggttgcaaaatcagagctcagacccctgaaagggcgcactgcttggtgatgcagaaatggtggactcgaacaaaattgtgacatacgtggatgactgaatagctaactttgctgttagcccttctcttccctgaccccgtaagtggataataacaaacaccaagaacctggggttgcagagtgtttcttctgcttggcttgttccaaaccctttaccagccactacctgttgacaattacgtgttgaaatagaaaaagcacaggtggatgactcaggtacagcagccaataatgataacttgagatgtaacaaaattaggtacttgtgatgaacaattgatcttccagcagataaaagaacagatggaatcttagatgattttataataaggcacagtgtttataatttatttcctgagctctttctttttctcccagtagccatttctatactcaccgctcaactcggtaaggaatttcaaacatgccaaatgcaatttttctttctcttcctttatcagagaacgttcacaaagacattagagtcaaccatccattcctatcacatccaatcaaagtgacctaaagtttcattccctttactcccagacatacatgacatggttcagaagggaaacaggatctgggtaatgtcaaaggttcaccagtgtttgtaatttcataacccttgaaatgaggaaaagaaagaatggcaggcaaccttccaaaacacctactgatatttactcatggaaaacaaatagtcttgagtgggagttccaaagccagcatacaatacaattcacaagtattttcacctcaagcacctaataaccttactaatgaaatctggtgagcttcaacttgttttccatggtctgtacagaaagaagtacttaacaggaatcctgtaggaatctttcctttcagactaaatcatagtctgagtaccaataatcctcatttgttttaatagcatctgcaatgattttgctttttcctaaatattcttgaaaccagtactataatttattgtatatgcaggaaaaacctcatcttccaaaagacagagacttatattcctgagggaggtgtcagggtgtctgaacattaccaggctgagtggtagccccacagagatgagttagtgcaagaatcccaggcctcctactgatggccacagcccagccctgtttatgccaattccctccctggctttggaagtggctgtaaaacctgttacttccttatcatctctgtggctcagttacagtacaaaaaggggtaattaatccttgggctgcaaacaacagacttgggcgtgggaaagagaaaagaattttgaaaaagtgtaaataaactttgtgccctgtccttttacagtaaaccagaggattacagccccgcccatgggccagatttttagagagctcaaaatgcccatggcacacaccacactgcagtcgaaagaacttggggcatcccttcactcattctccgcaattcaaaatttccttggcaaatgggttgaccaatcatcacagaacagctcttgggcgtttgggtggggagagggacccagacttaaccatccactcatggaagcaacaccatagtctctcaaccaggcagtgaccacatgcaaaccgtaccgagtaaagcacattctgtgactacttgccaatgtgttgtgtcctcataacctgacctcacattttttaggctttcttaaggatcatcgattgatattataattaaaacgacaaccataaaaagggagatcaagaaagtaacaataaaaccacagcagctatctaaaattgttacaccatattctgcctctacggttccaggacgtgattggagaccaacaagacaaatacttggactgatatcagatgatccagcgattttatcctaaacaccaattcatgcactaattatggatttgattgttgacatgatataaggtatattttcccaaagtacaatttgagattgctaacatttgcttgggaaaaatatcatatatatgtcacacttattttagcaaatgaggtttgataaaaagtagaaataaaactggtaagtacaaaataatattttaataacataggaacatgaacatgaaaacaatgtaaacaggttagaatttttgatatgatactacaaacgtgattttgatcgtacgcaactggtaaaattctatgcaaaaggattaacaaggcatatcataggaaatcactttgcccaatataagcagttctcagcacatactcaaatgcacacaaacatgaaaatcggaaataaaggaatgttaaaaaaataacttaggcagacacaaataaaaccaccccactagtgtatgaatgatgcatgtttttatgatcttaattacatttaaggatttaaaaaatgccactgatctcacagtttacaatatccaaatcttcaaacctgctggaagaagtccacagcacagcctggaaattgcatccgttgcattctctcgtgcagttacctgtaaaccaaaaatcgcagtcacgactttctctaggtttaacaggtatgtcaatcaaaaaataagcttcaattctggagaagttgataggggttgaaaaggctatttgatatcaaaatgtcataatttatgcttatctataagggatcaaatcttacctacaccgagcaaacagaatctttcgaaaaatgtgtgattcacaagatctttccttttaattcaaagccaaataagtagttcagtctttcactgcacaaacaggaagggcgtttgatggaattacagcaggtaaacacaatctatgttagtgatggcactgggaacctttgactacaaaaggtctcatgcatccccaaaaagagcactgagggtactcaagtcactgtgagtgctggatcactgagctgttggtctattctggtctggagaacaatgccaaacccttgggggaaaggactttgaagatgtgagctatcctagcaagtactgcatcatctcactatcttaaaggaagatcgtgtctccttcactccatcactgggcctcaagacaacatcttgtcctcttgtccaggtaaggcctggacctgccatgcccctgcagatccttccatctttcatctttcttttttctttttcttttgtttttttttttggagacagagtcttactctgctgcccaggctggaatgcagtggtgtgatctcagctcactgcaacctccacctcccaggttcaagcaattctcctgcctcagcctcctgagtagctgggattataggcgtgtgccaccatacctagctaatttttgtatttttagtagagacaacgttttaccaagttggccaggctggtcttgaactcctgacctcaggtgatcctcctgccttggcctcccaaagtgctgggattacaggagtgagccactgtgcccggcagattctctcatcttgttttgatagtacagactaagcactgggatgagaaggggggtgacttcttaaagacatgctacttactaaaaacaagtctttttcaaaacttgtattatatccaagcattttaataaagacaaaggccagacaaggaggctcacaggtgacacaacacaaactaatcaggagacaagacacctgcttatgggctgtaccttctgccttgatatgtagtcagttcttcctgaaggatggaagctctcttttgcagaaaattaacctagaaaagacaccttgtgtgagaagaggtggacgtggcttacatgtcaatattgtgcaaatagtatggtaagattttatttaaattcagacaattccctagataaaactcagaggatttgttgaatgtcaatgttgtgttttttacatttggtcacatcccatccttattgaaaatccatcagttacgacagaataaagttcaaactcctcattgcagagccattttgatctggcccacccccatcattgtggctttacctgtcctcacgccctgcccaccactgctgcttccacaccgtgtctttctcgctccgttgctctttggcccaggccattttctctctttggaacacttgtctttctgtctcccattcatcctccaccatttggtttaaatgtcacctctcctgtggaatcgttcacctcctccccagctgctccttgcctcctagccccaggcaaagccagcggtcccctcctctgtgttcctcccctctattactggtacttctcaaactgctttgtggttatttgttttcatatctcttccctaaacctgagagcttctcttgggcaggaatgacttttctgtctttccaccccagtttcttttacagggctgggcatgtagctggtttcactagctgttgaatgaatgaatgaatgagtgagtgtaaggaaaattactgctttctggaaacctcaatccattctagggattccctgaggttggagagacagaacttcatagcggaaagagcctgagctttgtctggagttaggccaactttggttcaattcctggcttgccatctgtggctctaggaaaattacttaagctcttgatgcttaatctgtgaaatgggattaatgacagctacttcccaaggttatgaggatgacatgaaacaactatagaaaccgcctagtgcagagctcaaagcaggtacaacccccagaccgccattcttagggggctggaggaaactgggttgtttagcatattctcttaaatcagacctttacaaagcatttgattattgtgtagcatacatttctgtactgttaaagatgcctgtatcaggcgtggattcaaaagcaccttacacaacccaaatggtttggggccaacttataccatggcttaatgtaatcaagagtcagtggtatttgatcgtttcagaattgtttattcttacgtctttggtctgaactgaaaccatggcaacggttgatcccgaaacatagttatgcaagggagtacagctggcagaacagaaaatgtgcttgaaagagaagaaaacacagtctttctaagtgggtgcatctcaaagtggtcctcctggttttgcttatttgtatagcaccctggtcttcattttatccaattgctcaagtgacccataggacaattgataattttgacagatgcagggattacactgattcaacttccctcccccaaccatgctctgtaatcggaattccaacaattctcaaaaaacacaggcacctgtgctttcaaactaaatttgctcactgtatggcctgtgactcctgcgtgcagctgccaactctgaggccctatcgcagctggcagcactctctttctgggtcagcatccagttttaggaggctgaagtggcttttattacagtgaaatgatatgaatgataacagaagccctgcaggtgggtatcagattcctttttttttcctcttcctaaaaaaactcctctgaaggcgtcaggtcctacatagctgacactatctgtagctcacctacaaacttaatgggtaaaccacacctggagtggagattttcatgtaaataaaaattatttaaccctttgtatgttcccattctcctccactacttatttttatatgcaggcgtgaacaaaatttcatagcccttagaagcaaaatcgcaaacagtagcatatggattgagattatgaacatttcattttcagataagagaagttttactaggggaatataaaaggaacagctaaaatgtgttccacattttatcttacatactataaatagataacgtggatatcatcaaaccatatcatttattttattcataaatatatttattaagcacctgttatgtgccaggcaaagtacttgatacagggagtaaataaatcctttccttcatggaatttttcaaggaaaaaatatgtcttaaacttcaaagtgggctgggcacggtggctcatgcttgcaaaatgaggctgaggtgggcgaattgcttgaggtcaggagttcgagaccagcctggccaagatagcgaaaccctgtctctacaaacaaacccccgtttctaaaaattagctgggcgtggttgcatgcacctgtaatcccagttacttgggaggcagaggcaggagaatcgcttgaacctgggaggcagaaggtgcagtgagctgagatagcaccactgaactccagcctgggtgacaaagtgaaactctgtctcaaaaaaaaaaaaaaaaaatcaaagtgtattggagatgtgaatatgtaaactctttctcatgataccaacaatacgtaaaacattcaaacatgttagaagtttttctcacatcgtgaaccacatcacatttcttttttttctctctttctttcttttttttttttttttttgagacggagtcttcctctgtcacccaggctggagtgcactgggcgtgacctcggctcactgcaacctccgcgtcccaagttcaagtgattctcctgcctcagcctcctgagtagctgggataacaggcatgcaccaccatgcctggctaatttttgtatttttagtagagacggggtttcaccacgttggccaggctggtctcaaattcctgatctcaggtgatctgcccgctgtggcctcccaaagtgctgggattacaggcgtgagccactgcacccgaccatatatatatatatatatttttttttttttttttttgagacagtctttttctgtcatccaggctggagtgcagtggtgtgatctcggctcactgcaacctctgcctctggggttcaagtgattctcctgcctcagccttccaagtagttgggattacaggcacgggccaccacgccccgctaatttttgtatttttagtagagacgggattttgccgtgttggccaggatggtctcaaactcctgacctcaaatggtctgcctgcctcggcctcccaaagtgacaggattacaggtatgagccaccatgcccagccaagaaccacacatttcaacaagaactatttaacctaattgtttgaataccttgtcattattttgccttgaacttagaatacatcttgttatctctaacgaccatgtaaaatacaccagaataaaagtgcttctaacataactgtgctttcaatttctctgcccttctgcacagtgaggaatcagccatatgctaagtgatggcattttggacctgataccaagaataaaaggatgaggctatattggaaggtagactgtaaatgaattgaagttataactgactgaacttttcaattttaagggtgctttaaagaaattcttattgagacagtgagttattaaacaagtaagaaaaaaatttaaaacaaaatgaaaatttatcctgagtagtaggttatgcaatgacatcacattgatttctggcaacaatttggaatcagatttatttgcaagtttcttttcagagtatcccctaaatccttggaaaatgccttgattctagtaattacctgtgattttagggaggaaatggtgtcttcaagttcttgtcttagggatgctggcatcaatcctttcaattttgtttcatattcttgtcgtatgtaagttatctaaattggaaaaaaattaagagttatctttttaccacataaatgattgttttggatttaagaagtcccagaacagatctgttcatcacaatgaaaggtttgttacacgcggtcagaaaccagacaataaagatgaaataagaagaaagagttaaaaactgaaaaggctacccagtctgaccctgtgactctgagagagatggtccctgtaacaatgctttatttatttaaaatcctcatgaacacaattttcagcatctgataagtaaaataatttttctctcctcttcactcatgaggttccccactatgctagccctgcagcctctccttgatcaggatgtgaactccaaccatactaagctgtcatctgaggacaactcatagcatgtctctgctttgatgaaaatactccttgagggggtggtggctcacgcctgtagtcccagcactttgggaggctgaggtgggcagatcacttgagcccaggagtttgagaccagcctgggcatctctaaaaatatataaaaattagctgggcatggtggtgcacaattgtagtttcagctacctgggaggctgaggtgggaggatcctttgagcccaggagatcaaggctgcagtgagccaagatcgggccactgcactccagtctgggtgacagagtaagactttttccaccaaaacccccaaaaatccctactcctccaaactgtcaggtagttggggcactaaatgtgattcatataatcatgaagacatgaatgaaggagaatctgcatagctgtgtctccgaccctctttgacacaagtagacaggtagagtgcactgggcataggaaggttcctggttcctggtttctttctgcctcccaaatactatcgggcctgtgtttaactaactgatgctcactgggctagtaaaaaaaataggttggtggctcatcccattcatctctctcaaggctaaaggagtgagtgagagggtagaagaaaagcctttggaagaatatgcctgagcaggatgaagatgtgcatggatgaggcgtgaatatgcatgtgtagatattggtgtctttttccagctgtgtttctgcatttctcttccacctactgtgaaataggatagaattaattattttaaaaatctgttgcatgtgctgtgcatgacttaaccaaacattaaagctgagttgcagtgtatcataccaagtgattcatcatacgcacctggaaataggcaatatactatgaaaattgtgtacgactgagttgagttggataagcctatcaatttgctgaagacaatttaaaattaacagtctttaagaccgaacttttcttacactaaactgaattaaggaaaaaatgtgcttaacaattcatttcattacctactaaaatcctgtggccactgttatagaacataaattttcaatttttggcaaagtgctttttttgggatatgttataatcctgtgacttatacctaaaggaaaaaaagaaataataaaacatgatctctcccacagatgcaaagtctttgctgatgaaatatctgttgattctcctgtctactgatttttctcaccttctcttcttcagcttacctccaagtgagccagttccagctactcacttacttgagtcagttagctgattcaaatgaaggaaaaatgcaaagcaaaacgcatgctttataaaccagacctcagggtaacatttattgagggttcatgggttatatattgactatttttttttctatcactcaacactggttctgaaagtttgagtttcaactcttttaaaaacaactcatgcatgcgctatttcctttttaaacaaattttattctgtattttactactgaaatatgttgtcctacccatcccaccccacagtaaaaatctcatccaggctccctatttctttcccttatcccctcttccaccacaccatcccgggacaagtgctccaggattccctgcccactggccattctggagtgtgtcctttgggtagcaatgtggaaaccaccagggcctttgtggagaaaatggagggggctgaaggagtcccaagaggggcttattggagggccttggatccttgctcataggtgagcttgatctcatcatctggacaggtggaggcagattcttcctgagcataggcattgctcaagtactgctgcacgccctggaaggcctcagggatggtgaatccctggtattttttttttcttttgagatggcatttcaatctgtcgcccaggctgtagtgcagtggcatgatcttggctcactgcaacctctgcctcccaggttccagctattctcttgcctcagcctcctgagtagctgggattacaagcacgcaccaccacacctggctaattttttttttttttttagtagagatggagtttcaccttgtaggctaggctggtcttgaactcttgacctcaagtgatctgcctgcctcggcctcccaaagtgttgggattacaggcgtgagccatgacacccgggccccctggtacttcttacacaccacttgtactatgtggagcgttagcaacaggttgcagtcagccagggtgagctcattgccatccagaaacttcctctgagagatgccttcatcttcagcactggtttcatccacttcttctgagtggcaggatatcaagtgattgtctaaaaccttcagggctttcaggagtcccttctccagattgtcattgactactgggtttgaattcttgatgtaagcagaaaatttggcaaatatgtcctgctcagctgtgttggattcagggttcagagctgccagcttggggtacctaggagggcacagcactgcctacagaaattcctcaatcttgttggtgtccttgtgttcttccatgccatacagcaggaatgggagctgccctcctgggcacagcttttgcactatcttggtctgcctcttggtgtcaatgatggtgacattgaaggtgactcccttgagccacagcaccatgaacagtctctagaaggggcagttcccaatcttggccccatcactgccagccttcacgaacaattcaacttgcagttgttcttcagctatggttgcgttggggaccagaaagtggccatagctgggggaactggggcatgaactgtttcttacatccttatctgtttagaatgtctatctgttttcctaagctggcactcggcaagaaggccatgttccatttgagtgccaagatggtgaagcccaatggtgagaagccggacaagttcaagtctggcattttccagggtcttctgaagctggagatgaactcggacctcaaggcttagctcggttgcatttataatgcagtccttgaggattcggtcttctcacgtgaaactggatggcagccagctcatacaggttaatttggacaaagcacagcagaacaatatggaacacaaggtcaaaactttttctgatgtctataaggagctcatgggcaaagacgttgattttgactttccagaatttcaattgtaaacacaaattataaagtatattcacagtagaaaaacaaaaaagtctatccattgcctgcatatttaaaagacaactttgctgggtataaaaatgcttcaatcccactttctttctctcataactttgtgaacacaaagatcaagttagctaggcatggtggtgtgcacctgtagtcccaactacttgggaggctgaagtaggaggattacttgagcccctcagaacatttctccagtgttttctggcattacatattgccatggtaaagtctgaggccaatctgatttttttcatgttgaatataactttctttttctgcttggatgctatgattttctttttccttcatttagtaacttcactgggaaatgctttgatactaattattttatattaattttcctgagacattgtgtgccctttctacctttacattgcattatttgaacagaagtttcctttgttagaataattacttgtattttattatatatatatacttatatgtatttttttctgttggttctcttcttcagagacacaaactttgcatgtgttgacccttctttgacaatctcccataattatacattttatctattattacttttattttcatatcattttattttgagacagggtcttgctatgttgcccaggctggtctccaactcctggactcaaccaatcttcctgcctcagcctcctgagtagttggaattacgtgcatgcatcactgcaccaaactcttcttatcgttttatatctattttatattttcatttcattttgtataatagcctctagcctaattactatatttccttggatggttttagttatgatttttctatttttgtttcatctactatggtttcaatctctgtaatcttttgcttttgtctaccatttttcctaagctctgagagatcacttttcatctgtctgttgacttatatcatctttagatatgtctcttcttttttctatttctctatctccctccaccattttccttgtgagagagatgtttaaatgtgttttgtgaatgctttgacactgtgaagagctgttataaagaactgtaattagtctgaaccttcctcctgtaattttccatttgatatacagaacagtatttgcttacattctttcttctcctctcttttaatccagcaaagatcatatgctagttcctttttctaaaagaaaaattacacctcctttttgaatggaaccagctatttgctgagagttgaggtgtggtgggggcagctggggtcaggccacagctatgctttggttttgtcgtcttcattacactttgaccaaatctatgatttcatttgctctgggggcctatgtccctcagttttcaagtactttggaggtcacggccaagtacttaagccctttggttcacgcttatggttggtttctcttgactctccttcctcctgccctgcccactattcacatgtgatggtttctctctagtaggaggctaggccatagagagtagaagattgggtgtgactaaggttgctctttgatcgccattattccttccatcacttttcaaattcagaagttatattttccaacatttattgaagattcgtgcatttatacttcctgtctactcctttattcttagtttttgtgattttagtgagtttgaatgaatttaaaataagcctctggaaaatatgaaattacctcatgtgtgagtgagactgtcaactgggaaaatattactaccctgaattcttaaactcaaatgctcaatttaaaaatcattatgtaaagctgaatcctgttacttcaataaagtcatgaaaaactttaaccaatctgttttcattctatttatgaggttaataaaattatcacgagcaaacatttactgaggactttctgtgtgccaggtgtgactctccatgtttttatatggacttaatccttctgatgacccaatgagggaagcatagagaggtaaaacatgatttgaactcaggtagtctgactctcaagcacatatgattgtccactttgctctacagtttctcaaataatccttctaaatgctgagctgatttttccaccccagggggaagagaatgccagagacacgtgggttagaggagtctttgctaccacgctctagtgctttccccagcacaacaggggccagggccaggggatggggcgttgaactgcagtgcttccagacatccatctagtcagcgatctttttaaaaatgtgacaacaataacaatgacaacaacaactggttccagaggactccccacgccttcccattgattttaaaattttagcttactacagatttatatacgaccaactgaagaaaacctacacaaatgcaacgtatatgtctgacctaaaataaaagtttcacaaattccccaaagaagcacatattcaaaaatccaaccagtgaaggatacatgtaaatttgtcacatggcaaaatgacaaaagaaaaggaaataattagtttatattcctatatatcactcttgattcttgtttttttttttttttttgagacagagttttgcttttgttgcccaggctggagtgcaatggcgcgatctcggctcagcgcaacctccgcctcctgggttcaagcgattctcctgcctcagcctcccgagtagctgggattataggcatgcaccaccattcctggctaattttgtatttttagtagagatggggtttctccatgttggtcagtctggtctcgaactctcgatctcaggtgatccacccaccttggcctcccaaagtactgggattacaggcataagccactgtgcccggccttttttttttttttttttcaagagacagggtcttgctctgttatctaggctggagtgccatggcacaatcacagcttattgcagcctcaacctcccgaggctcaagtgatcctcctgcctcagcctcccgagtagctgggactacaggtgcgtgccaccatgcccagctaattttttttttttttttccccatatggatagtttctcactatgttgcctaggctggtctcaaactcctgggctcaagtgatcctcatgcctcggcctcccaaagtgctaagatgataggcataagccaccatgcctggcttttgctactgcttttctatccccacctctgacccaggctgtgtttaaggggaaacaatgagagaatgagaacttttacctgtggactattcatgaacttggaactgcttgactatgaaacaatctggccttacaacagaccatgaagcaagatgaggttgagtggagttaagcaatgggtttgatggacacaaaattcctttgattcaagatcaaaatttttactcatacatgtattttattattatatttgaatattaaattcattagcataaagtgtcctattataccagtgagtgatgtctattaaacacgaaggtattcaaaggctggtctgctgtggttcatttccatcctctctccattcccatcatcctcaaaaagcactgtggataatcacgtgctcttccacatccctcaaccacatcgcaccaaagagaggggcttccctctctccaccacggttacttctctctctaccttccttcatcttccttcctttagcaaaataaaattaggaaactcactcaggacattgtgataatgacatttctataactagtaatgactcctgtaagctgagtggaaatggggtctttataacatggtgcccatgtgactaaagggctgtgccctgctccatggcaatagactgcccacttttccctccaaggcacggcactgacactatgattcccttaacttttaaagtgaactgtgaagaccaagaccatccctaactagagtttcatgttccaatcaagtagaactgaaatcaagggtaatcagacaaatgatcatttgcataaataatagactataaggtgtatggaatgtgcagttgacttgagccaaagggtccgtagagataaaaattcaaagtgacattggaaaaaaggagccttgaaaatctataatttcattaaaaatagcgaagggagaactaaaacatattttatgatgtttttattcaaaaaacaccacattgaccgggtggactggctcatgcctgtaatcccagcactctgggaggccgaggtgggtggatcacctgaggtcaggagttcaagaccagcctagccaacatggcgaaaccccatctccactaaaaatacaaaaattagccaggcatggtggcaggcgcctgtaatcccagctactcgggaggctgaggcagaagaatcgcttgaagccaggacgtggaggttgcagtgagccaacatcgtgccactgcactctagcctgggcaacagagtgagagtctgtctcaaaacaaacaaacaaacaaacaaacacacacacacacacacacacacacacacacacacacacacacactgtatcaaccaatcatgtcaatatgtcaaaaccatgtcaaatatgtcaactggtttataataaaacaaaaactaagatggaaatgtgcagctctgtgcaatcagcttaggcacaggcctcaaatgcaagttattttattgcaagctccaatgtgcctaacacggaattgtcttttgaggagctgagaaaagaggaacctcctattccattgccactggtttatgctacagtggtggtttatatgtctctgcatagtcctttattatcatattttgaagtaagggtgaagcagttcaggaaaataagtgtgcatgaggccaggtgtggtggctcatgcctctaatcccagcactttgggaggctgaggcaggagtattgcttgaactcaagagttcaagaccagcctgggcaacataatgagacctcatttctactaaaaataaaaaaaaattagctgggcgtggtggcatgcatctgcggtcccagctacttgagagtctgaggtgggagggtcacttgagtccaggagatccaggcttcagtgagctatgtttgtgccactgcacccagcctaggcaactgaataagaccctgtctcaaaaaaaaaaaaaaaaaagtgtgcccaatattactttacaaagcccaacaagcatttctgggggcagttcagcagagaaaaaggggaactaagtaaaaattctatggatgttatctccttaatctctttccactttgccactggtaccatcccaatccagaatacattcaatacattcatcttgcacctggatgactgcaatattggtatgttggttttgcttttcaagcagaatttgcttaacttttaagatcaaaattaatatcctgtatatggccaacaaggccctgtactgtctggccctatccacctgctaacctcctgcaactccagagagtcacctggcctctggaataccagacatgtttgctttcttccaattcattcaccaatgccctgtgctttttctcacaacaggatggttcttgttttttctctaattcttctttcttgttgtgtggggttttgccactgtgtccatctggacatctggatgttgggggcccctgctctgtggtgatgtcagggagggtgcagatctaggcacccagggggagggagcttggccagaccttcatgatgaggctgtgttggggccaactgactcccctttagacaagccatatagccctgagtgtggcaggcatgagcttcattagcaaaaacgggccccacaccagcccttgctttcaagctgcaacccaggctcctagcactttcctggcaaggagcacttctagcatttttagcccctgtcatccctaacacgtttcctcccagctgcctctgcttgctgctgggctcagtacctggaggctgtggcctcactcaccacttgggttctgctctgtttctacatcacagagatgttcgtcttgcttttaataccaaatactggccaggagcggtggctcatgcctgtaatcccagcactttgggaggccaaggtgggcagatcacctgaggtcaagagttcaagaccagcctagccaacatggtgaaaactctctactaaaaaaaaaaaaaaaaaaaaaaaaaaattagctgggcatggtggtgagtgcctgtagtcccagctactcagggaggctgacgcaggagaatcgcttgaacccaggaggcggaggttgcagtgagccaagaaaacaaatccatctttctaattctctctctcgctctcttttttttctctctttctctatatattttttatgtatatatatattttatttccataaggtttttggggaacaggtggtatttggttacatgggtaagttctttagtggtgatttgggaaaatttggtgcaaaccatcacctgagcagtgtacactgaacccagtgtatagtcttttattcctcgcccccttcccaccctttctccctgagtccccaaagtccattgtgtcattcttattcctttgtatcctcatagcttagctcccacttacgagtgagaacatatggtgtttagttttccatccctgagttacttcacttagagtaatagtctccaactccattcagggtgctgtgaatgccattaattcattcctttttatggctgagtagtattctattgcatatagaccacagtttctttatccactcattgattgatggacatctgggttggttccacgtttatgcaccccttgtgaattgtgctgccataaacatgtgtgtgcaagtatctttttcatttaatgacttcttttcctctgggtagatacccagtagtgggattgctggatcaagtgatagttctactctctcttctttaagaaatatccacactgttttccatagtggttgtactagtttacattcccaacagcagtgcagaagtgttcccttttcattgcatccacaccaaaatctattattttttgattttttgattatggtcattccttccttcctctctttctttctctttctttctccttccttccttccttccttctttccttccttccttcctttcttttctttctttcttgtcaagtctcactctgtcacccaggcagaagtgcagtgtcatggtctcagctcactacaaactccacctcccaggttcaagtgattctcctgcctcagcctcctgagtagctgggattaaggcatgcaccaccactacacccagctaatttttgtatttttagtagagatagggtttcaccatgttcgccaggctggtctccaactcctgacctcaggtgatccgcctgccttggcctcccaaagtgctgggataacaggcatgagccactgcgcccagctgattatggccattcttgagagtgtaaggtgttatacaaatggcaaaaaatgctcaacatcactaatgatcaggaaaatgcaaatcaaaaccacaatgtgatctctttttatattttatcaatcattgtagagtgtttggagctgagggggtgcctggtaatatgagctaatagagccatctagtagaaaaggacagactcttttgtaatcttttgatttaataaagtgtagggattaagagcccagatactgaaactggggtatctggagttgggtctgagttgtgcccctaatctgtgtgctcccagaaagagtaacttctctgtgcctcagttttcttatcaggaaaataacttttcaaggccaccgtgaagattagatgatttaacacctgcaaaatttttataagttgcacataatagatgttcaataaacattagttatcattatatgacttaatggagatttttattatatatatttcattatattatgtatatagcatgaattacatttatatatatattccatttagccaattctctatcattagactttattgctatttctaattatttgcaacattagaaatccttatagcaagttatttgcataaattaatgattgaggactccattgaaatgtttttgtattttttagtatctgtggattgagaaagtaccttaccaaaagctcctatgaatccagaatcaattttaaatgaatttatattttataattcaaaacaatctatatatatttgaaaaacagtagtgcctgtttatccaggataccaacaatggctagtgagtgtcttagtttgggctgctataacaaataccatagattgagcagattaatcaataagcatatatttctcacagttctggaggctgaaagtccaagatcagggtgccaacatggccaggttcttggaaagggctctcttcctgcttccagtttacagcaatgtgtatgtggacctccccatatggcctttccttgatgcgctctggtctctcttcctctttttataaagacattcatctcattatgggggacctaccctcatgacctcatctagatctaattacctcccaaaggccacctccgaataccatcacattggggattagggattcaacatatgaatttgggaggggacacaaacattcattgtatagcagtgtgcatatgaattttctcagatccttgtcaataactctggtccacaggtggggaaccattgctttattgtaaatgacttaatttaagggaaggatctcagctcaaaactctctttccatctggatttccaccaatacataggaggattaagggaaaataacatatacttctactccttgtggattattcagaaactgttctttgaatgtctggcttagcagaatgtgttaagtaaagtgagtttgactggtgggtagattgaagggggcaggaggaggggagggagaaaaagaggtgactttggagcatggcgtgtactctgagggagggtggacaagggcaggcactgcaattggccatctggtgtaagaagagtgcagcaaaaagacacagggcttctgaagggtggcgaagggccagaggaggtgggcaggagctgggcacaggaaggcttgctgggagggatcagatgtaacataaacaggaatgtggaggatgtttctgagggatgggcctttatgcagccaaacgtttttgcataggctttttaggggaatgagtatattttggtttcaagaataagaatgagggctgggcacgtggctcatgcctgtaatcccagcactttgggagccagaggcgggcagaccacaaggtcaggaggtcaagaccagcctggccaacatggtgaaaacccatctctacgaaaaatacaaaaattagccgggcgtggtggtgcgcacctgtagtcccagctgcttgggaggctgaggcaggagaattgcttgaacccaggagacagaggttgcagtaagccgagattgcgccactgtactctagcctggcaaccagagcaagactccatcaaaaaaaaaaaaaaaaaaaaaaaaagaataggaatgaaagaaatagtagtaaaagatgatgccaaaaaaatgctgtagtacaggtgagaaaatgtaccgccttctaagaaattccattcttattggggttaaagtatcatgtgttgccacagcaactgccaagaaaaatccgttttaagaaaggtgctctgctgcagagctcatgtactttgattctgaagtataaagtgaaaatgtagaaataactgcaattttcttaacaatcttaaaaatattcatttcccgcctttcttcaatatcatttcctcttcactttctttattctaactggcgtcctctcaaactaagcgtgcagcgcaataggagtcctccattccctgttcataggaaccgttccaccgcaagggagtgaagcctgctgcttaacaggcctgggactccaaggcaagcgggtggctggtgcaggaagcagttgccgacctctgttgtttgaaggtggcatgaactagtttctggaaagggttatattttcaggaccattttctgatcctgtggagaaaaaggtggctttagcatgagtgaatggttcaaacctagcactttaattaggtttaggtgctctaaatccagcttcaggtagttcaaaagattctctgacaccaaaaagaaaacaaaggtctggtaagtctgcctctaaggattcacacacagaggaaagacagaaaatggataacatagtcaaaggccagaaaattactaataaactgtctgaatttgttcatgaatcaaagacttaaattctgaataagattgaggttgtcactggggtcgtaccatggcagcaaagactcagaagaggaactcggacagcgatccatcctaaagcacaaattattgcggaagccgggccaatagtgattggcaaagggaacctgatagaagaacaggcccttatcataaatgcttcctcggatagtatcactcttgacactggagatccagaaccaaaacctatgatcattggcaccaataatgtgtttaaagttggcgtcattcccaagccatggagatgggagataataatgtcattgaattaaaagtgtatgtaggcagaaatctaatattgacaagtggctgtctcactggcgcttgttgcaacctaaacacttttgaagtcatcccggagaatacggtgatctatggtgcagactgcctttgttgggtgcaggctgagcgaccgcagcctcagacactacagctggatttctcgatgaaaatcttgccaaattaccaccacctaaagaagactacgaaaggaagctcaactccagtaaagaactaagaacagtacatgacatgaagataacattttgtctttgactgctgtcttttgaatgggccacagtgtttatgtactcttagcagctcacagaataatacatgttgactttattttgtaaaattgggttgagaggaaagtaatggattttcattgtaactgtcctttataattcatgtaaaatgtattattttcctttatccttgcttcttttctgataatttacagatttagcttttcttttgttatataaactgctagccacaaattttagttatgtaaaagactacccattacaagaaaggacatattgttatgtatttatattctggcataagctaaactgaataaaaatactggtaacaggaaaaaaaaaagattgaggttgtgatgtaaaataaacacatgtgaatattaaaattttggacagtattttgcatataagcaataccctttacttcctgatggagatggaaaagctaaaaccatattacagagctcctattaataaatgtggccttgggaggtactcatttagaatttctcaagacacatgtagcggagattttattcagcagcattcattccagcatttactccagcattattcaccagttttctggtaactggaatctacccctctcccattctctgacccacccaagggtcaggggtagagtatgtgacgggaccctaaggcaatcatcacgtcgcattatctggagccataactattgagggcctggtaacatgatccaagtccaggtaaccagagtcactgacagtcaaaggatgcagactctctcatccactggactttccccattgatgtcattctggaattgtgacaaccatcttgctaccacagagtaagaagtgaactgagggttttggcaatccaggggaagaattgagaagtggagaaaaataaactaagccctttatcaatctgtacctagagttagccctgtctttggatttttcagtttgggttagattttctgtcacttgcaacccaaacggtctgaattgaaacaacatagaatatgcaaaatattcacttacatttatgcgtgttgcatctgttagaccaggggtcaacaaacttcagcctgcagaccaaatttgggacactgcttgtttttgtaaataaagttttactggaacacagccatgctcatttgtttacttattgtctgtgattgctttctcatgacaatggcagtattgagtagtcttgacagagaccttatagctcacaaagccctgaaacatttgttatctggccctttatagaaagttggctgacccctgtgactagaccaagctccactaggtagggactgtgttcattttgctgactgctatggcctcagcatttagcatggtgcctggcatatggtagcaactcaatacaataaatatttgctgatgaatgaacgaatcacacagagcttacaacctttggtgttaagtcagtctttgtctcaaaatgacaaggtcttcggaatgtctacagtaaactcatcacacatgctctccctaaagacaaagagaagattctgtcatctcagtattgcagttcttaatcagcacagtggctattaataagtaggctggcttcaaagctgagaaagtcggaggcaaacaccagggcctacggggctgctgagatcaaagaggatcttagagattcaccccgaaggaggggagttggtttcatcatgctctttcctcctctgtgcttctccagtttactcactatcagactttttatatatggttgagatagtcaatgactcatgcctcttttcttctaaaaccaaatgccagctcctttcttgctagaatatataattttggtctcatttctaatgtttttcttgttaataataacattcctaatattttttctttccttaggttgatatatactatgaatactccattcttttaaagaagagctggtacaggtcctaaagcagtttgagcagtacagcaattctacaggcatgggatgagaaaggctgaatgtggaaagtctggacaggtacatgttgaagaacgtgaatatttggaggaccaagtttaaacaagttggaaggaagcaccttctctatgttgcaaggtacatccctgaaagcgtttggggaaaacctgggggagggatagggtgtttttcacttctgtttacaatgtctgactttcctctcagaaagagggtgactaggcctttttggttggggctggacttcctaaaaaaggtagttttcatcaacaaaggaccaaaaccccaaccaaagggtaggtgagactcttgaggtttataactgactttgttaataaaagacccaagaaaacctatagaataaggctgatactcagtgaggctgatgggggttttggagtctccctgatatttacaatttatacatagaagtaaggttggagcactggacacatagcaaatgcttagtaaatattgttttaatgagtaaaaggctgaacaaagttgttgttgaataggtaggtggcaccttgaaattatggaaggtagtaaaggttatgtcaacaaatttagattgaatgtagtaaaaaatagaaaaagcaaagaaaaccccacattatgaacaccttatatgtgccagatactgtattaagcaattgctgcataatcttttacatactgtgatgattctatttaattcttacatacaatttggaagacagacattatctactcactccatagagaaggaaacaggtacacagtgcgtaactgctagaaccacgattgaaacctgacatctaagcctgtactgtgcccatttattactgggaggtggagaagggaataggattgatctggaaatattgtgatggaatctcaggagaggagattctgggattcaggggggcagctgggagctgctggagtgatctaggaaagtgaggaactcctagtctgatctgaggtgatggctatgggaaggtcataaaatagaagctgattaattacctgtctcatagaatagaagcaagagatgagttgtatgagaatatatgcttcagccatgtgcctagaagaagggtgatgttcctgcagagacaaggcaatgggtacagtacagggagttggtctgggtgtaagcaggacacaaggtatgtttgggggtttgcatttacttagtttgaggagcagaggaaacattcataaggaaatatgcgagtagagctcaggagaaaagcaggactagaggcccaagaatcacaggccagaagaagaagctgtagcctcgggaatggaagagctctctgaaggggaaaggggagaacaggaatgtcccaggagccaaggctcatctataagggacttccacatttaggatgtagaagaaggaagcagaagcagggaatgaccagaaatggccccagagatgagacgaaagttaggagagcggggagcaagcctttaggtttcacaagggaaggagggaaagtaggtgttaggtgctgccaagatcaaggaaaataagcagaagaccaggccatttcagttgcagtgagccaagatcacgccactgcactccagcctgggtgacagagcgagactctgtctcaaaaaaaaaaaaaaaaaaaaaaaaaatatcagaccatttctatcccctgccttgaatatcaccaccgcataggaaatagaatggtctagatagcagattaatcacgacggattttggtgatcaacagtgctacagataaggggagtttaagaagaaattaatttgttgataaacatatagtttcctattttaaagcaaaacttaaaagatccacatctaaccttcagttaaatatcgttcaaaatatctgatttagacagagagttctgacctggtttgagggcatttttcaaaagaggcaagctacgactgctctttcttttctgcatatttaaactcttgacaattataaataatctaaacctctccctcaaagtaccaattatctccttatgtttgagaaggcatgtcttgccagatatggtattctatacaaaacacaaaataggaagacaaaggcagccgttgtcccaccggtgcaccccggatttacttaggcagctcgatgaacgctaatgaggattttgtgcatgaatctcccaccttccagctaaagggaactgagaccccacaacctcacagcagaacatttcttaacaccattgtaaacactgactccattcaggagttgttcacctttacacagcagagagaaaagaattttttgttcaattaaaacttagggagtgtgacgtcatcaaaatacttcctttaggctttctgaaagaaaaaagcttatactttttacacgagaagtaaaaaggagcttcagaaatacataactgacatataataggccaggaagggaacaggagacatcagtaactcctatgtgggataatggaggccatcacagaggtgatgagatttgactgggacattgaagaatgagtaggaactttcaagatggatgagaggaagaaaaaactgctagctgaggaaagggcaggaagcatagaggtgactgtgtgtggcatgcttagggactgtcacagggtagagtatgggtggaggtcatggggtgggcaggggataagtgagataggtggagacaaggtggttaggactttgaagcttatgccaaggtacctgggctttattctgaagacaatggaaaaactaactcaaggtttctgattggagactaatataccttgatttctccttccttccttccttccttccttccttctttccttccctccctccctccttccttcctcttttttgttttctttcttttttcttttctttttctccttccttccttcctccctccttctcttttctctctttctttcttcctttctttctctttctttctttttctctctcgttccttcctccctccctcccttccttccttccttcctccctccctcccttcctttctccctcccaccctccctccttctttctttctttctctctctctcttctctctctccttccttccttccttccttccttccttccttccttccttccttccttccttccttcttcccttcttcctttcttctctttttttcttctcgtttctttttcagacaggttctcactctgttgcccaggttggacagcagtgatgcaaccacagctcactgcagcctccaccttctggtcttaggtgatcctcccacctcaacctcccaagtagctgggactacaggcgtgtaccaccatgccttgctaatttttgtatttttttttgtagaaacaaggtttttgccatgttgcccagcccaggctgggcaatctacctgcttgaggtgagctcaagcaatccacccactttggcttcccacagcgccgcctggccataccttgatttctgttacaggaagagaaacctaatgtcaccatcctgcttctagttttttccttctccagctgattctccacactgttgcatgtttctctaaaatgcagatctgatcatctcaccccaaccccactcccatataaaaacacttctgtgatttctttcatctgtagattaaagacaacctcctttgcatggatcatctaagaaccttctcatatggtcttagactaattttccaggaccttgtgctccagtaatgacttggcattttccccaaaagtcccatgtcatgttgtgactcatgcctttgcacatgctgttttgtgctcctctgcgcccttccttcctctgaactggctagagaaccactctccattcttacataggaccttctccaccacaccctcccacagccttctagtcacggtaaccaacccttccactaaaatgccttggtattatgttcatctaacagttactgattgacacttaaggggtgttttctatgtattaggcaccatagtgtactcttttgcatatattatatttcatttaatcttctacgaatgctatatggtactttcatggctgtttacataagaagaaataggcttatccatagtcacacagctacttggtacctgagtcaggacctgtacaaggtcttccttacccgagagcctccgcttgtacttcattatcagatactattataactattgatttgcacactgctttctcctattagactgtgggttccctgagagtaagttctatgttgaaccggagatcaacgttatttcaaaagtatataagattaaataattattcttttgaagtttgagaccattacatggactgtttttgccaatgtaaagacatttttgctaacctattatgtaggctggagtttgcatgaagcagatcatatacaaccacgtagacctgggctcacttcatcggcatttcatctgctctaggtgagatggagaaacggcagccagttagtagttcattttccatctttcaagagagattgacatctatattttttttacacagcagataaactggtaatgaatatatatatgtgtgtgtgtgtgtgtatatatatgtttatttatttattaaaaaattttttttgagatagggtctcactctgtcacccaggctagagtgcagtgacgcaatcatggctcactgcagcctcaacttcatgggctcaggtgatcctcccacctcggcctcctgagtagctgggaccacaggtgggcaccaccacgcctgactaagttctgtattttttgtagagactgggttttaccatgttgcccagcctggtggtaatgaatattaacttggcttggtccacttagacatacatgaaaggacaatttctgttagaaacacttacataagaatatgaaaaagataagtacactgttactgacttagataaaaccagtgcaaccttaagaaacagtactgggagagcaatagtcatgttagattgagcaagaggctgcatcttctaatctttttttcatgattattttcactagtgtgctctttcaggaatgtctctgtgcattctttataaaactgttgcccagatctttttttaaatcacatcaaaccaaaaaaggtcaaataaagagcaggaagattttgttctttccgttgaaggcatttctttaatattaaaaatgtactgaaatgtagaaatcatattctgatgatgtctgaaaagaattcatggtaaagagtaaaaagacaaagaaaaaagctctcaacaatcactggtggctgagggccgcagtatcctcattgggccagcttttttctttacttcaaatggcagaaaaaattcacgatttacaattagaaaaaaaatcctaaacgtgtgtggatattacgatgaatgccactcttcatgtttattggcccacatggtaaaacacattatggtgaaaattccaacttcatctataagtgaaaacaaacagaaagggcatcttttcttattcaaatagagttccagagggtgtgtttttgctttatttccaaccataagaggctcctatctgaaggatctttctgtgtagcttgagtgcccaagttggcaacttaggtctctataacaatttcattccctctctttatcttgaacacgtatttaaaactgatgttggcagcagaaaggctaagattttagggataagggtactattttatcttgtatgatgttaacttttttcatccagctttgagaaaattctttttttctccttcattttgatgaactgaattaatcttgcttctttatgtccttaggaagctttaaaatactaagacaggtgaaaccaagtccctgtactaaaggtggcttatgtgatctttgtcatatccagtaatcttctgtgatctttgtcatatccagtaattttggaaataaaagggttgttgtattgtaaacttaggttaatatatactttaaatgtcccttatggcaaagtagatgtttgatggaatgagaactttcaggagacttgcctgagatttttttagtctacacatggtatagctcaacttagtttgtggatcacatatggcaaccataagaagtctgagagaaaaaggggggcggccagtagaaggtaggagctccctatatttcttaaactattctgagccaattggatggtagagactggtgggtagttaggtgagaaagtgctaggatggtggagctgcctaggaaacccagcctgcaacccagcacagaactagacatctgcattttatgccagcttcctcctttgcctccctgaacaatgctgaatgcctaagagttgaccagaagtagcctctgttctgtgcagaacacaaaggaggaatcaaaccctgtcttcaaggaagtaacagttttggggggaagcaaaattaacctataaacataatacaaggccgaggcgggcagatcacgaggtcaggagatcgggaccatcttggctaacacggtgaaaccctgtttctaccaaaaatacaaaaacttagccaggcgtggtggcgtgcgcctgtagtcccagctactcggcaggctgaggcaggagaatggcctgaacccgggaggcggagcttgcagtgagccgagatcgtgctactgcactccagcctgggcgacagagcaagactctgtctcaaaaaaataaataaataaaaaataaaataaacattatacatccagctacagggaaactcagtataacagacatttggggaaagaaaaagatctttggccatggcattgcttgggaaggtctgtgggaggtgagttttgagctgtgctcccaaagctgagtagcagctgaacaggcagaagtttggcaaaaggaaattccaggtgaaggaaaaaccatgagccaaggcgaaaatgagtgtggctggtgtgagagctgagcacccacacttggctgagggcttgacaggagatgcttgggaatgcttagaaataatattggatagtccattaattaagttttaagagaacttaaaagtctggcagagagatccaataagtgagtgtgaggcagttgtttttctgagcaggggaataacatgatgacaatggtattttaggaagattgcccagatgtgacgcagctaggaagagaccattttgtccaaatccaaggtgattaagagtcaaagatgtccatggggagaacggagatgatgaatacaactaaagtgacattttggaggtagaaataacatgacttggtgatgaaatagttataagatgtgaccgatgcagcaggtagagcccaagacaatgaatgccaaggtttccagcagtcttcctctcaatcctgataacaccatcaaggacacagcatccccactgaactatctctgttacctttggtttcctggtttccacttgtcttagtcagctcaggctgctataacaaaacactgtggattgggtggcttaaacaacaaacatttattcctcatagttctagaggctgggaaatccaagatcagggtaccagcatggtctggtttaggtgagggctctcctcctgacttgcagatggctgcctccttactgtatcctcacatggcagagacagtgcaatatttctcctatgtctctttttgtaagggcaataatctcaccatgaaggccctactctcatgacctaattaccttccaaaggccccatctccgataccatcacactggtgctcagagcttcaatattttggcggggtgagaggcattaacattcagcccataacaccacctcaattttaatgccttttatttccacaccagagatttttttcacccccactttgctgtgtcactggcctcctttccattggcaagcctagccctacaccaaactgctgagacaatgcaggtcaggacaggaggtacattaagagcctcagtccatcagctgcagacaactgaattcttcttgctattgcagacccagtatcaggggcctcaaggccaactcaagggtgtgcttcattaacccaggtcatatgcatgggtttctgccattccctcctgcctactgctctaggtctctgctagaattagagcacagggcagatgaaagacaagcctaggatactgcgcgaggttctgtggaacagaactttctcttttcttctgatatgagcctggaaacataggctcaggaactgatagcaggtatcttgcaaccatgaaaaggacaatttgtggagaatggagccaacaataagggaacagagttaaaaaatggagagagaataattggcttttggtcacataatttgagctattggattaagcctcccctgaagccaatgctacttctcagttgacatgaagcaacatattcttcttattggttaagccatttgttcttcaaccaattatttctaataaattatttgactggggctgagattccctgccaaggacctagactttgtaccctatgagctggccccagcagtcccccagcaaggtagtaagggccactcgatttaaactctgccacaccctactggctggactggattgctttgggtactgacacctgccccagctcccaaaccaacttccacatctccaaataccttgcctacctcactgttcatctgcatttcaactctgatcactcaaaacttgcctactttctgaattaatgagttagtttccttgtgtagtctcttggtgacttaacctacaatttatacacaaaatcatatgttgccaggttttttgggccaaatccgaactctgggagctccctgacacctgcatgctttatccccaggctaccgcctgttgctacagaaagtaaacaacaataataaaacacacacatgctgtttcaacagggtcatctagaaattcatgctatttaacctcaatggaccttctccattgctggtcaacctttaactgctctctgttttacatagtgtaggggcctttttcatacaatgtctacctcatgggacacccacatacttagtagccaacattactgacgatctgctgatgactgaccctggtgtaatctagggttcattggtcccttgtgctgggtgaagcctttggtaatacttagggagcaccagagaaaataactttacacaaagacaaaaagtttagttatttgctgtatgtcttaattgatgcaagccatcaaagtaggaattgcagagaacaaggtataaatcaataaaataagtaaatggaagtgattgaaggacagagccactttaaagcaagtgtcgctcaatttcctgaaaacataacgaaattgctttgcaaaagaaatcataatggtttgcttttaatttttcctaaagagcactaataacaaataatggaaagttcaattgataattaaagaaaaaaaaaacacttcacttttgagcattcatgaggcagtattcttttcaaattattatactctggcaaggcatactcaaggtacttggttcctttgtactctttccctctgtatttcaggttttatatgaatgaaacacaatgagtaattccttctctttggatccttcaggatattatttaaacactggcatctggtctaagggaaacttaatgctaagtcagaggagtatttgaaaaatagtttacatctggttttgtactacccatccctggaagtatgcagggagggtggaggaaatgagcacattgctggctctctgggctgtggtgctggtggggctgggtcttttggtgtaatgcataccacagcattcccttttataaagtgagggattagtgccaccttctttgtagcaatgtcgtgacctctataatgcttcttaaattgaggacaatgatggacccaccaagccttaacacatgatttaaatctgatctgacagtacttaaacccagaactccagagggctaatggttgaacaagcttgggagaatgtccagggaacaaaatgtagaagcccgatgaattacggaggaatcacaactccagggcaatggaggggggagtaaaatgacatattctgagttggtatcttttataggattgactaaaactgtggtcccactataatgtgctagaaagcaaaaaaatatatattattttcactcgtacatctataatttaagaaggatatgagttttaacaacatttgtactcttacacacacacacacacacacacacacaaaacctatcgagaggaatctctcatagaggctaaaaattagaagcaataatattttagggtggtcattaattttaggtacaggtatatagtattttaaatttctcacatttagacaaacttagaaacctgattaaaatcagtttgtgatatttgtatactgaggataaacgtaacttgtagaaccatgaagagcaaaacactcaataatgagtcacagcaggacccatggaagctcacctagcagtgacgtctgacctgcagcagccactgtgctcagagggaggccgacgactgcgccactcccttgggcactttttttttttttttcgagactgagtctcgctgtgtcacccaggatggagtgcagtggcgcagtctccactcactgcaacctcagcctcccagattcaagtgattctcctggttcagcctcccaagtagctgggattacaagtgcccaccaccatgcctggataattttcgtatttttagtagagatggttttcgccatgttggccaggctggtctcgaactcctgacctcaagtgatccgcccacctcagcctctcaaagtgctgggattccaggcatgagccactgcgcccggcctccttgggcactattcttaggggacctactccatttcaataaactataagttggtgacagggccaatgtttattttgtttttggcttgtaaacaattcacacatcgaaaacatctctgccctgctccttcactaatccccagggccctccaggtatgtcaagctgttcaatatacacgttaagcctttggcattaagtcaggaactttctacccacatccaagagaccttattacccctgtgacttgtatttctgcatttttcttttcctaactcagatcccccacctggaagatcttctgtttgtagttaagtactaaaagtctatataattcataaccgcgagggcagagaaaactctaaaaccacctgcctgtatgtggctttcgggaagcaacattcctgtgatcacacaagctgaaaaggaataaaagtgctctctcacaacagcaccaagttgaggtactttcccttctttcctgggatggaacaagaagtgtttcctttcttttccatgtttgttagaatttggatggtttctattctctcaactcagtgttactgattggctggaagagttcattccacccttttagccaaagtcacttttgaacaggctgttttcgactgccaggcaagcaccacacaaaattggcatgagatgcttttctttggttccattggcctctcctttctctctccatcactccacttacagaatcttgccctccccatctaatgccccatattgtcacattttctcccagctaactttcttttggtaaaatctctaatgtgtgacaatttcaacgggtaacttgcattagaaagcctctgattgtcaagtaaagttctagtctcgcagtgaatttttttggcccccatcagttcagttttcggcaggtgggcaggggaaacattttgggagagcggcagctggcccttctctcctcactgaaatcacactaccagtttgacttcgcctggtgttaagattaattcttttactactgcctattactgactcatttctctttccttttgaaaatatgttatgacatcgagccccaaattcaagtataaaactagatttggtggcaagaaattctcttctaaggaatagttttagactttagagtctgatgagccagactgagaagcatgtgttaccacaggggtataaacgtagggttggagtttgaaaaagggtatgtatagcctggcgataacaatttgagaatcaccacaataaatgagacctgaagacaatggggatagatgatatcattgagggagagagaatgtatagctgggaaagaagtagggaatagataccagaaaacagagattatttactgtatggggaaggcctaaaatcagaagacaatagaagagattgagaagctgctgtctaaaaaagaagaaaaggccgggtacggtggctcatgcctgtaatcccagcactttggggggccaaggcgggtggatcacgaggtcaggagatcgagaccatcctggctaacacggtgaaaccctgtctctactaaaaatacaaaaaattatccaggcatggtggagggcacctgtagtcccagctactcaggaggctgaggcagaagaatggcgtgaacccgggaggcggaggttgcggtgagccgagatcgcgccactgcactccagcctgggcgacagagcgagacttcgtcttgaaaaaaaaaaaaaaaaagagagaaaaatagaattatgctggggtaagaagtcaatgcaaattaaccttgggaatctcttctacttggctatgagctccttcaggaaaaagactctcttatttatcttacagtcgaaggctaatggctcctggcacatagtaggtgctgaataaatgtttgctgaataagtgccttctctttttaaaaataacctgtttgtcccttcagtggggcatatgttctttgaggtttttttgtttttgttgttgttgttgttttttttttaactgatgcttaaaagagggtctgaaacttttgtgttctgtcattttcaaaataccctctaattataccctaatagttatataggtatcatagctagaatttcccaacaggcaggatttcaactcactgtttgggtcctgttactttctgtatatttttataactcagttgtaactaaaaaaaaaaaccctcataattgaaattctcaagaacttttctatttactggcagtatattaatatacacaaatgcaaacacatttattattctttgtcccctatttaaaaactgaataacaacaagtgtcaacttttaaaacccatcatgcattcttcaggcttcaccttaaccccaccttcctctagacttagaagctccaaaatatcacagctcacagagaaatagagcctgcaacaattaaccaacttaattttcacagatgctaccatcaatcaatacatattacatattaattttcacatatgctacaatcagtttttcacaagcttcactaaaaaggtcagtatacaccgaaccaaaaatttagcagttttaaggattaatgaaaactaagtagatactacttcagaattatgaatctgattgtcagccaactcagggtctaaaaccttatggaatgtattactactgtatttactgatcatgcagttgaatgcctgctttgtacaaagcactgtggtagtgggcggggggggcggggcagaccaagactaagctcagtacagataactggggaatcaactcacactacagtcgttgaaaaaataacccattattataaagaaatgcatcaaaacaacataatagattatacaaagaatataaatatataaatatccactattatttctgaaaggaaacttatttctcagatgtctgttagggttgtttggctgagaaggggggtgggtaaaacaaatagtacgcagctggtggaaagagaaggactataagcaggtggcaaaagggaaaacagtagtcactgggggtcaggaatctgaaggtcataccacagggtgacatcacagaaaagagagccctgactacactttaagagctcccgaaggggaaattgggaggtagcatccataaggggagaagtacccccatgtacagggaatgctacatctcagaaaagaggatcttgcactgtgtctacgggagcccatgatgagtgtaagagaaaagggtcaaaaagtctctttgtgactgatgtacggacaagaagaatggtgtttctatcctgcatatgcaagaggacttggaggctttctgtctctcattggtacaaactccctgaaccaactggagataaactctgttcatcttctatgtggtgaaagttgactgtggaacaaacagacatactatatacaccaacacacaacatatatatgtgtgtgtatgtatatatatagtatgtatgtgtgtatgtacatatatagtatgtgtgtgtatgtatatttatagtacttgtgtgtgtatgtgtgtgtgtattcctactataatacattcactgccctcagaggaaccttagtctagtggaaatgacaaaatatgtccacaagtaattagaatgaaggtgatgtgtctgaactcaacaaaaggtagctattagaaatcctcaggaagcaaactctttcagtgaaacttaggaattctcattaaagataagaaaaaaacaaggacacatactatcactggtactacttgatatggaactggaggcctcacctgtgcaatatgacaaacattaataaataaggatgaaatacaggaaggaagatacaaacattaaatctgtttaggaatgatacaattgcctacttagaaaatttaagaaatcaactgaaagatcattagaagtaatgttggtaagagctctggtgagacaactgtaatactcctaaataccagaattatccatttagaaaaaacaagggaaacccatgaaaagaaaatataccataatatatttgggaataagtttaataagaaatgtacaacacatccatccatattaggatagatttcagttgtaatgaaaaaactaatgaaatgcaaagagatgtaaagttcctgaatgggaagactcaatatcgcaaagatgtcaattgtcctgagactaattcataaattcaatacagtccccataagacaatcagtgggattaaaaaaaaatgaactctacaatcttagcccaagattcatgtgaaggagaaaatgctgaagaataactaagacaatttagtttaaatttttaaaaagatgatgagaggagtcttctctttatagatgatatttactacatattagtactcttcagaaaggttttgcttgtaatacctgattgaatcctcacaacaaattcataaggtgagtaccactattaattcattttcaagatagggaaactgaggcaaatcaagcaagtaacttgcttaacgttccatagcaagtaagtggaagtggcagagctgagatctgaagccaggcactgtggctctgaagctcatgctcttaagtaccctaatagatggctcatattggcacaggaaatcgataaatgggaaagaagagaaagtcccagattcacacacatatcaaaaatttgatttttgaaaatgatggcatttccaaaaaatgggagaaatatatctcagtcaatacatggtattagtattaataactggctatctatttggaaaggaaactagtaaaatccctgtattagttttttatcattgctgtaacaaattacccaaagttagcagcttaaaacaacacagatttattccctcacagttttgtaggttggaagtttgagggagctcagctggatcctcagctctgggtatcacaaggtcaaaatcaaggtgtcagctggcctgggctcttatctggaggctctgggggagaattcacttctaagctcatttgggttgttggcagaattcacttccttggcactacagggctgaggttcccatttcctggctggctgtgagctgcgcgtccctctcatctccttgcgactgctattcctcatcatgttgtcctctccctctttaaagtggcaatggcgcaatggttcttaggcttcaaatctctctagcccccccgccctcttttgccacatttgccatgttctcctgcctccagctgcagaaagttctcggcccttagtggtcatgtgtctggatcagccccaccacttggataatctgggatcatctgccttttttaaggttacttattagtaaccttgattatatctgcaaaatctcttgcaatgcaatgtgcatagtcacagatgccagggactggggtatggacctccttcaggggccattctgtctaccccaatccttctcccacataatatatcccacataacataacaaatttgaggtagattaaagagttaaatgtatgaaacgaaactctcaaaagtataagaaaataaaagagaatatatttcataatctaggttagagagtaccttcctaagcaagcttggaaaccatagggaaaaagatagaaggtaatcttctcaaaaaattaaaatattgaataaaaaattaaaagataagcaattctgaattctgagaaagtatttgcaacttatctaactaacaaatgattaacatacagactatgtaaaaaataaactttcttttttttggagttggagtgtcactccatcacccaagctggagtatagtggcacaatcttggctcactgcaacctccacctcctgggttcaagccattctcctgcctcagtctcccgagtagctgggattacaggcgtgcgccaccaagcccagctaatttttatatttttagtagagacagggtttcaccatgttagtcaggttggtctcctgacctcaggcaatccgctcgcctcagcctcccaaagtgctgggattacagatgtgagccaccatgcccaaccaaaaaataaacttctatagatcaaattagaaaaacaaatcaatagaaacaattagcaataaatgtgatcaagcaattcatggaaatgcaaatactttccactcttagtaatgaatgattagataatccattcccaggtctgtttcaaaatgttaggcaaggcagggaagaattatggggtcaagatcctggagatgacataaagcagaagaatttgtaaagctggcatgtggggacatttttacatggtggcctttgccaattctagagtggttggtgagaggctgagaagctgaacaaatctttcttttaacagtttcacacacaaaaaatccaaagagacaaaaattgcagtccagggctcactcaggaggagtgtctgataaaatccctatactttgggtggattccaaagggctacactctaggagtaggagtgaattggaaataaaccagctctctccagaactgaagtttagcttcaagtcatctcaatctttgaaaataaattaaggctattcaagattacaagtgccactacctgtctatctagaaacaaatctaagttctctggaggaaattaacatcatcctaggtcttaaaattgtttctataaattttcatataaaatatctggcactcaatcaaaaataggcagactcacaagaagcaagacaacatgccaagagaaacaaaagacaatgaaacaagatccttgtgagctccagatcatggttacgagacttagactttacaagaaccaagacataggtccaacagaataagaaaaatgattgtgaattttgatatagaataagtaatttaaaaagaactaagtagaaagtctagctctggaaaatataataagcaaaattaagaatgagtttaacagtaggttagacacagctaaggagagaattagtgagctagagactgggtaaaaataaaatatccagaataaatacagacataggaaacagggctagaaggtctaatatatacataattgtatttccagaaggaagacagagagatagagttagacagaagtaaaagtagaaaaatctaaataccgtaactactaaaaaaagtatatctataattaattacaaatcttccaacaaagaaaagtctaggcccaggtggcttcatcagtgaactccaccacctatattacaggtgttcaccaccatgtccagctaatttttgtatttttattagagatggggtttcaccatattggccaggctggtctcgaatgcctgacctcaagtgatccacccacctcggcctcccaaagtgctgggattacaggtgtgagccaccatgctcggtaccccaaatattttaaaggaagaaagactatcaacttgatacaaattcttccagaaaacagagacagaataatttgttttatgaggccagcaaactttaacaccaacatccgatgagaatattataataaaagaaaactataggccaatatccctgagaaacatagatgcaaaaatcctaaacaaaatattagtagaccaaaatccatctacaggttaaaaaaaagggataacaaatgggattaattccatgaatgcaatattattatattattaatattattatatcaataacattagaaaataaacctgtaaattttactgcattcactgaataagaaacaaaattcatatgattacttcaaaagatggagaaaaggcatttaagaaaattcaacatctacttgtgattttaaaaatggaaaatgaactcttactaagaatagaaagaaaattccttactgtgatgaaggcagtctatacaaaatcaattgtatttcagtatgtcagcaacaaactgtgagaaaatgcaatttttaaaaatgccatttaaggccaggcgcagtggttcacgtagcactgcacactctgggaagccaggggtgggcagatcacttgaggtcaggagtttgagaccagtgtggccaacatggtgaaaccccatctctactaaaaatacaaaaattagccaggtatggtagcatgtgccagctacttgggaggctgaggcaggggaatcgcttgagcccaggaggcggaggtttcagtgagccaagatcatgccactgcactccagcctgggtgaaagagtgagactctgtcttaaaagaaaaaaaaaaaaaagaagccattaaaaatagcattataatgtgttaaataaataggagcaaatcctaccacccagaagatgttaaagatatcttcatagaaaatgtaaaacagaaaaattaattaatgtttaaataaagtagagggatatactatgttcacagtaatgactggaagacattagaaattgacaaaccaagtctaaaatttatatagaaatcagaagaacctaccactgaaatgtaaacttcacaagggcaaagattttcattcggtttgttcagcaacgtatatccaggccatatagtaggtgctcagtaaatgtttggtgaattgaagtttcaaagtgtctaaagagtttacagtaagagttcacgctgagcttcattcagttaccatggcacattctgatataccatctcatttaccttcctgtttatgaaatcacacaaagcctcaaaatcttatatgctgaatggagcagttgggatcattcggtttagtttttcattctttcttcagggcattcaggcaaataaaatcttaagctgaagagtagaaaaataagataaattgctgctctggtttcaactgggggagcctggcctggagcaccaccccttggattatcaaccctaagaaacaggacaagcatctgaacatgatatctgtgcccttcccaacatggctgctacctaactgagctgagaagagccccccaaataagtttgtcagggccaagacaaacagattgcaaattccttcttattaataataaaaaactggacaatctggctgtcagcgtgctctttacctcctatttcttctcaccattttagaataaacctgtctgtaaatctcacatacaaaacctaaaaaggatctttaaactatttattttcctttattataatagaagttcctagagtataaccacattttctatgctatttgtatatactgagagctaagtacgtattaagttgctggattcaaaacaaactttgtacttaataaaatttaaatgatgccaattacattatattctttactaattcttagtttttcatttaattcaataagttacatgcatttgaacactttctaactatatattttttctactggaactatgccttctaattttgtatataaatccaacaggatatctacatggaacatacatttaaatggccttttaaacttctgaattgtctgttgcattgaaaaatcaactttctttccttgtttctagtttaaactgacgtacatctggtacctttaaaacatctctacttcggctgggtgtggtggttcacgcctgtaatcccagcactttgggaggctgaggtgggtggatcacttgaggtcaggagttcgagaccagcctggccaacagggtgaaaccaggtctctattaaaaatacaaaaattagccaggtgtggtggcacacacctgtaatctcagctactcaggaggctgaggcatgagaatagcttgaacccgggaggcagaggctgcagtgagccaagattgcgccactgcactccagcctgggagacagaacaagacctttatctccaaaaaagataaataaataaataaatctctgctttttcatttgtttgccaataaacaattgcaattgcttctacctcaaaatagccctttctcaacagaaaaagggctggactatagtaaaaaaaaggaactgcaagttaagtggcccctcggaatgtttgatacgtttttccaaacatgacaagcacaatcagtagtcatcaaacatttctctctgctgactcaaccccaccctctttttaacatcactgtgttgatctctactttctctttctacctgttcactgaattctatgaattcagtgcttagtagctgtcagaacaggaagccttgatagaatactgtgggaacataaacatatatattcctttctatcttcctgggaaactatatttgatcacccaggttaatacttgataattctattctgcttgcccaccaattttaaaaggtgggatagaacacatcttggttttaagtttcttctattttattctttaagagcctccataatttacttgtttggagtaaatcatatgtcttgatcgaaaacataatttttaataaggctaaaatgaaagccaaaactgtcttaaaaattaaacgaaaagacatgagactataccacaacattactccattctaagaatagaagatgagacccagccccaaggcaggcaaagcctggctttgaaccctccagtcccaggtcagagatctgtgtgctcctgcggccctccccgtggtcttcgtcatccgtcagtattcattgcagggacgaagagccacttcaacaatgtagaaaatgctttatggaaaaacagctgcagtgatgcagtcggtgctttgctgacacgtggatttgatatgtcagcaaagcacaggattaaaaacatgcagcaagcacatagaggatcctgcctcttctctcctcccgcagcacactcagcccagtgaggttaaaaacaaagagaatctcaagaaagcaaagatgaaacagagcacgttaacaccagaagagtgctttaagtgatcctttaaaaatggcattgcaatcattgtgtatggtttttagtgagggttttgggtacaagtgtttgacttgctttggcgctttgccaccaaaatctattagaataactgatttataagaaatattttgataagatgtgtatttaataaaaatactaatgtccttgacactgtggttcaagcttttttttttttttttttttttttttttttttttttttttttcagaaaacagaggcaagtgttcaaactgtcacggagaataacatgtggccaaaattacatgtggttctatctctcataacaagtcttagaatgatgcatcataccagctgtctgggaacaaatgtattttgttggcatgggaacaaaagaattagtctgaattttgtaattaaactgtggttattaaaattactcgaaacaaaccagaataataaccattaaacatgaaaagtcaataaaagtctttgaattacatttctgttgcaattcctgttttcataacgtgctttgggatgaaacatagctttgagttgttagtacttttaaatagacttcactgcagatgagttagccaacagcagctaagactgtgaagttttaaaatcctttatggaaaatgaaaattaaaggcttggaaatctgtagaagaccaattctttttaacaattgtcacaattattgcacaattgattttctgtctctatagcatcttcttctttaaggctgcctgtgactccatagatttgttggttacccttgatgatgactgaggtggtttaaagataagcagtgctatccactgaaagctttaagtttattgattttggttctcctaataaccatgctactcctggatagatcactgggcattgtgggaggcaaatcaactctttgggaatacaaatgatactagttgtaacggtataacaggcggaaggagctaaggagcttccagagtcgtctaatattacccgaaagctacttatactaaagggaccaagttttattctttaaaaacccagagacctaggaaggaatcagcagaatgctaagttcatctatagagaaaaatcaaggacttttttggtgtcttttctgctttggccttcttataggagagatttgaaagaaaaatctgtcttgttttagaggagagcagaaaggtgggtgccacgggcagggcactggcattttgctttctcttcatctttccctgacctgtgaatgctttttggtgctataatgtctgaggaatagctgagggcccagagaagccatgaatgatcctaccagatgaaatgaccaccccggatgaaaatgataaaagaatatctttaatatttgttttgataaaagtctagacaagaatacactgagaaaaagtcacttagaatatgtttaggaggcccaataccaagggcctgtgatcagtacccaagttcagcaacttttggaactcttcgtcctcaaagtccctgtggcctgtgatgctgctaattcttcctccctccttctctccatctgtcaccctccctctccctctttccatcccgtccttcttcctcccattaattcaccgagcaccattgggcctgatgctgggctaaacgctgggatacaaggataaacatgacacagtcccagctcaggtcccaccctcaaagtgtaccacctactgagggagtttgatggaaaaagctttaatgcggagggcggggaggtgcattttagtccgttctcacactgctataaagatactacccaagactgggtaatttataaacaaaggaggtttaattgactcacagttctgcatggctgggaggcctcagaaaacttacaatcatggcggaaggggaagcaggcaccttcttcacaaggcggcaggagacagagtgagtgagacaaaggggaagagcctcttataaaaccatcagatcttgtgagaactcactaacacaggaacagcatgggggaaactgcccgccatgatccagtcacctcccaccaggtctctccctcaacaccaggggattacaattcaagatgagatttgggtggggacacaaagtctaaccatatcagggggccacagaaagtgctgcaaaggcacagatagataaaagtgggacatcaggtgggcagggctgttttgaggataggggctccggaaagcaaaggccttacagagtgattcaattcaacaagcgctggtggatgccatgaagatgacagatcgggtccttaccctaaggggcataatgtctagtaggaaattctctttggttttcctgcctttaaattctcctggctctgctcttcctgcccattccttttcaatcctctttgcatcctcctctatcttctctggtcccttggctgtgaccctgcctaccaatctgctcatggccctcttatatccctctatgctcttctttgtcaatattatccacacattctgggcttctgctatatctgcatcaagacgactctgacatgcttaaagtcctagggctctttcttgacttctggattcagattttcatttaaatgcctccaaatgaatgtcctcctgctagcatctaggatgcaacatctaaaaaaatgatagtgtcattgtccactatataccagcttatcaatttaaaaaggcattattttcaacacattcctttcttccactctctaaatctctatattctgtgaatttttcctttttttaattttttttttttttttgagacaggatctctctctgtagcccaggctggagtacagtggtgcaatcttggctcactgcaacctctgcctccctggctcaagggatcctcctaccttagccttctgagtatctaggactacaggtgcacatcaccacacctggctaatatttttgcaattttttttttaagagacagggtttcaccatgttggccaggctggtctggaactcctgggctcaagcagcctgcttgtctcagcctcccaaagcgctgggattacaggcatgagtcaccacgccaggcctgaatttttcttttctttctttctttttttttgagatggagtctcactctgtcacacaggctggagtgcagtggtgtgatctcagctcactgcaacctctgctgcccgggttcaagcaattctcctgcctcagtctcctgagtagctgggattataggcacctgccaccgcgcccagctaatttttgtatttttagtagagacagggtttcaacatcttggtcaggctggccttgagctcctgatctcgtaatccacccgccccggcttcccaaagtgttgggattacaggcatgagccaccgcgcccagcctgaatttttgcttttaaatgcatcttcacatttaccctcttctttctaccccttttgacaatatccagctcaagccttccgtatttctcttgtgaccagtgatgtgaattttaggccataacctctgaattggtctcctttcatttcttgttcatcttccctgctggactaatctttgtaaaatataacctcagtcatctagcactccccagcaaagaaaaagtcccccattgctgacaactgctttctaacgaatgactgaactgctcagcattccatccagaattggctgctggtcctgacacacaacacagcgctcaataaagagtagacactcagtaacaaatgatccctcttccctttttttaatggatgaaatgaacaaaacgaactttctggtcttgttttcctcttcactgatatcacaccttctggccaagatgttactcaatgtcccttgaacactcggcatgttctgctcttcactctgccctctaactagaatgtccttcctctctgttaatgcccaggccagatgttcccttctccgctataaacaactataatcacacacgttgcatctctatgatgtttgatagtttttgaagtatttttacacactttatcttgttttgatgttcccaagaaccctgtgggaagatattttactaacattttactgattaggaatccattatccagaaaggttgagtggcttacccatgatcacatgattagtagtgacaaaggtggactgagaaccagcagcacttttcccactagatcacgacagtccttgaagcctcttctggtttctctccctgtgccttggtgagggtatctgggactctgcagcccacgagggaacctctttccccaccctgcaacccctaaacacacacaattaccatggagaccgtctttggtcactagtgtctctcctaaattagttgatgtgtctaggccttaaatatgaagttggttgctgcaaagctgtgatcgaaatgttaaagtgtgacttttagctattttaaaataatttatgagtcacttgtgcctgcacagtccagacctttaatgcttgcaaaaccagatgagacttacaactaaaccagctggctgcaaaaaaatactgagcagaaaaccaaagaggaccccgggggcaacccaagacagcaagacaaggtagaagccaggagccttcaagagaaggctggcagaatgctgattcctgccgaacagctttggaaggacccggctccccggagggctgcaagctcttgaaacaaccccaaattagcaagtgccacacactgcctaggcagtgggaccctaacctcttcctggttaaagatcctctccttccttcccataggatcagggaagacggaaggaaggaccagtgcttgcattctttctgcatattgtgattctgagcctccaagccatttagtaaaagaaccaacttccagctgggtgcggtggctcaggcctgtaataccagcactttggaaggccgaggcaggcagatcaccaggtcaggagctcgagaccagcctggccaatatggtgaaaccccgtctctactaaaatacaaaaattagccaggcatggtggtgggcgtctgtaatcccagctactcggaaggctgaggcaggtgaatcacttgaacccgggaagcagaggttgcagtgagccaagatagtgccactgcattcagcctaggcaacagagcgagactccatcattaaaaacaaaaacaaaaacaaaaacaaaaccaacttccattccacacctggggtctacattttatacacatcccatttactctatcagactgtaaactccttgagggcaaaatctataacttattcatcttcgtttcttctcagacctaacactgtttagcaaaatacacctgttaaaagaataaaatgttgagtaaaaaaagactgagtctcctgtgaaacactcagcattgtattttatttattagaacatctctaaagtattgtttttttctcactaatttgtttaataaaatatccttctgggaaactgagtgatcaatgtaattaaagctattcatactttcaaattttaagatagccagtttgaagcagggaattttgctctgtgtatgttaatatccacagattggtatgttagaatctgacattttttggtgtctttgttataaatacatgctttacacagtgttaagaataacaagaaaacttttagactatttattttcttccttttcttttctataatttatcaaaccaaattatctagtctcactgtgaataacgaaacattgtttgctccccattgtgaataatgaaactaagtgaattttagttttacccaaaatattttaatctgtacctgcacccgagtgacagatggcatatatccattttacgcagtgtttaacgcagtggaaaataatattctgggagtaagcagaccacttacagacctaccctgggtctgccactagtgtgttgtacattagggaagtcacatccttcctgatgactcagtttctttgcacaatgaaaaagtctgactcaagctctgatctcccttctttgatgaaattatggggttcttgctcagaataaactggaattagaaattattacctcctcctatgaataaaaataatggtgattttaaattgctgtttattgattagagaaaacatcacgtttttgtaaagctgacttagaaaatttattttctgattctattggtgttatttctcttgaatctgcccaaggagaaagttaaccctttgtgccccacaatgagcacatcttccctggggactctgtgtgctgatctgtccgcttgaggggacagaagggagagttggtggcaccaaggcatgtggtggacagcaaagatgccacccatcaagacctgatgagaagcagcttttggtttttaattaaaaacataacttttacaatgcctcattcatttcttgtttttatagaatcaaaacatagacatttttcttaaatgaaaaccagaaaccatttaaacatttttaaagcaagcaagttaaaaaaagcagcttaggattgtcttttgtaattctgccagtttcaattttgattccttaatgcaaccagtatcaggataacaatatttgcttgaaaagaaagagaagatagtcctcaggggctgtttcaaacacattttagttgttcgattggctgatgtgaggctagctactgttattgaagttgctttgatgaacagtgaaaaatacattcataatgtaacaatctcaacattttagatatccttagtaaactcatatttagcagatcctaaaaagtgtctgtgacaatagttctaatttttttttttttttttttttttgagatggtgtcttgctctgtcgcccaggctggagtgcaatggcacaatctcggctcactgcaacctccacctcccaggttcaagcgattctcctgcctcagcctcccaagtagctgggattataggcgcccgccaccacgcctggctaatttttgtatttttagtagagacaggatttcaccatgttggacaggctggtctcaaactcctaacctcaggtgatcggctttccaaagtgctggtattacaggcatgagccactgtgcccagcctaattctaattatttttgactacttgtgttagtgtcacagatttaaagggggacataggtcaaatttagataaaagattaagttaaatatggatgaatagtatttgttaaatatctattatttgttatgcagtttaattgaaacaactggctttttttttttttttttttttcagctacatcctaggaccttgtggaaagaacccaacatctcttggttacaaagattatgaaatattcagctttacccatgggtatttcctgacatttctttggtaaactgtagcctaatagaagatatcaggaattagtgtaagaaatattctaaaaagctattgtcactacaaagatgaaagtaactttgatgatcaaaaagaagtcaataaaaaaagactgaaagtagttcctgaatccttctctattgttcatttgggatttcttaatttccctactctcaatatattatggaattttctgtgtgaagttttgccatgaattaaattgatgtcaacaaaagttttaccttaagtcatattttaccacaaactagagaagccccagtcctccagggagcaccttttcctgcctttaagaagcttgtctcttcttcttcttttaattacaagcatcatctacagaggatggggctcagttgaccttcagtgacaattagacctgctgatttgacatgaacaaatccatgctcccatccgaggaggcattttcatctctttgacttggcacacgatgggcaagtgtgctgtgcttgtgtttcctttgctcgttgcttttctctgcccatggaaagtcaatggcatttgctcctctaccaggaagcaggaatacaatgtctgtttgcctgccatccttgataagtttactttctctatcattgctatccagttttttttttatttgctagatatgtaacttgaaaattgtcatggaaggagcaaaagtttggagttcagataaacctggatctgaatactcttctactactgtgtgatcttggatctactgctgtgtgatcttggatgagttaatcactctggattttggcatgctattcacaaaatgcagatgataatactgatcttacatggttattgtgaaaattaaatgaaccagtatgtgtaacatttattgtacagtgtctgtcatcttgtcagcatttgataaggtatagttattattaattttttttttttttttttttttttgagatggagtcttgctctgtctcctaggctggagcgcagtggcgtgatctcggctcactgcaacctccgcctccccagttcaagcaattctcctgcctcagcctcctgagtagctaggactataggcacctgccaccacgcccagctaatttttgtatttttaggagagacagggtttcaccatgttggccaggctggtctcgaactcctgacctcgttgatccgcccaccttggcctccctaagtgttgggattacaggtgtgagccactgcgcccggcctagttattattaattttttattctagtattattctattttgttatcctattgttgggtgtattacatagacattatataaaacgtatatgtatatatgtatatttatgcatctcatatacatgatatgtacatacatatgtgatatacatatgacacagagttcattagagagtaggaaggaattataggaaggcaagtcaattcagtaagtattaacagtcagcatctattaggtgcttactttcatcattttgtacaatcctctatcgtgggatcctgtttgtaaacatctccagagattaaagaagaaaagaaaaccttccctatcagccttacttttgtgttttcccttcccccaaattcagaataagctaatataatatgccaatattcctgtactgagttttacaaccaatgtataaacatctgtcaattcctatgactgtttctgtacataatggattggtggcacttagatcaatattagcaacgctacactcaacagctgagggcaatgcatttataaagggtttcatcaagattcatggtctctagtgatacatgttgactttttagtttaaattgtcaaaattaccactaagtgtaatttattataaccagaagagttgggtgaaaataatgctgtcatttaaaaataaaataggtcattagctattgtcacagccatactattctgggttatattacattattttgaaaagaatggaaagaaaaaggagaaaactaaaattcaaaagaaaatgtgatttatgcctctaagcaaaataatatccatttattttgaaatgatgacatagcagacactgttggctgcatactcaacactccatttcccctcctttttgttccagttttcattcttctcccagtttcatcaccagcaggtgggtcctgattattctaggctagttttgtatactcagttctttagccagggactgggtatgccaggctaagcatgtgaccttctctggccaatgacatgtaaagggagggggtagtttccaggaaagatttccttactcattaggccctagaaactggcagcccttttctgcctccgaatagtgcagatctgggcagaatgcctggcactgctgcagccatcttgaagttggttctagaatgaagccagcaccggagggagagtcatgagaatgctttacttgtggacttcttgttctgtgaggtaataaattgctttattttttatgtgaaccatgggtgggatattctgttacttgcacccaaagcatcttaactgaaacaggcaatgtgtaaacttgtttttttttttgagacggagttttgttcttgtcacccaggctggagtgcaatggtgcgatctcggctcactgcaacctctgcctcccgggttcaagtaattcccctgcctcagcctcccaagtaactgggattacaggcacctgccaccacacccagttaatttttgtatttttagtagagacagggtttcaccatgttggccaggctagtctcgaactcctaacttcaggtgatccacccacctcggcctcccaaagtgctgagattacaggtgtgagccactgcacctggctgcacacacttcttgacctagagaaagtaaacaagagagtcaaatagtaaaggagagggtacctgttcctgtgactccaattctttgtgttgtaattttttctctgcacatcgcacctgattagaacggttttctaattcatcttgtaaaacctgaaacggtataaaataaagatatcattaataattagcacacttggaaaaatagttctacaccatgaactggcactaaaaaggcctcagatctctagtttattactcttgttccaaagcattcaggcaaacaataccagacttttgtgtgtcaggccaagatgttttctgctttaagaatacctagtataaaaaattccaaagttataaaatagacaaattggcagatgtcaatcatatattaaaatgtctcatattcccagcacagaaccacaagcatgtaataaagcatatgtaataaagcataacactattgcaatgaaaatggctccctcaggacacctgcaatgtacacttacactctgaatatcattgtgacggataggaattgtaatatctgaccagcataacatttttcaaaattatattatgataatttgagtaaattatagcagccttaaaggaatttctttataaagtcagagaggatggtatggaacttgaggaacttgtaagaaatggaaagaggtgaactctttcctttgccaagtagctgtttgaaatagcattcaggttaatatgggaaatggaaaccacaaagaccaataattaccactgcatcaattactatgttaagtaaagagatgaactagaaaaagaacttgtagtttccatgtgctatttctataatgacactggattgtccattcaaacaatccaatgtaattacagaaatactacatggaaagttacagtgagcagaatgcatggggtggtaacagcaaaggtgccaaattcacaaaattcatttcatccagtcaatattagtgagttcctgctgtgtgtcaagaattacgataggtactctagacatagcaatgaaagaaaacagaccaaaaaaaaaaaaaaaaaaaaaaaaactccggtcgggcacagtggttcacatctgtgatctcagcactttcaaaggctaaggcaggaggatcacttgaaactaggaattcaagatcagcctgggcaacatagcaagatcttttctacaattttttaaaatttaattagctgggtgtgggggtgcaaacctgtggtcccagctacttaggatgctgaggcaggaggatcacttgagcccaggagtttgaagctgcagtgggctatgattgtgtcactgcactccagtctgggtgacagaatgagaccctgtctcaaaaaaaaaaaaaaaaaaaaaaatccttgcattcacatgcttagattataatggggtggaggtaggcaataagcaaacagtaagtgtattatataaccgtgatgagtgcagaagaaaaataaagcagggaaggggacattctggagtggtgtgaggaagaggggattgagattttaaatagatggtccaagaaggcccagctgggcgaagacctgaaggacaagagagagcaagtcacatgtaaatttccacaggaagagccttccaagcaatagccactgcatgtggaatgactccgagatggtatgtttgtggaagccataaggtcactgttgagagtgatcaaagcagcagcagtgaagtcaaggacataacagggttcaagtcacatcaggttacgtggagtcttgcaggtcaaaggctttagattttgcccagagatagacaggaagttgctggggggtggggagcaggtgctgctttcattgttgtctgaagagcagactgaggggcaaggcagaggcagagagcaggggagaggccactgtaacaccaggaaagggaagatggagagcggggccaggtggtagcagctgatgaaggaaggatcaggtccaggtatgaaatagagatgatggccctgaaggagtggaagcagagagaggaaaaaacaggaccccagggattctggcctgaggagctaagactgcagttggcattcacagagacagggcaggtgttgggggagaggagccggagctcagcctcagttggcttcagtttgaaatgcctattacacatccaggtggagacacgagttcagacacaatggctaaattagtgtccattaaagattcctgcaaacacaatgccagtcttttttatgtccagataaacagtggttcttaaccttttgggaggttctagactcctttgagaatctgatgaaagctatgtagttactccctagaaagagaaaaaccatagttttatgattttgcctctcactgtaggacattcatagattgcctgaagcccatctgtgaatggaccccaggctaagaactaatttaaaaagtgaaatggtctgtgaatgagcttgcatgctttagggtgtctttgatattagacttgatcataaatctacaactcaaccaggtctgagaatgagcttggaaatctctccattcttgaattgtctataattctgttgttgtgttctacttccaaaaggatgaatgcaatagttcctgtgcttgttgatgaggtagcctttcccccaccccctactttcatagctaccaacaaataggatcttatcagcttcttttattgcataattggggaaagtaatgattactgtattgggaagaatagttatctattttttttgtcaccactttttcctgctctctaatccatcctcacaccactgtcagagtgaacttcttaaacttaaatctgattatgttgttccctgactgaaatgcttaaacaacactccagccccgctgagagacagctctcactccttagcacagcatacaaggggcttcatcaactggcttggtctccagccacgctgtgccgtaggaagccttggcatgccgtgcagatgtcattatcagcaataacaacaggagctatcatccacggagtggattttatttttaacccttacgacaattttgtgcacccagtattattccatctatgttagagaggatgtaattgaggctccatgcagttaactaccttgctcaagtccatgtggttagcagtaagacactgcactggaattttttttttttttttttttttgagacggagttttgctctgtcacccaggctggagtgcagtggcacaatctcgactcattgcgacctccacctcccgggttcaagcgattctcctgcctcagcctccaagtagctgggattaaaggcatgtgccaccacacccggctaattttttatatttttagtagagacgaggtttcaccatgttagccaggatggtctcgatctcctgtccttgtgatccacccatctcagcctcccaaagtgctgggatcacaggcgtgagtcaccacgcctggcctggactggaattttaacatatttttgtaacttcaaattgaatatgtttgtgctactccatgctgcctctttcccactctgtactgattttctcttttctttgcctggaagtccctaccgcacctactctgctcaatgatgtaattgccctaatctatacaagagctaagtatggacttctctgggctttcatccatctagtgtttaagagaattaatttacatgtctgggtggcatgcaactgcagctcagggctctcctctcttcatctctgcaagcccagtgccaagccagctcaatgcctggtacacaggtgacactgaattcatgtttgtggaaggaactcataaacatttgaactctactccctaaagatatttacttcaatcatcagggcttctgactgtccttcatgtggcacatttaaccaaaggtgattatgtgtcctgagacacaaaatacacaaatatatcctccaaatgtctatatctatctctgaacacacacacacatatcataatgataataattgataatatattatctggtttctgctacaataaaaaatactcctttaattttatttcacagaagagaaagatggcatgcctctcccttctcttaaacgaagagttgttccccacttcctggcttctctccctccttgccttcacctgcagaaccctgagagtgctacactcggcgtcccacaccctgccccattcactacataccccgttacacctgccccctgtccccactgctctcctgagtcagttttcacaccagtcacttgtcatctaccaaatgccaaaaccagaagctaactttcttcctttttccacagaagcatttggccctattcacgcccaattgtgtttttctcttgaatcttgaggaaataattctgctcagtgaagtcaagggattaaaaaaaaaaaagaggatgctgcaaaagtgaaggccaaagacaacaggcctggaaagagggtgatggatatggagaaggggatgggtgaagtggaaccgttgacagggaattggaaaaaagggactcagagataccccaaggctttaagatggagtgaccagaaaatagtgaattcttgctaagcacaagtcagaagcggtggggcagtgtgctttctgacatgctgggttgaaggtgctggcgggacttcaaggaggaactattgctagactccaaatattgctagacactatccgtgccccctccaaattcgtatgttgaaatcttaacccccaaggttattaggagacaggacctctggcagggaatgtcctcaagaatgggactggtgcccttctaaaagctctgagtgaggtccctggccccttccaccatgggaggacacagtacaaagatgggtgtcaacgaactaggaatcaggcaggctctccccagaccctgaatctgctggtgctttgatcttggatgtcccagcctccagagctatgggaaataagcttttgtgtttaggagccaacctgtccaagggatattgttacagcaaccagagctcactaggacccctggctagcagatcacgttgctcagtgggtctgaacagtggggcatgctctcagacagaggtgcaaatgcggaaacttccttagggaagtttcctaaaatgagaagaggttctaaaacctgccctttgggtgatgcccacactcagacaggcagaggaggagatggaggccaagaaatctggtggaagtccagataggcaggaggcaattgaggagaagttaggatgacatattacggaaatctagccaaaagaaagttccaaagaaggcagggtaacataactagatctgatcctttttccatacttcacatagtgaacagactacgaagtcaaccatattttatcagtattattaaaatggaattcaaattacatttgcttttcaaaaaggcaggcctttaaaaatttccttataaagatgtaaagtgtgatctttctaaagttaatcagagaaagcagttgtatttagaaatgactttcgttacctattaaagatcagttaaaaaactgaaaagtcaccaaataatatttcactttcaaaaaagttaaaatgtacggcatgaaaggaaaatgacagtttatattggcagctggtcctggttttatattctaaaagattattaggttattagagttccaacctcagaatttgacataaggactatgtgaaaatgaccacaattgctcaataagtacaaccgcggactttaagttgtgtcatccttattcaaaaaagcttcaaatttgacatttcacacacacacaaaatcacaacttttagtttcttcctgagaaaagcccaagataattaaagaacagaatgtccaacactgggtcaaaaatatgaaacaaaacccaacttgaacagttaaattgtttattctgcagaactgtccctcctctcctagctctgcagtgttaactggcatcattactgaaaagacagttcttttctcccaattaaatctgcctttaaatatactgtaagtcagctggctgtgggaagctacaccgctcctgactttcagagtgctttctgctggtcgggaataaagaatgacactttccagaagaaaaatgtaaacgacataagcagctccacaagaacaatgagcgcacaccgcactctttaaaagggagagcattgtaggataatttgatttgttccaaatctgaaaataatgagagcaaattaaagtgtcaaaaattgaacatgttaatgggctcttcagggtgaggaaaaggacctggtagctaacatgcccattgaatggcacttgtgacagtacagggcttttctgtgagtttggggaaaaaagagtatctagtcaatgctattttaataatatgtatgaacataattcagctcaagccactccttaacttgtaaaaccacacattaaggaattatgtatagtcttaccaaagttttctcttgtagttctgcgtcaattaaacaagaataaagtgatggcagatacatgccttttaataatgaataaatgaaacacaagttcatttcaattataaagtggttaaaaggttttttaataaaggaaaactttattggaagagagaaatactaggtcacaatgataaaaacaattttttaaaaaatgttcccagaatacaaggtatataacagagagaggctttcagatgtagtactgtagcaagaccggacgtctttctagagatttctgctctcgcctttggcccacttcttagccagctccattccagcaacccaagagctgctaccttagtacccttttcccaacaggctgtctaagcgtataaattggtcttcagcttatagctcagaatattggtactctaagttcgtactagagaatacaatttcaaactctactttcccgtctttatcaaaactccatttatgagacatctggaaaaatccacttgcaaatcaagacagaatcatcagcagtataaaagtcacccttctgagtcagtggtcctggaaacactgtcctagcagagtggactgcagagacacattctcttacacattttctgtcatgcagcttgtagagtcgcattcttgcccccttttagagagtttcaaagcagttctcattgagttgaaatttaatgtgtttgacacatattctgcctcattctatgttgttacgtcttggtaaaatgctaatagtgcctggccttttcacaaatcatcatgaggtctctgagcacgtttttctgggcctgccctgcatgatggggcagagtgtaaatggatcttgtccttggttctgtccgtaggttcacccacatgtcctttgggaagtgggaaccttgaatgctatagtgttctgttatttaaaataaactggattgaatcatatgtaagcaaaaagagtgttgattaaagttttgccctatataaatacaaaactggggtcggtagagttgtggattttaagggccttgggtacagtctgtggccgtgaaacaaggaaccagatgaacctccgctgggtgaaacgcagaaaggggacttgcgagctgcaagctctgcaaaactgagttttaacaataagaaaaagccagagtatttatactgaagatgctgccaagaagaagtcaccctggcaaactgcgggcaactgcttgaagcggggtgatgggtagatggcggatctgtgtactcttctccctacttttgtgtatgtttaaaagcttccgtaataaaaagtcaaaacattgaaaaaagaaaaaaagtcccacttaaaaaaaaatgaggtcatcatatcctttccttcacgaggcttgaatttactatcctactttggagaaaacagatgattcatttgccactcagtggggaggagggatgcgggaggatttaccccatgaatgttttgaacacagaatgaagagaccaggggggtaggatgtgcatattttgactaaaggagaagataactagaagaggaaggcctatttttatttttattgaggtataatttacatacaatccaattcaatgtttattttttcatggtaatggtctgttttccatttaaaacatgtaagatgatttttaaatgtgtgtcatcaaatatttgttaagttataaaatcttgacgtaaacctctcttcccctggctgcttggtccttcagacagacgtgatgcctgagctgtgactacagtgaagagacactaattataaaggtgaaataagggtgactctcatttaaaccttaattgccttcttaataatgcccacatttgtttaagcagcattactccaattcagtctattaactgggctgataatatttctgatgagtaggtctccttttgccatgtaaattgacaccgaaacagtaaatgtttttctttctactactgctaaatgaaggctaaggtaaaatacaaataaagcagtaaaatctcactctattttcatgtgagatttacagacttattttttttttaatcatattgtaaacgactaggacaaagcaagaggatcaagccctgtcatccacacaaggagcgataaatgtggggctaccgaaagtgacacagtggcagcgtgacatttttactgggtggtctcacgggctatttacagaggccactatagtttctgttttattatcatttttaaataggctaaatctactaacaaaagtaactagtcttcttcaactgaaatgccactcaagatttcttttaaagcgatttcttcattcagacctacccaggatgaataacaaaccataaaaaaagttttattagtgattctacagtcatggaaaacaggttatgctgcagatctaaagccagagccgcagctactactgcagaggccactaatgcattcacaacgcaactgtataattattttcccctatggcttatgttcaggttttcagttttttttcacatccaagcaacacttattttttgttcaggttttcagttttttttcacattcccagcaacacttatttttttttcttaaaaaaacaaaacaaaacaaaaaaccctgataattctgtctcttttgtgatactgatgtgaaggtttttacccaatacatatgttactcttcacataaggcaaaattccttccacgtgaaaactttttagttgttgctgcgacaaaccacatgcatgagaaactgcactttcatatgagctattgctatagtacttattaggctactgattcaacatcaaaggcaaaaatactgtggccactatataaagcaagagtttttcttgtttgttattctccaagtacgaaagttttcactttttctctttccttctctcgctcacctattttcagtcctttaaaattcctaaaggacttcctttaaaggtcttaaaaatgcactttttaaaaagttaatgtttcctggtcttaacagaggttccaggaaaagaaatcatgttatttcaagactttgatgatctaaggaagccggaatctcctaacgcacctcattcatgttttcctagtcacacaaaagaccatcctgacattacccgcagctcctcttaaaggggccagtctatttctactcaggaaattcaaagcacattcccccgcttcgtggctctaaacagcttcacttgtgaacaagttcttatctcgggtggtagaaatctaggatcaaattcaagaaccacagctaggattttgcaagatcatagaggaatttcctcgtctggccaggatgataagcactcaaacttgagttcagtctctgtggaacagagtgttaactgttaaatcctcacagaccacccctcttcagtgcaagcccagggaagagggaggacccataagccattcatttaaatttcgattttcttacaaagactaattcacacatgccgtcccctgaacctgcagtatcatttccaatcccctccaccaaactgtgtatttctcctccgtgaaaactgaagattcatttcttccatgaaatatttcaaatacagattaaactatttcgcattgttattatattccctatatgataacatatttatagatctcttcctattgtgaatttatctaacttcttttctcattttaggctctgaacttcaccagagcagcggcctttgcccctccattatttgttaagtggtctctgaaatgcttggcaaagtgttatttacactacggtaatgagcatttactggtaacattaaccaactctataaagagcaagttgcctttcatttaaaacagttggggtactcccattaaaattctcagatttttttttcccccttaagctatatttcctctcattctgtccctagagaaaaataactgagttttacccagtctgctccctcgagtgtcagaagtggcctcccttcttgttttttaataataacacatctatcagtgcccttttttcacgatctagagggctggtcaccactgttgctctctcccttttgctaagtcccttctcagtgtctacactggcacgttgtctttacccgtttgcccttcaagaaattggccacatttcttttgtttgtttgtttgaagagatgggggtctcactatgttgcccaggccggagtgcagtgactcacaggcatgatcatagcaccctatagcctggaactcctgggctcaagtcatcttcctacatcagcctcccaagaagctggaactacagaggcgcaccactgcacctggctgtttttgttggccacatttctcaagtgtttgactccagtacccttatttctcccccattagtgaactccttcctcatcagtgatctgattttggtttctaaccagttatgagacttgttctctgcaaggtcagcgatgattctcttactgatgatccagtggccttttccacaactctattctcctggacctctctgttgcaccgggcactattagaacactctacttccagaaatccttccctttgacaccaccatgtcatgctgtcctcctcctccttcccacatgctttctgctcctcctcctcttcctcctcctcctcctcctcctcttctctctcacttgcggatatttccctaactaggttcttacctctctagccttctttctatacactgtgtccttcagatcattacttccgtaagttaatggaagtatttctataatctgggcatatcgcatgtaccagacgtggtactaaacattaccctcaaaaagcatctaatctaatgtgtacggcaagcttataaaggaactattacaataccacatgagcactgctaaaaagaagtcttaccaagcattgtgactgaacacaggaggaaagcaacaaacgccagggaaagtttagacagtgagaacttcctcaaggaggtaatgtgggagctggagggtttcccaggaggagaggagagtggtcctggggagtgaatcacagagggaaaggcatggtggcatagacctgcaatgcttgttggctacaccgaaggcatggccaagcagaggggtggcactgaagcaggagaggctacatgggttgcggctcaaacttatcaagtccaagactaaactcaagggtcttgtgtgccaggaggactatagattttaccctgtaggaatgggaaccacaaaagggcctaagatgatcagatttccaatacaggatgaacattcaggtgacagtgtggaaaatggtggcagggaggcctgctggggacagttaacagagtcttggcaagacatgggtgaatctatgggacaagacagaggcaaggatcagattccactcagccctctcagcatataggagaaaaccaggcccagaaaaatacacctgtaagcttcacgatcatttgtaaaaagtccaggaatacagaatgaggcttaggacattaaattttcggtcaatgagaaatgctttagaaactctaaaaatgaaaagaataaaaaagcacaattttacagactgtgtaaccaaacatgcaagaaaatctgtctcaggagttcactctgccatggctgggaggccattaggaggccatgtagtatcacgtgggagatgagcttgatttggacaagagatggcgagaaatgatgggcccgggggaatgcatgtgccgggatggcagcagagccacaagacaggttgcagggcttggtcatgcaacgaatgtgccaggtgcaagaaggaagtttaaagaatgactctgaggctttcagaataggtggctagggtgctgtcattaactaagacagagaacacagtagaattaaaatatacagaaaggaaggggaagaataagtttctgcatgacacggattcaacaggaatgatgatgccaatggcttgaccattagagtatggtgtcaaaaaagaaatcatggaaggaacagttttggggaagtaagatcatgagttccattttaaagtcactgagtttgaatgcatatcacgacatccagctctcctgcctgatatgggcaacagaaacactagctctaactagggcttgcctagtgacgactcctatactcatctccatacccaggatcgcacaaatcctctaatctgacatctccaactgtctctcttatgtgtgtatatggtggccttaccatcatctcaaacttccaagtccaagactaaactcataattttccccctcaaccagcttcccttccacctgtcctgctgatcaatgacaaagtcattcattcaattaccaagttcctggttttaaatctcacaatcatttgtaagccctactctctctgttctccctcctagttagttgcccacattccttcaacttctttttttttttgttttttttttttttttttgagacggagtcttgctctgttgcccaggctgtcactgcaacctctgcctcctggcttcaagcaattctcctgcctcagcctcctgagtagctgggattgtaggcacccgccatcacacctggctagtttttatatttttagtagagatggagttttgccatgttggccaggctggtgttgaactcctgacctcaggtgatctgcccgcctcggcctcccaaaatgctgggattacaggcatgagccactgcgcctggcctaacttctatttgaaatgactccactctacgtcctgatttctgcccaccaggattccagactctttcccagttgtgtcctcctgcatcctggcatgtaggatgtgttaagattagcatcctgcaccctgcatccttatcctgtcaaggttaaaatttcttccctggctctgaatcccttcctaaactagcttcatgtatctatctggacttctttcttactgtgctcaatatacaggaatccccatttatctgtggttttattttccacagtttcagttacccatggtcaactgtggtccaaaaagaggtgagtacaaatacagacaagaatatatattgtgagagaggaaagaaagagagagaaagaccacataatttttatcacagtatattgttgtaattgttctattttattattgttggtagtctcttatagtgcctaatttatatattaaacttcataataaatgtattagtccattctcatgctgctaataaagacatacccgagactgggtaatttataaaggaaagaggtttaatggactcacagttccacatggctggggaggcctcataatcatggcggaaggtgaatgaggagcaaaggcacgtcttacatggaggcaggcaaagagacagaatgtgtaagggaactgccctttataaaaccatcagatcttgtgagacttattcactgtcacaagaacagaatgggaaaaactcgcccccatgattcagttaacccccttccagtccctcccatgacacgtggggattattacaattcaaggtgagatctgggtggggacacagagccaaatcatatcaataagtatgtatatacaggaaaaacatatgatacatcaggttcattgctatctgtagtttcaagcaaccactgggatcttggaatggaacccctgtgcataagaggggattggtgtcctaactcaaagctgtcatgctaggtccaatatgcaggcactgtgctgtggctgtaacagctttactgactttcacaatgtccctctgaggtagaaacctcaccttataagaaagagtgaagggccagccacagtggctcacactttgggaggctgaggcgggtggatcatgaggtcaagagttcaagaccagcttggccaacgtggtgaaaccctgtctctactaaaactacaaaaattagccaggcatggttgcaggtgcctataatcccagctacttgggaggctgagacaggagaattgcttgaacctgggaggtgaaggttgcagtgagtcgagattgtgccactgcactccagaatgggcaacagagtgagactccatctcaaaaaaaagaaggaaaaaaaaaaaaaaaagctaaggttcctagaggctactcaaggctacccagctgcgaagtcttgcagacaggaaatggcccaggtccctctgcctctcagcctctacgttttgccaccaatgggcccagctccacacattgccctgtgagctctgtgggtcttatcttcatcatatctagaatgccattctcctgctattacttccatccttcaaaagccttctttgtccccaaatgctctggatttactattaagatatttagtctttaatctaacaaattaaaatgtacaaaaaaaaaaacccagaaaaacaagtttttgtgtcacagattcaacagtcataatgattccgaaggcttccctattagaatgtggagccaaaacgacagggtattacacaaagtgatgagttgaattatatcctccagagagacatgttgaagtcctaatccccagtacctcagaacgtggccttatttggaaataggatccttgcagacataatcagacgaggtcaccctggagtagagtgggctcttaatccagtatgacggacgtcctcacaacaagagacgcacaggaagaggttggccctgcgacgacagggccacagatgggagtgatcatctagaagccatggacaccaaggattgctgggaaacatcagaagctgaaagagacaaggaaggattcctccctagagccttctgagggagcacagccctgcccacaccttgacttcggacttgtggcctctagaactgtgagataatagcttctcgttgtttcaacccacccagtttttggttctttgttacagcagcactaggaaacaaatacacatgggaagaaacgtcccttgttttccacattttctcttgtaaaacgtgtaaaatacacacacacacacacacacacacacacacacacaaacatttctttcaactacccagtcctactagacctcattttacccatgtgagggccaacagtccaatcattatgagacaatccggaaaatggcattagggtattactatgttatattgatctatcggtattttcttaattttgtgtgtgtacatggtcgtatcagatcattaaggaagccactccaatagaatagatggctccttcttagctgatgaaagagatactgcttgaggtgcagaggtggagatcctcaggtgagcctgcctctcacacctcacattcacatgacggatagaaatcattcacgccagataaaatgtttttctttttttaaccttaggattctgtgatatctggagccaatactcatgaaggaagaagtttaaaactttccgtttaaaccacttagaatgagaggatttacaaagatcctgtttaatgttcagctgacacattgtcaaaaacgtttatcatgcaaccttttgaagtttcttccactccctcctagttattaaagcttggattgcagttagttatcaacaacaaagcatacacgtgatggtgtttttagagtcagcctttcagtttgatttctgaactactaagcaaaattcagttctcctgatcagaaaaatgattagtgacctacttttcatgctgaatgcacaaaaccgttgatttctgaaatcacttctatatggacctagggataatgcaagggacatggaaatttcatttgtatcataatgctccaaactgcaagaattttcagatataagaatctgccacttcaagtgaggctgtgattctttcagtgcaaatgaggaaatagtgacctacattattgagaagattcctctggcaacttaattcctaatgtaaatttcttcagattgagaataagcttcagttcgtgttttggcaaggggaataaaactctttctgaataattcaagcgaatactattttttgagtctgtacaatgtattagaaggtacagagttgggtaagacatagtctcaccttttacggcacttacattatcatagaaagtatgtgataaggacaaaaagcaggagagcatggtaagtgtgttaagtgttcaattgagagaacaaaaagaaaaaggaaggacagaggaagatgttcaatgacaccacaaggaagcaggcagataaatccagaatgtgggacattctacaggacaactgacttggtttctgcaagaagtcaatgacatgggaaaaaagtgaggaagggtctgctttagatttgaaaagacatgagagctgtaacaatcaaatgtaatgtttggatcctgattcagacaaatcaactgtaaaatggcattttaaagttaatttgggatacttagttatgaagtaaatattagatgatactaaaagataattgttcactgtcttaggtatgacaatggcactgtgtctgtgtaagacaatgcccatggtttctgagaggcattctgaaatacacagtgtaaaacgacttgatgtctggaatttgctttaaaatattttagcaaagaatgagggggaaatgacagagtaaatgtgaccaaatcttgatagttactgaaggtgggtgacaagcacacaggagttcatagtactattatctctacttttgggtatgtttgaaaattttcataataaaactaaaaaagaaacaaacattttatgtacagtaaaatgatataagaaaaacacaaagagactgggaacgtcttcaggaaggacgcagtatttgggaaaagccttgaataatagctacagttctgacaggcctaaggtggaaaggggaaagaattgtctgccaaagaagttgcatttgcaaaagtaaatacaaggaaaatgggggtgtgctcaggacaccctggtgcagtccctggagcaggacctggaatatgtgaaggggaggcagacctgaaaagaggaggccagagcacagtgaacttcagagcacaggctttagttacacttaacttggtgaaaaggagaggggcttttgtgcaatgcctaaaatcaagaaagatacacacagttacttcctagacatttacaacatgcgtcccaggcttaacaggttcaaaactggacgtattatcagttttcccactttatttccctctccttccactcacccctttgcctcaatctaattatgttcctatatattcagatctagattaacggaacccatattcacctagttatccaaatcaggaactgcgaggacacccttgaattttctctgccatctaaccatttaccggccttccaaatatttctcctcttcagccctatggctattgcccttgtctcttttcctctggatgatgactacactcatagatctcttcgttccaattcattattgccagagcaatattccgcatcatcttcaagtttctctatctcactgcacagtaccactaccacccacatgatctatcacattatccaaggcaaaaactcaggagatctctttgacaacttgcttctattccacatgttccctcccaaagactcctgtttatttgccactaacccctgtggattcaatctcttttaatttggtccacttcatgccatttttactgacattctctgattatattgtcccttttctggtctccatccattcctccgggctcccctcggtctcatcttcatacagcagccacttactttggaagtcattatgtaggagttatcattgaatccctttgttccctcactttaccctgccacattcaattttcactaggagtggcgcaggatgaatagaaaattataagtctttgacaaagaaaaaccttaaaaacatgcataacctacccacttctctccatctctagtactacctccttggtccaagtcatggccatcttttacctaaagatgactccaatagcatagcagtctccatctccctcccatacattctacacgtcaggtctgtccattcatctctcttacctgctcaaagttctccaatgacttacaattacacttagaataatatctaagctcctcaccatgcttagaaggtcctacaaggtgtggcttccacatgcctctcaggcttctccttgtaccagtctccactttggtccagccacacttgccttcctactattctctgaaccttacaaattcattaccattagcacttcccttctttcatctttaatctttctgattaaagtttcttgtcaggaacgtataagcattttcttgtcacactagcagtatataaggaatagaaaaatgtgtgttttacaaagaaaaactcttaatattgttttaacacctttcaaagtaactttaattaaagagacaatgtgcaaggtgaatcagaacttcatgtactgtgaaagaactggtgtgattccaaacacccagcatacttaacagaggaatgcaaatagtcaaaaatatattattaagcacaaaccaagactggttcttggcagtgtagccaaaattttaacagtgtagttgaaaatgtgttcaaccttaacctttcatctaaggctttcctttgctaatgaatcatgcctgtaactaaaacgctaaggttagcatggcttctttgaaatgaaccaccacaaaccaaacatctaaagcttaagatatagtgtttcttttcaaaactgacaaccccccgcactttttttttttgtattacatgaccagtcttcttgaaataagtgtggtctaggaaatctgacttttaaaattaattctcaaaaattctatttccccattgatgtgctgttagtatggtttgtcagtccaatttctgaaatgctaagtccatttgatctcccactaagggatcaaaccctattttaggacctaatatcaattttaaaaatttatgttttacctcagattataaaataatacaggctaattgaagaaaaatggaaaagcattaagagggaaaaagatttccataattcctgcactcagatataaccactattagcacagtgccttctttccacgtctttttcctattcatatgaaactggcacgttggctctgtaggactccctgagtgtaatcgtagaagcttctctctctcatctcccactgttcctttaatcctgcttagtggagacagttcttctcttgccccttggtgaaaattcagaagggtgccttgatttttcaggtcactctagtcctacagtcactttaaactgcagacaaagttttaaaacatttagatcgttctcaaccgaaatttaaatggttcttaagagcaatttaacgtaaggcaagacatatctaaaggattccagaacaccgttatttgacctatcatcaaggtacttttacttcctgtttgtctttgacccagggacttgaaccccagtggggtggtcgtggtgcctgcctcacacaccaatgtccctaatgatgactaagattggactggatgtgtaggtgtctcctggcctcaccctcctacttgttatattctgttctcctctgggagtatccctcaacgtctgttttatcctatttccccggcttcagctctttgttgcaggtctctgtgcatttttcttggcctgctggatgaatactcctcttcactctcatctcccttctgcagataaaggtcaaaataacaataatctcccctttatagggaaataagctgcctgaactccaggttcttgcaagagagtaaaacatcaaatctgcggcctaattataataaaaagattactttaattaactaacattaataaagatttgcaatatatatgttacaacaattcttagatatttgtatcagtctggtttcacactgctgataaagacatacctgagactggataatttataaaggaaagaggtttaattgactcacagttccacatggctggggcagcctcacaatcacggcggaagagcaagggacatcttacatggaggcagaaaagagagagaatgagagccaagtgaaaggggtttccccttatgaaaccatcggatctcgtgagacttattcactaccatgagaaccgtatgggggaactgcccccatgattcaattatctcccactgggtccctcccacaacacgtgggaattataggagctacaattcaagatgagatttgggcagggacactgcaaaaccatatcaatattcaaattttaattcatggataaaaccatcatctggttccaggtggaagcatgtgctttaggtgtgtgccatcagtccacattgagcggcattatacaaaatagctctgagaaacttgatactgcttttcctttaagaatattcttaagaacatcagctacatcttacagtttttcttccactgatctttctttgctctgcaatgtcttctacattgctaccaatgatctttccaaaacaaacctgactgagatcctctgctgaaaaatcatcagtagttctgctctatctacagaataatttcagacccctaagcatggcatatatacttgctactcaacgcctgctctgagagccagcagcgttgtaggatcttgagccctaccccagactgacagcatcagagcctacatcttaacaaaattcccaggtgacctgcaggcacattcaggtgtgagaagcacttatacagtgcacccttcatgagggtcctacagctgaaattcctctctggtgtcagtgctaggaaaagctgtgcttctcctgagcacttgacttggtttctattaaggacacgggctactgaaattcgatttcttcttgtctttagctgctatgaagcccaggccaaacatggagctctccttatagcagctttattggacttcatggcaggcattttgtttatgaattctattcttgatttcatattattttcatatctttttttctgtgattttcttattaatttttatccttttgtaccatatgcatctctctaagtcacctgaaatacttttagggatttggtgaggtatgagcccatgatatttgtatgcgtgtaagacagcaaggaagtaataaagtcaacaaatatttcatttcctggcctttccttgccctaaatggtatgtttaacaccagtgctaacttctcccaatccaacatgtctgtgtgtgcagaagcctcatgtcagatactttcgtcacaaacctagaggtattttccatagaaacctcttatgtaagaggaactgaagatatgaaggcaagagagcattggtgttaaggctcgtggcaggctggatgtcacagtgggaggtctaggtttctctgtagcttaagaagtgcactggccatccaggtcccagcttactctgcgtccccgctcttttctaaataaggactttctgctgttggtcttttctgtcatgagctgggctccaaagtggcaaccttcattaaaaagtgaaaactgggcgcttctgtctaaaaactaattaattcctgtggagacataagacaaaacacaaacaggttcatgtaatgacagtcaactgcttgtcatggcattcctgggtgagacagcatggctcgttggtggcgacgagtgggtggcgaactggagcttcactttctctctagcagcgtggctggaggcaggacatgtgacctctttgaacccatgttttcatctatatcacagcaagacatttgagaggtcatctcccagcactaaattcaactgtcatacgatcaattgagtttctagtattagagaggtcattagtctagtggtgaaaccttcaaatgcatggtagagtaatgaagcattcaaggtttccagtctggctgcctgagttggaatctctgctccaactctttgctagtcatgtgactttgggcaagttatttacatttttctgggcctcagtttactcatttgtaaataaaggaataataacagtacctatctcatatggtggacatgaggattattacataaaaacacaatgttagcacatataagagctcaatagatgttagttgctattttatcacaactggggaataagaaatgggcaaccatatttacctatatgttatatatcacacttttgttaagtttttgtgattatttttcttatggaaactctatattagggccatctaactgtatactgctgaccaagctggcactctccagctttttagaaattcatcaagattttatcaaatgcctgagtcaaagcatttgtgaagtcaaaacatttttaacataaatttccattccctctatctccccctgctatagtcacaaaaatgaacaaatggcaataaagtacaagaagtgcaagagggttgggagctcattcacgatcttctggtagagcagacagattccactttctgtttcaggtaccacgtccgttaccaaacaaccacacgactgaacacataactcccccgacactttgcccattaccaaagtagcatgtactcactgcatgcattttggcaaagtacaagggtagaaacaaagcaaaaataaaacaccactatcactttccccacagccagaggcacctactgctcaggttaatttgcatcacagagtccatcgactgctgcgagtgctgcatgcccagcagcccttccctgcttggtcagagggcactgccaccctcacaccaacatctgagagtcagcatgttgaaagggagacttaccaccaccctctgttcatttaatggataggtacttgaatgcccactgtgctcaacaaaataatttttgagatgccataagtaaggaaaatcagagtatgaaattaatggtctggccgccatggggcaattatgatcatttcttctgtaattcatggctatgatatacagaagatgaatagcggaacaaaaaataaacacctccttatccacttcttttagatctctaaggagactgaaatattctgtatttatatgtcaggtggaacgctgcctggagaaatgacggctaacattgcttatatctcaggcagaaatagtttcaagtacttttgatttatggcatattaaaaatgcttgcagaaataacataaaacaggacagggctattcgcgtcactatcctcatcatgtagttaccgccctcttctatctgactggcaaagcccagacaaacatataatttctgctgtgctgtggggcttcaaaagggctttgagcaacaacaaaaaaaaccctctgcttttttcaccagcaaatgtaaatagtgaccaaaatagtactagaaagtaagttgggttagaactgtctgggtcctgctctaattttcacttttgatgaggagatgtgaacaaagactttgccctctgtgtaggtgggtgctgtgggcgatactcaaaagcaagaaccaagtaaggcagagagctgtgcttatcggcagtgcagaactataatgaggcttgcattcatgccaaaaatcaccttcgccaagcaaaattggctaatgttgggtcaggaaagagaaaactggacataaaaagtaagaatggcagacataaggcacaaaataattggaaaacacattcaaagtatagcacactgacaactgaaaccacagtataatcaccatacattggtcattctcactttccctgcatactgtttccattgctgtgctttacagaaaggtaggtagacagtacatggcaactcaggattctggcagctttatggaaatgcataatatgtgagtagggtgtgtctttctaccagctagtggtggtccggggggttaccaggtaggcagacaattagaacctgtggaaatcattaaaattattacgtagccttctgaaattgctgtttttattctggggaacagcaaatccaaatctgcacaggatacaaattatattaactttggaaacaaaaacataataaaatctaaatatagctaatgaaaacctatactgtctaaagaacaatttagaatttattttaagagctgtaccaaagtgttgtgctacacattggttcctagaaaacatactcttgtgaaggcaaaattcaaatatttcacaaataatagttcgtttcaatccctccatttctttaacagctattattccctctcacgtcaagtcaattgactttctttttttctttttttgagatggagtctcgctctgtcgcccaggatggagtgcagtggcacgatctcagctcactgcaagctctgcctgctgggttcacaccattctcctgcctcagcctcccaagtagctgggaatacaggcaccagccaccacgcctggctaattttttttgtatttttagtagagacggggtttcaccatgttagccaggatggtctcgatctcctgacctcgtgatccgcccgcctcggcctcccaaagtgctgggattacaggagtgagtcaccacgcccagccgtcgattgactttccttcttccataaattcatctccaaggagctgaagaacaccaaagccacctcttctctctcggtctggccagtcttcatctgtcaattggattttgttttcttttttaggccacactttgaaaggagcctttgaatgtcagttctctaagccttgaatatgccccttgcctaaattatgcaagtatcctctaccttcccctcttcaaaaaggtttgatgattcccaagagaatgtatccctttgagctccaagcatcatctctctcctgtcactctcttccatacataggtaaacacacacacatatacatatacacgtgtgtatatgtgtatatatctctcttcatgtacatatgtacataaatcttgcccacaatgtaaagatgtaacatatttagttaattctgcttgttacatctaatttattctgggctgtgataacccaactgatcaaaatgtgaaaaagtcaacactacatattttatggatcttattagttttggatccatatgaatatcaaagtttttttttaataattattagccatttaaatgaagatgaacatctttaatagtatatatatctgtcggtttactcttgtcaccttactgtcagttcagaatgtgagcccagacctagcatcgctttccccagctcctaaaaattacatgactttgccgtcttcattcattagccacctgcgtacctagccatactatcagttctttcattttctctcctagcttcacctccattttggaaacccattcaactactcacaacagtattgtattattatttggaattgatgcaagtctgaaaaattaagcaatcccatattctggtaaaaatagcattaccaaatatttatatacaagaaaatattggtatatttaggcagaaaaaaatagtctaccctagatgatgtttagggcacatgtaggtacaatggaggatgaggggtaggcaggctagtggagctgttaggcagtggggagcagttgaaagcttttgagtaggggagctgtatgaatagacctgaatgatgatacatgattgacttatttgcaacggtaatactacaagcagcaggtggagcagaaggagcaaggagacccaggaagagtccaggggagaagtagtaagtgtaaagtggattagggtaatggtaacagaaaggaaaagagtaatacagagccaggaaacaactcatgtgatgtaggaagagagaagggaaaaagtcagctgacactctcagtccaatttaagtcaggagtaataaggatggaggggaaatatgctgagttctagaggccaaaagatcatccacgcagaggtgtctattcagtctggaacctgaagagaagccagggtcaggtgctcagtcgggattgttctgcaagaggaattagagttgaaattgtaggagtgagtgagtttgctaagagagaaagaatagagagaaaaacaacataaaactttggggcagaatttatagttagagtccctgaagagaaaagaagaggcagcaaatgtattaataaccataaaagaaatttttttttttttagacggagtcttgctccgtcgctcaggctggagtgcagtggtgtgatctcggctcactgcaagctccacctcctgggttcatgccattctcctgcctcagtctcccgagtagctgggactacaggctcccgccaccacgcccggctaatttttcatattttttagtagagactgggtttcaccatgttagccaggatggtcttgatctcccgaccttgtgatccacccgcctcggcctcccaaagtactgagattacaggcgtaagccactgcgcctggccaagaaattttaagtgtagtgtagaatctggggagtcaagggagaagaggatttccaggaggtggttatcagagttgaatgccgatcaggggagttagggggatttgtgatgaacattatccttacaatcatcacccacataacaatgatcacaagaacagcaacgactactacagtactactgttactgttgctaatactaaaaatatgtaggaggaagttgattacttctaagcatgtagttttattggttgatagatgtaaataaacaaatcaatttcttcattcaacaaaaatgtactgagtacttataccaaaccgagcactggatataaagcaaagaataagaaacgaacgcatggtaaaagcagagaatataggcatagccctactctttttctttctttgttttttttttgttttttgagacagagcctcgctctgtcgcccaggctggagtacagtggcgcaatctcggctcattgcaacctccacctcccaggttcaagcaattcttttgcctcagcctctcgagtagctgggattacaggtgcccgccaccatgccaggctaatttttttttgtatatttagtagagatggggttttaccatgttggtcagtctggtctcgaacggctgacctcaagtgatccgcccaccttggcctcccaaagtgctaggattacaggcgtcagccactgtgcccagccagccctatgcttttaagagttcgatggttgaaagagactgagcggggaaggtagagcggggcaggggagggactacttggagtcaagtcaaagttttagggaaagacctgaatctgaaaaagattatttaacctttatgtgtctgaaatactatattgtgcgaattgtaccgtgagactcatccaccatttataataatgtttctgttggaaaatgtgttcaaagtttccatctgggatacaaggaacacatccttccttgcaatagtcttggtagcgtaatcaattcaaaatgtggggataataatgaaaatgagaaaaggaaccaggagactatgaggaaaaaaaacaactgaagtgcatgatgctgtagaggggcatttcagggacaaaggggttccaaggcccttgctaggaacaggctggggcaagaaagtgacaggaatggaaggctgggagtcatgctttcctgactacaggtctggattctagaaatcatttattattgccatcccctttaaatatgaaattgcatttagaaccttcagaagccaggagtctgtaaacaatggtgcaaacaattcaaacccgaagacattctcagctgcaataaaatttctatttacatgttccattttttaaaattcctagaaaaatgctacttttatgactgggctctcattgggaaatataatttgctcagctaaataaatctgtatatttcaggacatgtaaccacatcacacttacaagtctttgctatgaatttaaaaaggttccttgcccctggaaacagccttttaaaggctgttgtgggcctcacgcaagtggctagatgggcggtattcagcacacatgtcctgtctttaatctagaatgatctcacaaacacaaaaacaagtcagtcccagaagagagaagattccgcccctcacccacaaaaaatactagaaataggacaaaaataaggttttgaaacttatttgctggttttcagaactgccatattatgacgactatccttaatacttatcttttcttttggttggtttttcctccctagcttttgaatcctagctcttccttctggttccagggcttaaccaaaaggcagatatttgacacttgaacacgaagttcagtgtccagcacagtgggcctactttatggatgctatacagtaaatacaaagcactgctttgcaaaatgtttgtttttcttctcaaaccctgtatcccaaactctcacagcttttgagttttaattttcccactcatgatttcttggaaagccagcaggtagagaatgtgtgctcaagtgaaggcatgggtggctgaaggtgaaaatgtttaaaagggtccctgacttcttggccaggaagaaataagcaacacaaaagcagggaagccaactgaactgaaccgtccactgacagtcatttaaggtggtgggctcactcattaaaaaccaaatggaacaacaaaaaaaatcctgtacattttttttctgataacttttctctattaatataaaatttgacttgtctcttcaactatccatatataactaaacaaaagcacgggggcataaaagtgaaattttgctatattttaactggaagttgcatttactatttaaatttcaatcaaatatttactatttttggctgggcgcggtggctcacgcctgtaatcccagctttttgcgaggctgaggcagatggatcacctgaggtcaggagttcgagaccaggctggccaacatggtgaaaccccgtctctactaaaaatacaaaaaatctagctgggtgtggtggtgggcgcctgtaatcccaactactcaggaggctgaggcaggagaattgcttgaacctgggaggtggaggttgcagtgagccgaggttgcaccattgcactccagcctgggcaacaagagcgaaactccatctcaaaaaaaaaaaaaaaatttactattttttctgtagaatataatcaatgatggggtttttgcaaagtacctccttcaactcatcccattacaatactatgttttcatgagccccttaattttaatgtctatttcagtggaagttcaatgagtatctcctaaattctattgactttattttgggagggtttagtttagctttctttctttttgtgatctatttgtttatgcttattgataaaatcaaagggatttttatgtcatgaaataatatggccttaacatggatgaaagaaaaacttggataaacattacaagaagaaaggaaagggaaatccaacattgcagaccttctagatagtttagggactgacgattgagaagggacagaccagaaagtgttcttatcttggggttaagcctgtaagtgtgattgttctcttagccctaaaaattttgtcagatgtttccacgtgaaaccttcagagaaacactataaataatttgcatcagagagaggtagagagaaagggaaagaaaaggcaagtgggaaaacagatctgaggactcacccccaagcatggaaaatcgaggatgtggggatacttaagaagttaaatttcttgttttctctgcatatgtgttgtcacatcactgaagaaagaaagtgctttctgaaaggaactctttcttgttgcatgcctttcacacaacagtgggtttacttgacagtgaacactaggcacggggctctgctgtgaacagccctgttcttgccaggattaggggccagtgggaggtgcaacagcacccagtccgttgcatctggctctactacagcaggagaaccaaagggcacaagaggtgaataaagaatggaacattagtccgggcgcaggggctcatgcctgtaatcccagcactttgggaggaccaggcaggcagatcacttgaggtcaggagttccagacctgcctggccaacatgttgaaaccccatctctattaaaaattaaaaatacaaaaattagcccggcgtggtggtggccagctgtaatcccagctgctcgggaggctgaggcacgagaatcacttgaaccctggaggcagaggttgtagtgagctgagatcatgccaccgcactccagcctgggtgttagagtgagactcagtctcaaaaataaaataaagaacataaaccagtcctagaggctggaatggtccaggaaatctgtctagaaacagagacatccaagatgggacctgtaggaagagtaggagttggccagaagaagggagaagaaacagcatatgccaaaggctgaagatgagagaaagctcatcctaactgaagattttttaaaagatcagcactggtagagggtgtgagcagcaggaaaggaagaggagacagagaggactggggcaggcagggcagccttgcgagcgcatctgggctgcatcctcagggccgtggggacccagtgaagaaagatcactctggatgtggtgtggaggagaggttggaaggggacaagcctgggggcgggagcctgttcagaagcaggggagggctagtactttcctgaactaggggaagggccttgtgaatgcacagaagaggattagccaagctgaggctcagagggctgggtgatggactgctcatggcaatgaaagagaggaggaaaggaagggttggatcaaatgggtggacactgacatgaaccgcatttgggaacacaggaacggcagcagcaggtttaagggggttcagataattatttccattttggacatggagagtttcagttttcagtaggacatgtcatctgttttgatatccagggaggttttggaaagggctagaacacactatgatctaaaagatctgggctagagatagaaagttgccagttgtcagaacataggtggtagtgactgaggttgcctaagagagattgcagagcctagtaagaaaaggaagccaggaacagtttccctgtggagcaacagggtttcaaggcaagagacaaagaggggccgtgaaggtttctaggaaagagctgtcagagaggcagagggcatcccattgtgtcagatacttcaggggagtcaagctggtaaagacagaggcagcaaggatgtcactggcaaccggaagagcagtttctgtggattgatggcaacagaagctggactgtaaagtaataagaaatgagcagggatggagtacagacagaagctagaagggaaacgggattaagatagatttatttaatatgggttacacttgaacatatctcaacacttattgaatagggcctttttcagtaatttaacagttacataaatatatgtaggacctattaagtagcagacactattccaatgcttttcaaacattagttcactcgattcttgcaattcctatgagacaggctttattgtttctctcattttggaaatgaggaaactgctgcacagagaggttaaataacttgtttgagatcacatagtttctaaatggtgggtctgggatttgaacctaggcagcctggttccagaatccatgcttttaagttttatctctctctctctctcttttttttttttttttttttgagacggagtctcgctctgttgtccaggatggagtgcagtggcatgatctcggctcactgcaagcttcgcctcccgggttcatgccattctcctgcctcagcctccaagtagctaagactacaggtgctcgctaccatgcctggctaattttttgtatttttagtagagacggggtctcaccgtgttaaccaggatggtctcgatctcctgatcttgtgatctgcccgccttggcctcccaaagtgctgggattacaggcatgagccaccgcgcccaggctttaagttctatatctctctttaacgcaacacatggaagataatctaagaggatactttaagccttaagaaaaatgcaacagtggtagcatttaaaaagactgggctccaggtaatacttcatagtttggcaaaggttgaaaaattacttaaagtagcacagagcctgacatcttcataccactgtgctggtatccttccaaaaataaagaatgctgctgtattgatctcttttatttatatattgatcatctagcatcatagaaacaaatcatttgaactaaatggattctcaaaacaactggcttcctcttagaaaacaaattcctcaggcttcttgcaaataaatcttggcataagtgtctttgctgagcttccacatctatgaggctgcaagagatcgttattgatcaacagttccttcctttggaacgctctttaaattagttagtgtttaaaaagatgccttttcaaataataacctcttttctaaattggccttagacattttgtttgcaaggaccactagcataattaaaaaaaaaaatcacagcaagcaacaaagccaactattgaaggaaagaaacatttctcagactgcccacatgagaaatggctttgctgagccccactctaaaagccaagggaaatttctgcttgaattgcaaggaaccacagtagaggtgagaaagatgctccatccattttagcagctcacatatattttaaagtaaaagtagtgttttcattttcttgcgcatttgactatgtggagtaggaggggaagaccaggcttagaagttctggatttgagacttggtgttgctaagagctgcctaaaaagaaccaggcacttaccctcaggtgggcttaagattttcatttttgaagtgggggatgagggtagaaagactgggaggtcaatagagccaattttctttctttctttctgttttttgagatagagtctccctttgttgcccaggctggagtgcagtggtgtgatcttggctcactgcaatctctgcctcctgggttcaagggattctcctgcctcagcctcccaactagctgggattacaggcacacaccaccacacccagctaatttttgtatttttagcagagacggggtttcaccatgttggccaggttggtctcgaactcctgacctcaggtgatctgcctgccttggcctcccaaagtgctgggatgacaggcgtgacccaccatgcctggccagtagagccaattttttaaagattcttttcagcttcaagattctgttaatcaatgaaataacatggaattatgatttcagctggtataaaagaaaacagattcacatgaatccagtatagttaatactctgcttattaagctttgttaagaacagaagaagaacggatgagagagaacacgatgtttgagaacagagtgatggtgagcttaagtggaaaactgccatttagaagaaaagaagatcagaataaaaacctagctagaaaaaatggggcataggatctgaaagacaagtctgatatttgaagtgatcggagctcaggatcagtcttcgtgaaaaagcattaggtcaagaagtgaaatggtagatttgtgaacagcaaggctgaaacagaggccacaacatggaagaatatccattgtctagctgggagggatttgaggtcaagcgcacattctgagcttctccaaataagcctatctacacagtatctaaccaaacaccatacagtgtgttccgaagaatacatgtgcttcagatgtagaacacaatccatcttgtgatgttaatgacacacttgttttatattcaaacagggagcccaaactgcttctgtgttctgttccatggtaggtagacatgaacttacaatgagatgctatttattaaccatgccaaagaaaaaaaactggccaaactcggagactttgtaaacaagaatttgctgacgctatttttaaaaacaaaatgaaatcagataagccagcttggaaaatagagaggaaagtaaatatatctctccaaagaacatcaatatttgctaaaatatggaataattagttttttaggcagcaatgaaatactacctacaaaaatgattcactgtattaaaactggcagtccagttgaggtcttgtaagcgttgtacaggaagccaagtttattgggaggaacctgagaagagctcagttctccagatgagagaatacaggctaacatcacttgcgaatttggaatgaatctgctactagaaacggcaagaatataaaagatgggaaaaaagtaattgggaagaaaagaaaaataatgcttgtctctaagaatgctgctgctttgttttatgaactagtctatttgttttggctccaactaaactcaagaatgtttctgcatattttacagtgtagtttatagacatcaaaggaacaatctcccctttcatcattatttacacataaaaataatgcaatttgtggtacatgtaaaatgttacttcttaaaaagctctcgagtctaatttattaattgcttgagatttaaagttaaacaagggtgagatgcaaatcatctgttactctgaaatattttaccaccaaatcctgttttattaatgagatgttgagcagccatatgaatatttatttaggtggttagagggctttatgaagaatcctacagcaagtgacagagacataaaagctgaagggttctgcttctcttgaaaaaatgggggttgttcttttttttaattccactttttcctctgtgtttccaacattaaagcattcctgtaacccaccaaccatcccggccttcttgctccaaatcttttgcctttgctgctactactgctgctattatagcaatagcctcccattgacaactcgggaaataacagcctggtctttttgggtggcaggacagcatcacattaatttttgccaattacatacacttgaaaaacatgatatatgtgtactactaggtttattttgcttaatttattgattttggttcagttccttagaaactgcataatttaccatgcgatattatagatttcctgatgcagtagcaacaagtcccttaaaaataactatataaatgtaaaatagaatgcgctagaaatgtctttaaattgttccatgatttataaggcacagttatgcagaatcagttatgataatacaactgtttattcataacttcacttttctctcagtagcatataactactattggaaaatatacttatatatgcatatattcattctttttctagaaatgtttacacacatgtacaacatacgcatacattctactttcttttaaaaaattatacatatgtctcaacctatacatgtaaatataggatcaggcacaatagtgtccgaaagacttctgaagtcaggtgttaaagttctacagcaacaaagatgatctgaaatgaagtccaccaacaggctggctctcagcctagtcctgccctaggggtaattcttgccatttcagtctagcccctttacccctcttccactgcacagcccctcctgctgcccccaaggctgcccgctccccacttgcagacaccttcaagctctattcctcaggttcctaaatgacttccttgccctcttcttctcccttcctgccccaaatacctcctcctactccttcaagtgagatgatctcatctaattgttaggaacaaagtctctgattgaacagtttcacattagagtgtgaattacttcaagtggtttaatatgttaatatatcaaggatgtctgaatcttaaaagaggagtttgttaaactgaaggcttagatatttaactaatccaagaactaacattttgtgggggtggggatatggggtccctacttcttttaacagtaaggttggtgttgatgtgtttaaagctgccttgaaaacaagcaataataggtataaaataaattaatatatttagtaaccagggattatatgtgtatatatatattttgagacagagtctcactctgtcacccaggctggagtgcagtggcacaatctcaactcactacaacctccacctcctgggttcaagtgattctcctatctcagcctcctgagtagctgagattacaggtgcgcaccaccgcgcctggctaatcttttgtatctcgtagaaatggggtttcaccacgttggccaggctggtctggaactcctgacctcaagtgatccagtcgcctgggcctcccaaagtgctgggattacaggtgtgagccactgtattagtctgttttcatgctgttggtaaagatatacccaagactgggaagaaaaagaggtttaattggacttacagttccacatggctggggaggcctcagaatcatggtggtggcaagagaaaatcagaaggatgaaaaaacggaaacccctgataaacccattagatcttgtgagacttattcattaccactagaacagtatgggggaaactgtccccatgattcaaattatctcccactaggtccctcccactgggtccctctcgcaacatgtggggattatgggagtacatgatgagatttgggtggggacacagagccaagccgtatcagccaccatgtcaggccagtatccagggattatattctttaaatcaatgaagtctttatgtttgagcacccagtactgtgggtgttatgaagaaacgaaaagtgtgaggcatgaaataatcaaataattattggctgggcatggtggcttagcactttgggaggctgaggtgggtggatcacaagttcaggagtttgagactagcctggccaacatggtgaaaccccgtctctactaaaaatacaaaaaatagctgggtgtggtggtgggtgcctgtaatccaagctacttgggaggctgaggcaggagaatcgtttgaacccgggaggcagaggttgcagtgagctgagattgcaccattgcactctagcatgggtgacagggcgagactccatctcaaaaaaaaaattattattaaggattaataacaggacctcatgaaagtgtaaggttcttgaggactggggcaatcagcagagcttcatggaggagggagataagaccttgagatgataaaacttgacaagtctgagggttaaagatgctgctgaggaggaaggtgaacagcatgagagaaggcaggttgcgtggctggcaaggtgcttgtggatagtgagaaccagcttgattggaagagaatgtgtgtgtcaaggaatagtgagaaacctggatgggctctgaaagctaagcagaagagtttgatcatgatgttataagcaaccctctaaattcaatttagtcatacgacgttttcagaaattaagacatcatcaaaagatataaaataaaaaatggaaagtcctattgcccccaaataatcactattacccatctggagacctactcaggacatctttttatgtatatgacatgctgcactcttttcatttattatatattagcaatcttgcctcattttcaaagagatctacttcattctttaaaaatggcctcataatattccattgtgtggatgtgtcataatttgctttccccagctttttgctcaaacaatcctgcaaagatattgtatagacttgcaagtatatccagagatagattcctgtcagggggaactgctggcccaaaggttatgtgcatttgaatgttggtagataagaccatactgccctccacagaggccacactggtttatactcccagaaatggggcacgagcctgctggtttccctgtatcttcatcattgaccacgttttcaaaatgaaaacttatactggtcgggtggcagtcagtctcttcaaaactttggacttctgatttacatttatttgattatgagtaagaatgagcattttttttttcataagtttgctggacattgatgttctatgaattctgctttcatgttctttgctctttttgtccactgggttgttagttttcctattgatttccaaaccctctttgtaagacaaggacatcacagtgatttaagatttctttggcagagttcttcacactggactgaagctgagagccttttggcagggatatcggctgagaggaggctgttttaaatcaatcgcaagttgagaagggctccaaatagggtcatatcagaggaataagaaatacattcaaggactctggtgagagacttgagataaattgggatgaaggaaagaaaggacaaagatgaactcaaagtttctaacaggaaacagaaagactggaggtaaccctgatagactggaaagaagggccaatttggaagggaagatcacaactcaatgttgtagatggtgactctgaaatagtagtgcatcttcaaaagaagatgatttacaggcagtgcaacatataggacccagctaggaatcaggccagggcttctgggaatcatctctatagaagtgacagctgacatcacagaggagatgatcttagtgtggaaaagaaaaggagaagcaaagcccaggacatagactcgaggaacacccactgggaggaagagagactagcagaagaaagacaagtaaaagaagtatcatataagctaagataagataagggttggcaaactacagccagctggccaaatctagcatttaccttggttttgtcaataaagttttattggaacatagccatgcccatctgttgacatactgtctatggctgctctcaggccacaacgttaaaagctaaatagcttcaactaggactatatggcctgcaaagcctaacatttttactatttggccctttacagaacaagcttgacaatgcctgttttagaaggaaaattgttggtcaatcaatatagtcaaatgctgcatagagctagaggatgattagaagtagaaaaacactgtggaatttggagaagaggcgataggttactctgtcaattttctatattatggtgggattacaaaagggactttaagagaatagatggaagagttgaatcatatacacatcagaaaaagaacaagaggttggtagctaggaagggttgcaagagaaacaacgccatacagtctatccacttgtctagagaccacactctgcttgttgggcttagctatgactatagggcctggagctgtgagtcaatttcatcaaggacatgggagaaagagaactgttgtaccagtggtacttgagtaaatgtattcaagtacatttcctgcaccttatgccattgtggtataattgcctatagtacagcatgttactatactgtaacattactgtatcattactgcactataggcaattatataaatatatctaagcaaagaaaaggtacagtaaaaatacagtataaaagatacaaaatggtgcacctacatagcgcacttaccatgaatggagcttgcgggactggaagttgcacttgtgagtcagtgagtgagtggtgagtgaatgtgaaggcctaggacattactgtacactactgtagactttaagatactctacacttaggctatgctaaatttataaaacaacattttctttcttcaataatgaattcatcttagcttactggaacactttcactttataaacttaaaaaaaaatttaaactttttgactctttggtaataacatagcttaaaacagaaacacattgtgcagctatacaatattttttcctttcttaaaaatttatttttatttgacagataataattgtacatattccgtttttctttatatccttattccataagctttcttctattaatttttttgtttttactttttaagctttttgttaaaaataagacaaaaacacacacattaggctaggcctacaaagggtcaggataattaagaagttactaggtggtaaggttttctcatcatttatttcattgtaatcttatgggactaccatcatctatgtagtccatcttgactgatatgttgttatgtgacatatgactgcatacataaatatgtgcatatacacctatgtagcatatatgaggctggtgcaaaagtaattgcggtttttgccattaccacaattacttttgcaccatctaatacatattaaattgatcattcagtaattttggttgctaaggcttacatttatgtcattcaatgatcattacgttcattatactgcctttgaactatctccgatacagtttagcattattaaagattaacaatgtccaagtagttttttgttaaatttttaaaattaaaaaactaaaattatccatatatattccaatagtttactaaccaaagtacttcattttggaccatgcaataatacaattaaccaccagcctgggcaacatggtgaaaccctgtctctattaaaaatacaaaaactagctgggtgtggtgacgcacatctgtaatcccagctactaaggttggggtctgtggagggaggatcgcttgagcccaggagttggaggctgcagagagccaagatcgtgccactgcactccagcctgggccacatagcgagatcctgtctcaaacaaacaaacaaacaaacaaacaaacaaacaaacagaaaaaccaattaaccatatatagtcacctagtgacttccaaagagtacaatttagccattggtgaagaggaatctactttcacctgtgttcttttgatcacactcttcctactcacatattcgtgtattcgctcatcaaaccttaattgattccttaacgtacacaaggcaatgttccaggggctaaaaatatctctcatagcacttgaaggattttgtccactgaacaaagaatcttatttgactagttttaaaataaaataaaaactgccagagaatagaatcggagggaagctttggggtaaaaaaaacttttgagagagaactgttcctttcttctccgctcatttattgctattgcttctccttgctctaggaagcaaggtcataattcacagccacagcatatccaagcctatcttccagagcattcttcctgaaaaatggcacttacgctttatgctactatgactgaatggctctgtctttctttctgagtgagcaggcaaaccttcttaggtgggatggaaaatacatttctattcttagcattattaattctaattcaggagggcacaaagaaaatgccactttccttgtgccctacggacgtgcatacaggggagacaggaattaagtaatgaacaggtcccaaacaatgccatttgatgctaggcatcgagatttcttcctgtttctcaatgctactaaaacaccacaatgaggtttgtaattttattccttgggaaattgattcctgtaagcttttaggacagtaagaattgcccaatcttatgaaatattctacaacccccaccccccgcccccaaccaagcccttctggtaacacagaccagattgctagatgtcctactggcagctgaccttgtcttgtgaactccagtcagtagccaagggagagaagcatcaatgctgtaaaatctcttttctatgcctgcaagcaaaaattttacaacatttcttcttgacatgaaatctctgcttggacatctggcttcacagtgagaaactttcaatacgctagcttcaaagaaaggacttagccctggtggtgcagtgatgccagaagaatgttccacagtctctttaaagaactatttctaacgtttccccaaatgaacttctgtgagctcagtggatagtgccaactcacatttagataacttggctttggcatacagccttttgtgggcattgcccctggagtatacaaattgtgttcttagataatacaggcataccgcggagatactccaagttcagttcctgaccactgtaataaagtgtataccatgataaagagagtctcgcatatttttttggtttcccagtgcatataaaaaagtcatgtttacactatactatagtctattacgtgtgcgatagcattatgtctaaaagaacaatgtatataccttaattaaaactttcttattgctaagacatgctaacaatcatctgagcccccagagagtcctaatctttttattggtggagggtcttgcttttgatgctgatggctgctgactaataagggtggtggttgctgaaggctggggtggctgtggcaatttcttaaacaagataaaaataaagttcactgcaccaattgacttgctttcacggaagatttctctgtagcatgcgatgctgtttgatttaaccacagtagaatttctttgaaaatgggagtctatcttctcaaatcctgccactgctttatcaactaagttgatataatattctaaatcctatgttgtcatttcagcaatgttcacagcatcttcaccaggattagattccatctcaagaaaacattgtctttgctcacccataagaagcaactcttcattcaagtttggtcatgaggttgcagcaattcggtcgcatctttaggctccatttccaattctagttctcttgctattctaccacatctgcagttacttcctcaaagtcatttgtgaaagttggaatcaacttcttccaaactcctgttaatgtttatattttgacctcctcccatgaatcaaaaatgttcttaatggctctaaaatggtgaagcctttccagaaagttttcaatttactttgcccagttccatcagaggaattaccatctatggcagctacagtcttatgaagtgtatttttgacataagaagacttgaaagttgaaatgactcctggattaatgagctggagaatggatgctgtgttagcaggcaagaaaacaacattcatctccttgtacatctccatcagagctcttgggtgaccaggtgcatggttaatcagcagtaattttttttaaaggaatcttttttttctgggcaggaggtctcaatagcagacttaaaatattcaggaaaccatgctgtaaaccaagctgcagtgcagcctttcttgttccactgaaaaagcacaggcagattagatttagcatcattctttagcatcctagggtttttggaatggttaatgagccctggccttagtcaccagctgcacttgccttgaacaagagagttagcctgtcctttgtagttttaaagcttctctagtaataaaagtcctagatggcatcttcttccaacagaaggctgtttcatctacacagaaaatctgtcatttagtgtagtcaccttcatcaatgaccttagctagatcttctgggtatcttgctgtagcttcagcacttgctgcttcaccttgcatttttatgttatggagatggcttctttccttaaaccttatgaacaaacctctgctagcttcagacttttcttctgcagcttcctcacctctctcagccttcacagaattgaagaaatttatggcctttgctctgaatcagactttggcttaaggaaaggttgtggttagtttgatcttctactagactactacaattttctccatatcaccacaaagctgctttgctttctgccattcatgtgttcactggagtagcacttttaatttccttcaagaacttttcctttgcattcacaatgtggctatttcgtacaagaggcctagctttgggcctgtctcggctttcaacatgccttccttactgaacttagtaatttctagcttttggtttaaagttagagatgtgtgactcttcacttgaacacttagaggccattgtagaattattaattgacctacatcaatattgttgtgtctcagggaagagggaagcccaaggagatggagagagatgggggaatggccaggaagtggagcagttaggatacacacaacacttattgtttgttgtctcccatgggtgcagtttgtggcaccccaaaacaatgacaatagtaacatcgaagatcactgataacagatcaccataacagatataataatgaaaaggtctgaaatattgcaagaattaccaaaatgtgacacagagacacaaagtgagcacagcacatgctgttggaaaaatggtgccaaaagacttgacacagagttgccacaaaccttgaattgtaaaaaacacaatgtctatgaggtgcaataaaatgaagtgcaataaaacaaggtgtgtctgtatatacaaggcgcacgatatttttttagaatctgcataattaggcaaaatatatgacggttaccacaagatctgagttctctccccatatctgctataccattacaaaatatttatgagcttgctgccactaaaaataaaatgacatgagaataaatgacactatttgttatcagaaccttttatgatttatgagggaacatcattcatttattctgtgtatttccagcacttccatcgaaacaaacattgcactaaagcttgctctcaaaaacctcacagtctagttggtgagaaagacaattcatctaaatacaggtccacaatgttctatctgcaatcctgaaatccaaaagtcctccgaaaaacacaaattctttttgaaagtctgcagttaacttctttgggaacaaaacctgactgatgttgggtgggtacttataatctctacttgtctcattcactggggacactcacacatttcactgttcctgtatgtgtctgagtagactgtgctgtcccaggacccactgcagatacagcacaagcaccactttcctagaacctgcagattcggactgggtgagggattgtgggtcagcactgtaatacagcaaacacttcattagagggatgaacgaggttggcacgagtttctcactctgatgcttcgcagaaaagatgaccttaagtcaaagggaaaggatactttacaaagaactcatgggcatttcccatggggcatgggatcatagagaacatggcatctatgttgagcactggcagctgatgagggagactggagggtgatgtctagacaagtggttctccaagtattgggtttcaggattcctttccactcttacaaactgacaaccccaaagaggttttgtatatgtggattacatctactgagtttatcatattacatattaaaactaagaaatattaaaacattttactcattaaaatagtaataaactcattatgtgtaaacataaatataatattttaatagaaaaataactattttccaaagcaaaaaaaattagtgagacaactagctatgtttcattttttgcaaatcttttcaatgtctgatttgatagaaggcagctgattctcaaatatgcttctgctttcaatctcttgcaagatgttattttgattgaagaataggaagaaaatctagtctcacacagataagaagttagaaaagggaggagtattttagcagcctttttagatgactgtggatatttttgttaatatgccaaaacttgacaagtggtagcttcttaaaagttagttacaatgtggaatctgaaactctatcagtgagcttttcatactattacactaacatccattggtctcttttgtattttgaatggatcttttactcaggcatggttttgtaacatcaggtgtttgtcatttggaaaacatggttctgtgagttatacaaatcttccaaatgttgatacacttcattctcttccttcccctttcttcccattcacatcactgataatatcactgatcttatcagaaaagtctgtaagtattgtgaggctgtcaggctcacagtggtggtattagttttccaaaattctaattttggcttgaaagcttaaattttatcattagcaacaatatagtcagttgttatccttgaaatgccaggcttgtttcatttcattcattttcaagaaaacatctgccaaatactcaattgtgaataagcatagcttgcctgtcaatcgttctttcagagtgactagagttcagctcatactcatacagacacagaactacttttctctaagacagccatcctacttcagtatgcagcagaagtgcttcatgtgtacttcctactaatgttaaaagagatgtatcctcgaggtttgagatttaacaaaatcaatacagacgctcttcaactaagatggtgttaagtctcaataaacccaatgtaagtagaaaatatcgttaaggtgaaaatgtacttaatatcctgattaacctatcgtaaagttgagaaattgtaagttgagccactgtaaatcagggaccatctgtatattttattgctttttatttttaaccataagtacatggtagtgaagaaaataatgactagtcatatggtttcatgttaaagccttgttttgtgtgaagccaccagcagttttacccaccactgcttctatatcatctatgcaagtatcaatatagtaaaaatggaaagtgatatctttgtgttattatgaaaatagtttgaccttgtggggccattgtaaaggtctcagggactcatcggagtctgcagagaataccttaagagctgctggtttagatcataaagtgttttgtatgccatattgacaagtataggttttatcctgtaggtaatggaaagccattgatgaattttaagaaaaaacaacatgcccatatttgcgttttagaaaagttaccttatcagtagtgtgaggcatagatttgagagggtcgagttattggcagtgattctagataagggtgattgtgctaggcaaggtcaaagatgatgatgatctgacctagaaggtaggatctagtgattggggaatggggtatgagtttggagatatttaggagttttctctaggaactgacctatgagaggtaagggaaggaaagaattaattcagggggatttctagggaatctgacttccgtgagtaggtggatgacggtggtactttaattcagataaccaatacaagaagaagagcaggctggggctgggagaagagcaagaggaagattaattcagtttatgacagctctagattgtacagtctatggtccatccaaatggaaatgcccagtagtagtcagaaatgcggattgagggctcaggagaaaagtttgaatggtgatgaaaattcaaaattcatttgtctggaagttaacatgaagggatgagattgtccagggacaatccagtgtatatagagaaaacaaaataggccctaactaataccattatttcagtgcaaaaaagaggagatgggaacaagaatgggaaagaggggttccgaaaggtagatgccccaggaaagtgctgccatagagctaaggaagtttttagaggctagtcatgtgcagattagatcgttgttcacagatgttcacggtcttctaactagagttagtatgtaatttccctgcctcattgacgtggacagaaatgaggctgaggatgcagggatttctttcaacccatcctcttgcacttctgtaatctaccattaacaggatattccggacaactactagtccaagctgactgtacagacatctagagctggcctgaatctgatctaaagcctggagtcaaacccagtcagtcaatgcacattctgaatttgagccacaacagcgacccgcagacatgttccaagaaaaataaatgtgagtgaaagtcactgagtctccaaaagtgtttgttaggcagcattattgtggtaatatctgagcagcagaagatccttgttaaatgttataaagaagtcaaatagacttctcaagattagatagtagattgaatgttcctctcccaacaccaaataaaatgagtaaagaagagtaaaagctagcaaaaatgcaccaacagaacaatatcgggtggtaaggtagacatcatacaaaaaaccatcaaaaacctggggtcaaggaaagaaatgtaattctggagcacagtgaagagttgcacaggggctcaacttcaaaacttgcccatgcccctaggatcattatgttgttatgagtcaaaattctgagaattttcaatactatcaccaaatctggagagaagcaaatggcatggcagcctcattttttcctcttctggctgacagtaggggagacggatgtggtagaaaaacagataaatatcagggctggctacctctgaggaaaggacttcagagatgtacaccaaattgggatcattacaaactcaaaggaatagaagatgccgcttccatgtaggtagtgtgaaccctgaaacacacttaacataatctcaaagtgagaacagtcagttcagccagatgcatgctggcttgtgcgccagctctgccttccccttccctcaggtcagagaacacacagagacactacaagtcagtttcacttacaaggagaaccactatgcttcagaaccatttgctattgaatactgaacatgtagacatatctcagtcgcttactgaatttatcctggttaatctactaaacttacatgagaaagaaagacttcttcaggaatgcctcagaaaatgcaaatcacttctaaggaggtgcattcagtctatgtctgttggtctgcagacagaaaagtctgcggggtcatgtctgctggtctgtctagcccaggcttctcatagcaaccttaaatgctcgatgagccgtgtttacacataggaagaaaatgtgaacagaaacaccgcacccatgtaacatgccattcaatcatacaggttagccagaagacattcttaaacatgaaaaaactcagggaagacagcaccatccaatcaattaagaaacaaatcaaagtaaaaactgtgggaatggcgccactatggtaaaaggcctagtataaacactgcatagattgaaatatagcatgagaattaaactataggatatggtttaaaaattgtgaatatcataaacccggacagtgtgaaaatactactactatccaaggtaggaggtggcagggaagggttacggcagaaagtataagggtgcaaaagtacacatttttcagccaaaatcaacatgttctgtccaaaaattcaacaattcctctgttttactctagtttcttttgtctgttgaattaaagtaaaattaaagatttttctaaaacaacaaaaaaaatcaatagtattcatttcaaaagcctactcggctttctgttctttttcccttatacatagtaggatatcagaaataatgtttaccttaattctatggtggttatttctgggtgataggatttggggtgactttaaaaactgttacagttttttattcttgcattttaaattatttataaatgagcatatgacatttctactacttcaaaaacaagagaatagattttctttataaaaaaacatggatgcaaatatgccgcaatgttaattaatgttgattacaggtagtaggaatatagatattttcctctttgtactattttgtatagttgaggaataaatgggagataaaaaccggacctttagtatagactactgtggtagatttaaaatggcctcaaattctatgccattcctcccactatttctcctctcctagattggccactatttctcctctcctagattctgggctggccctatgacctatcttgatcaatcgaatgtggtggaagtgactttgtgactcttcctagggcagggcttaatggaaatacaggttctgcttttaccccttttaattatttctctttgacatcagctactaggtgaaaagtctgattaatctgttaaaaaggccatatggcatgggcctgaaaccagctcagacattccaaccccagccaagctttctgctgaatgtaacctcatgaggcaccccagccaatgccacacattgagcagatgaaccacccagctgatccctgcccaaatttctgatccaaagaattatgggcagatagatgttgctctaagccatcaagtttttggagtatgcagtggtgataattcttttgaaaggtgtgactttgaacataaggagtgagctaaggcagtaaataagtgataaagaagatttttttgctcttgatttttaaaagatagggtgttacagcataaaagatctactcttgccaggtgtggtggcttatgcctgtaatcccagcactttgggaggctgaggtgggcaggtcacctgaggtcaggagtttgagaccagcctggccaacatggtgaaaccccatctctactaaaaatacaaaaattagccaggcgtggtggtgggcacctgtaatctcagctgcttgggaggctgaggcaggagaattgcttgaacccgggaggcggaagttgcggtgagctgagatcgtgccactgcactccagcctgggcaacagagcaagactccatctcaaaaaaaaaaaatctactcttacgaattttgttcgtttgtgtaactctttttacactaaaggaattctgttttctaaaagaccttacttcatctgttgtttcttggacagtgaggatcatgcctgctgttagtctcacctaccactattcccataatgttcaatggatttcttcaggctggtagcttttccctttttaccaaacaatttttattgcttctctgtgcaaaagtgctattatagtttaaatatagataaaattaaaaaatcataaattctaccactcagagatatccattagtaaaattttgatataactgtagtctttttttctcttgagttatacttttgttttgcaaaaatgagctcatatctatatgttttgggatgtgcattttcactgaaaaatatcatgtgaacattttcaatatccttatatatgctctccaacgtcatttcctatagtgcacagttttcagtgtatttgctatagttaaaaatatagaaaggatatagagaatgctggtgttgcaggtacctgtcacataagaggagctaaataaataactattgactgaaaggatgaaagctagaacaagcatctttttgattagctaaagcttagtgcgattattaattgccacctttgggcaaattctgaaaatggtcaaaggctaggtatatctctcaggcaatttaataatgataggtattgccaaattatcctcaagaaatgttttatcaagttatattgcacctgactggtgaccctttaagtgggtttcagtatacctcaaattttctctagaattactttaatgatttatctgaggaagcattattataagctctgacagaatgagtactaggtttactctctgtctccattcttgatcaccagcttgaaagaggtcagttcatcatcaacccagaagtggagtgaagtatgtctcacaattagcatgcacgctacttttatggcattattgaatatatctgcagacaaatgtatttggtcccagaaaatcaagcctcatagtggctgtgcctctctctgagtatcaatatctattcatgtacctaaatctatgtgtacaaaacacttaaatataatcagaatgtccaaatcaaacacctgttgcaaaaatgttatatcattcatgcagagagaagaatagaatgagaatatctatctaggttcattttggcacttggtcatttgactcattttcatggacagaatgtagtacactggggtatggtataatagttaatagttgaggctctcaagtaagacagattgtggcttgaaactgcctctgccaactgttcagcaggatgatcttgggctagttatttaacctcatagtcacagtttccccatttgtaatatggggatgacagaaataccttcctcatgaagattaccataaggcttaaatgagataatggaacatgagatgaatgaaaatggcagagcctggaacatagtacgtgatgagtaaatatcagctgttattcacagtattttttgtgatacagccttaaaaaaagagccaaggcaataaacactaatgaatcaattaccttagcaactttaatataggttagtaaaaaagaaatgtcatttactttatgtataatctaagtgagtgaatcaaaacttagctatatcttacctatattgtaattttaatatttttcaggtaacatatggtacatatagtttttatatatattataaaactgtaagaattaataactaaattattattaaataatttaaaaattaagtaatttaaaaattaaataattaaaactgtaagaattagtttaaaatgagcaactgtactaattataattctttcaagatttttttaatcatcaagaaacaataccagaactatgctgtcaggagtatattcatattttccatttttgcttatatttagatttgattgctcatttaaaatttggatattacctactacttggtatttggacataaagtgaaacagaaatgcacttaatatttaaattttatagaactaaaacaatttaaacaaaatatgcaatgcagtttatgtgaagcaaaacagttatatagatcaatggaggcacttcctgtgcatttgtaaatgaaaaaaacttgaaagatgtttttaaaccaccagaatatgaaaaaaaaatctctcttttttttttggtcttataacacaggtaggggaaataagcttgcaggtggaaatacataggaaaaatgtcattaaaaaaaaaaaagtcctcaatggtaaagtgaagaggccggatgtaatggccttgaaggttttatccatctgttaaggctttttattctatctagtgttgtctcagcttaaagggaatatataaaaagcaactgacattaacactaactcttcccaacgttactcagattgcctgcaacaggctatagaaaaagaagatgcagaggtgaggcaggaaagggcagctgtaaaaccccaatttttcttttattgttctttgctttgtatgattactccacacgctttaagtattgttatgtcaaactaaagtcgctgaaaaataatcttttgctgggaattctttaaaaattttttgttctcttttaaaccttatttataaaggtttccagatgcttatcctcacacattaaacccagtatgatgtagacacatacaataatattcactgctatgaagccaagaaaaaactacttgaagatctaactgcctatcactgaaagaatcggggtccagagaattttctggtgctattaagggtgtgattctctgaagtcatttggaaacaacctagtttctcagcagcaacacatctatcctgtactgtgtcaaagcacatcaaatggttggcattccaagcatcgaacaggttatttctcattatgcgaatacataatgaaaggatgtgggcaaagaacagaatgcaaattggaagctgacttctgactttaacagccagcagtgctgggctcaaacagtcattctaatttcaagagacaattccaaagtggttctcaagagaaaggacagagtatttttaaaatatttgttcaatgtgaatggattgggcttgccaaaaatgactttttatgctggcatgcgatctcttagagggaagtcagcctgagtcactggatacatcaaaggtagagtccagtgaatggaattactgcaggctgtgtgaacaagccagatacccgcattcatctgcccactgctgggatttcagccctccttttaattacattaaagcagctggtaccactggttactgaagtcttcagattaccttgattgcttggtcattatctctaatcagctgcttcttctcatcttcaaacttttgtctaacatcctggagccgcctttctgcagcaagctgctgctggctgttctcttctttcagagaggaaatggttgtctgaagttctgctatgatctaaaatgaaaacagcatgctataacttcaaattcttctgggagaggcatctattttatatgtattgatgcttaacaaaagaatggatttgacaaaactctattccacaaattaaatattttcaattaacatatcacacactataatgcatgaaataccacacaataaaagactttaataaaaatgtgaatggtgaacaactgctgaaccaaatatacttggaagacgtttccactctaacattccacaatatttactcatcagaagaaagaacatctgtgatctcaaaaatatgaaaagtgtcagattttattttactgagaaatatacttattagaatgagaaaagctattctgcttttcataatactttgaactgtaataaccaaagaaaataatgaacagagtttattcttcagtcacctaattctatacagtaatttttgggaattcactaatgtttgtgtattgtgtttaacactttaagttcttatgtcatttactactgtgaaacaggtattattattgccttttatttttttttttaattttaattttttttgagatggagtttcgttcttgttgcccaggctggagtgcaatggcgtgatcttggctcactgagacctccacttcctgggttcaagtgattctcctgcttcagcctcccgagtagctgggattacaggtgcccgtcacgatgcccagctaattttttgtatttttagtagagatggggtttcataatgttgatcaggctggtctcgaactcctgacctcaggtgatccacccacctcggcatcccaaagtgttgggattacaggcgtgagccactgtgcccggcctgcctatcttttataaatgaggaaacagaggcacagaaagaggacaaataccttacgttgttgaaaatgacatccaactaaagagacaggcaggatttgaaccatgcagtcagaccaatcactgcactaattgggtcctttaacctgccgactttatgggtttttttgtgttttttgtttgtttgtttgtttgtttgtttgtttgttttgagacggagtcttgctctgttacccaggctggagtgcagtggtgcaatctcggctcaatgtaacctccacctcccgggttcaagtgattctcctgcctcagcctcctgagtagctgggactacaggccaccaggcctggctaatttttgtatttttagtagagacgagtttcaccatattggccagactggtctcgaattcctgaccttgtgatctgcccgccttggcctcccaaagtgctgggattacaggcgtgagccaccatgcttggccactccgttatgtttctttaaaacaaggttttggtattgcagggaagtttatacttccaaataggttgtcctcttcctaactcatggatagttattttggtttacatggtgccattttcattcactcctgtagtattccctgcatttaagaatctgttctctccagacagcgttcttctaacttctcaaattaaccatctgatgagaaacttttatatttaattggccttatgagagcactgtccttcctttggtttggatgtatccatttccttgcaaattcaatagtgatgactttttaaaagcaggaaatagttgtttcttctaataaaagaaacaacattagacccacgttagaatataattcttttggtcctaagcagaggggagggcagttggtgagaaactctggacaagttatctttcttgaagctcagtttttccaactattatttggtgacaaaacaagattacagcattataaggcaataaatagaaactgtctggagtcccccagaggccaaatgctatagaaatactagttgttactactgacataaataatagcatcttgacaataaaatatggagtatttatgctttgagaagtgagcaaattcactataccaaagtttgacacttggaatttgtcaataatcaaatatttagccgattgtgaaatgacaaaatatataataacaacatgtcaatattattacatgcaaacttcagccttctgctatgagtggaggcattcatttactgagaatgaagatgttttcatccattttctgaattttgattaaatattgtttccattctggcatcaattcaattaattctcatagcacttctgtgaaacaggaaaggttaaattctcatagtaaatgtcaaaaattgatgcagagaacaatcaactcacagtcacagagccagaggagccagggataaaaaagagtcagatttccttggcctaatatgaaatttaagattgatcttttatgagaacatggggccaaatagtaaaaaacaacttactatttcaatgttttaagctgagtaaactataactttgtagaagtgggtttaattctggagagagaaggagggcaaggcagagaatgacagagagagggtgcgtgtgtgtgtgtttagttctgcgcagtttaacacatgtatagattcatatatccacaactgcagtcatgtgatatatttttaaagtacaaagtaattttttctttaaaaaatactaagattgagactagcttgtaactgaccaaagaataaagataaaaatatcctgggatacttcaaacggtcaaaggccatggaacagggacatttctcattttcagaacatttaggacaaaataattcaggttttgaggcggccggatcacctgaagccaggagttcgagaccagcctggccaacatggcgaaaccccgtctcttctaaaaatacaaaaaattagctgggtgtggtgacacatgcctgtaatcccagctactagggaggctgaggctggagaatcacttgaacccgggaggcggaggccgcagtgagccaagattgcgccatttcactccagcctgggcaacaagggtaaaactccatctcaaaaaaaaaaaaaaaaaaaaaaagaaaagaaaagaaaaaaatgcaggttttggaaaggactacaagtgaagtccaggatgttctaagaaggacgtgcttgcttttgtgtggaaaataaaaccttacattctttgggggaataaggagagattcctctggggaaaataatgagattatttttggaaagatatttttaaaacttaggaaggcgatataaggggcagaatgttaaaacacttcaggtgaaacacttggctagataaatagataaattatttggttaaaagactcacaggtgatacggatatggaacagtaactaaaataaggataattaaaaaaacaagatttaatactttaagattgagaaataatcataataatcagattaacatgcttcaggtaaggaacaaaactctactggttgtagacccagagtataagaaaatggactactttctccttagctcagtgtatgtaataactggcacccagtttaagtggtagaactataatcatggtaagtaataaaaagccatcacctggcaaattgaattcagataacctacccttctcatagaataataatgttaaaagtttctaagaaaaatgaaagctaatatatacaatcataatcaaaaccctccagttttgattgaatcataattaaaaaccatagaacaaaatgctagcactcaactaaatgtttatactgtattagtttcaatgaaagaagcagattagagaattttcatatggatattaaaaattagtattttcagaaacaaaaaggagagctattttgagctgatggtgtaagcatccgaactcatgaaagtcataatagttaataataattgttaagcaattaacgctttgcaaaaatgttagtggtcttaaaaaaaaaacaaaaacaggatcctaaataggggttaggatttcatcttcaactcattctattgcttttcagtttgtagtacagtttgagacttttataaaactcttctttaaaatataatacaataaagaagacaagctacttaagaagccatgcttaggaacgttaggtgaacactgacgctcctcacaaaataagtggatgccttgtgcattctgggttggcccccaggaggctggcatagagatgggcacaggggtcatgtggaatattcccaggtactaatatgcatcaggcattgggtagtgtgggacagtggtaggagacactcgtcccttggcagcaggcaagctcaactgacattccaacttcagtcctgcccatgtttctaactatggacattctggcaaaatggcagtatctttccttgaaaaatggccactaggtgactaggctgagtggggaaaactatattaatattgaagaggcaaggttaatacataatcacttattatttcaatgttttaagcggactaaactccagcactcaccaccactgcagtgtatgcatcgtctccattcttttcttaagataaaaaaaaatgtgattctgatggaaatgatatttgggggcgtgcccagagatgatgcaaacactgcagtggtggcgagggtgagtgctgcagatctcagaacggggcacaggtctcaggtgtgccaaagtttcagtgtacacggtctattaggtcctacaggcttgataaaatcatgaaaagtaagcagcttcctctaaaggaggaaaatctttaaaatattttccaaatttaatcttatgctctctgaggtaccaacacattcattactaatgcattcattttctttttttcagagagggatttttaaaaacccaacagagttaagcactttgcttttagtgttctcatcagcctaatgagatatgagttagagattccaacaaactatcacttaaatatggagagatccaatccacagtcttgttttataatgctcatttttaaataatctgacatgcttctctgaactgactggcattgtagactaatgcttctcaaatgccagttcacagatataaatatttagaagttggcaaacaaaatattatcaatgtaaggttatcatcctaacttttatgagaaggatggactatctttgattatattacatcctttctaagaattttttggtgttgcgctgtcccttgattaatgaaatgatggtaatagtatatgatagttgttactagttgctttttccttctccaccttcaagtcttttcttgggaaaacagttagcaaccctgtgcctctccaagcttttcagggagattttatcaccttgtgaacacccaaaaacatggtgtctgaagcaataatttgttccaccttccaaaccttttttcattcttccctgcctcctttcctctttctctatggcaattttagtgctgatactataataattcacattcgttaagtgctttagtgtgtactaggtactatactgaacacatttttggcattgttttacttaatagttaaaaccatcctatgaggttagtactgctcctccatttgacaaatgaggaaattgaattccaaagagggcgggtaacttgctcaaggtcacggaagtggtagggctggtattcaaatccaggggtgctggactccagagctcaggctttcttctgcattaacttacatttaatttgttttaacatcaactaatcaggcttcttcatacattcctttagataaatactcctgtttacactctcattatttaggcatttttattagctatcttatatctcactctcggtctgcttcccccatttaacgtaaagcgaaataagcaggatgttaggatatgccaactggggatttttaatgttttaatttaaactttaacttttggcctaaatagatttcttttgattgcaagaatctttttcagtggattaaaaggatatttctccatgttccttcctcaaggaagggctggaataatggcaatcaagacataatcatcatttcttacataaacatatacgactcttcatttggacaaagactttttgcttttctaatgggatgtgaattagtagaactgaaattttaggccaggtgcggtggctcatgcctgtaatcccagcattttgggaggatgaggagggaggatcacctgaggtcaggagttcaagaccagcctgaccaatatggtgaaaccctgtctctactaaaaatacaaaaaattagctgggcgtggtggcgggcacctgtagtcccagctactcgggaggctgaggcaggagaatggcgtgaatcagggaggtggagcttgcagtgagccgagattgcaccactgcactccagcctgggcaacagagcgaggctctgtctcaaaaaaaaataaataaataaaataaaataaaataaaaggaagggattgggccaggctggtagtgttaaggttaagaacttccactttgaagtcagatccagactgggtcctggctgagtcacttgccaacttgtgtgatcttatctctctaaatctcagttttcgcaaatggaaaaatggcaccagtaatagttcctaattccagagttattgtgaaagactgaatgagtcaacatggttagtgccccatgaacattagatattattatctttttgttgttgttgttactactattatgtggcattatgtggtagtatggtaaattctagtttactaaccaaataccactgtatatatatataaaaatatgaagacaagctgattttaacaatcattagatatgctcacaaaaccaaatggcttaacttacctacctgcaaagtaaagataagtagtatttatttgttctagaatcacttatacaagtaaggaatacttggagttccttaaatgatactactggatatcactataataacttatgctgaaaaagtactctgagcatcatatttcaaatagagacaggcattcaattattggcctttcttatactaaaactacaacagtaagtacaaatagcaagttatggatgtagggacttagaattctctttgtcctaaaaagagtcaacagttgagccgcagacttaacctagaattatttgtcattttgaattttgtttgaagaagcctttggtagagcaaaatggagtattaccaaaaaagcacagatagtaccaaactgcttacatcacaaatgtaggtgtgtatctcctgtccttgtgaagtatgtttcagcctgggcttgttcaagtgtataggctggttttacaacatctgagagtgtgtgtatgtgtgtgtgtgtgcatgtgtgtgttgtttcaaatggttaaatatgcctaatttttcttgatttttaatgactgaaatattaaaaccatattgtttatttgtatacccataaaaatatgataccattccacaaaaaaaaactgaaaagaatgaagtttaacttgaaagtgccaaggcttttatgtggaggtttcatttttgttttggttttaccctgttttgtgtcttttaatgttgcttacctgtgaagatttggcaagcttctgagtgtattccttctcaatctgcttcagcttgctgttggcctgaaaaacacatgtacatgaacacatacacagtgacctgtgagcttggtatctcttccacatgcctatcaccaggcagctgggatgcctgccagctgcaccgcccttctggggcagccagaaaaccacagggcttgtctttgatgttacgccaactattcatcacttaaaaagcaaaaaaaaaaaaaagatctcttctgccaattattagacaaacataagacttctgtggatagaaagagaaagggagaaagagagacagaaatagacacagcaaaagtatgaaggctcagaaggtaaagtaagggaaagagagaagaaacaagaggggcaaggaaaagggagagggaagtgaaggaagaagaaaggaaggtaaatttaatactttttcaccttaattaaaaaaataaaaggaatagatgcttctggacaaaggagatatgggattttgagaatcactgagcagaggtgagcccctactctgccaaatacataagagctaatttttacagtgacaaatgtatctaaatcaaacaagttttaagttttatgtcctggaaatagggtggcctttccacaatcagtccacattgcttagaacttggttatcccctctgccactcaagttccaattctttttatgtgatctgttttctgctctctggaaacttttgggatctttatttcatcgtcaaggtttaaaaatgtcacagtgacgtgccctagactgtgtcttttccccatcaatcatgcgggcactaaagaggctctttcactctgaacttgtgtcctttactactgggaaaggctggtcattactctcatgatttctctcgtctctctgtacgtctgtttctctccctgagtatgtctctccctgcaactctgattttgtacctcttagatttagtgtctctttttcttgttgtttctatgttccatttgtctttttgattattcttagaatttcctcaacttttacctaaaactttatattctgccatcatattcataattcccaacagttcctttttgttctttgaacagcatcatcattaacatccctctttttacagatgagaaaacgaagacacagagagggtaagtaacttgcccagcatcacacagctaggaagtgatgaagccaggacacaaactcacactttggctgcagagcacaggtgctccaccagtgagagcactgcgtcatgccttgcaatacagtccttctatctatctatctatctatctatctatctatctatctatctatctatctactgttcctttcatccatccatccatccatccatccatccatccatccatccatccatccatcatctgtctatatgtctataactatctatctacacatatattttaatttttttctgctcagtagagtgtgtgtgtgtgtttctgagttccctttgtttatttactttcacctgtctgttttggtctttgtctttcactttagatactttcctcaaatatctggtgatctttgatgtcctttcttattcaaagtgaggtctccaaagctggatagaagaatcttgcatatatgtatgggtttgtggatgggtgggcatcactgcagggtgtgttacaaaggggcctggactctcccatgccagcatctgactggatttccctcttggatcagtttgcccagagctgcatcctccagtttcctgccaggcagcacaaatctgatggccagtattttcagaagggcatcaaggtgttcaggagagtgactctcgtgcaaggctagcctcacatttctcctcaactgtacctgaggccctttctcattccacctctccagagaacaaaccagggatagggatgggggcagtcttgggataaaatctgggccatctgtcccaaatgcagactttcaaccaatcttccagttcttcacttcaccccatacccagtctctccaattcctgaaccttcccaaagttctaccacaggaaagatcttgctgcttctaatgggtatccttcaggtcttccttcccccagaaattgttcagtttttaggattattagttctgctaagttaatttcaggcccagcctttttcaagttctcaatgctattgatttcttatgtgtatggttgtctcttattttctttgaaaaaatatatagtataaaaatcttgatgcctgagtctcatctgcagaggttctgattcaatttatctgggctacaggctggacactaggatttttaaaaatctctgctgctatttcaaaagttcagccaaggttaaaaaccactggttcatgcctttttcaatttccttactttcattttgatgggacttcctcagggagtagagataaaaacaggtgagttctgtccactacctttagttggaagcaaatgatttgtttattttcatatcacaaatagggtgaggaagcaatcccgtgctcacagcccactccaggctcacctctatggtagtactaaggctgaattagtcattgttggttaacctgtctttttcccactagataatgagatcctagaaggcagctcctagcccctaacatagtgtttggggcataattgtccatctaatgaatgagtggatgccgtacaagccctttgcctcttctatcgcctcagtccatacctttgaagttttcttttcataaccatttttttacggacttaagttcaaaaccaattctttagagttcattccataaatctctttgtatctataatcccatcgagtacacagggtagttctgtttcttccagaatagagagggcatgtgactattgctatttttctagtaagtcatcagacttgactccagctctattatgattaaagccactctccaccagaattagggctactctgaacctcttgaggtttatttgtcttggctcacattctgtcactatttttttttgtcacaaaatgcttaataaagtatttgttgcttttaaaataaacgcttaatagaactcataccatgtcccaggcactgttctaagtgctttaaaaatattcacccactagaaaatctaaaaattaattctagtgtcataaagatgaggttacttttccctaaaaatgctagagtcacggataatagttagtgcaggaaggcctgtgtcttggtgtgagctactcttcatgagtttatggccagcccccaaatctcacaaacccaatgaagctcctttataactaaatatccaattcattcatccactctaggcagctggacagcagcaatgaacaaaacagccaagaatctctctccatttttatgaaacatctagagagtaaacaaagtaactttgaaaagttacatggtgcaaggcctatggagaagtatcaatcaagaaagagagagaggaagtgataaaagttagggggtactttataattttaaaaatactgaagtaacagatggcctccctgagagggtgacgtatgaacaaagacctgtaggagatgagggtaacctctagggaaacagcattccaggcagaaggaagaacccatgcaaaggccctgaggcagaggcatgcacagcatgttcaagacacagtatggaggccaagagcagtggctcacacctgtaatccagcactttgggaggctgaggctggcagatcactttaggccaggagttcgagaccagcctggccaaaatggtgaaaccctgtccctacaaaaaatacaaaaattagccaggtgtggtggtgcatgcctgtaatcccagctacttgggagggtgaagcaagagaatcatttgaactgggaggcggaggttgcagtgagctgagatcgtgccactgtgctgcagcctgggcaacacaagcttctgtcgcaaaaaataaaataaaataaaataagataaaataaaataaaatacaatacagtgtagaggtcagtgtggttggatcagtgcaaccagtggagcactggctccttcagacaacacagggctgtgagagaaccaggtcctgcacggtgttgaacgtgattgtaaggaattcggcttttaagatcactgaaacagagccactgaaggggtttgtgttagtccattcctgcactgctacaaaccaaacactgcatgttcttacttgtaagtgggagctgaacggtgagaacacatggacacatgggggcgggacccactggagcctgttgggggttgcggggagggagagcatcaggaagaatagctaatgcgtgctgggcttgatacctaggtatgggttggtctgtgcagcaaaccaccatggcacacgtttactatgtaactaaactgcacatcctgtacatgtagcccagaacttaaaataaaagttgaaaaagaaaaaaaaatacaaataaaaataataaaaagagaaatacccaagtctgggttaatttataaacaaaagaggcttaatttgctcatggttctgcagggtgtacgggaagcatggctggggaggtcccaggtaacctgcaatcgcagtggaagttgaaggggaaacatgcatatcttcacatgcccagagcaggagaaagagaggtggagaggtaatacacactttcaaacaaccagattgcatgacaactcactcactgttataagaacagcaccaagggggaaatctgcccctatgatccaaccacttcccaccaggccccacatccaacactggggattacaatttgacctgagatttgggcggggacacacacccaaaccatttcagggtttcagtataggagaaatatatcctttgacataggttttaataaggccactccagcttttgtttggggcaagaatgaagcaagtaagacagttaggagggtactgcaaataatctaggatggcaatagaggaggtggtgagaaggggtcagattggagaaaaattagaaagtagaaccaactggacataccgtataatggaaagagatgagtcaaggatgacttcaagatttttgtcctaagcaactagatgaatgaggttgtcattacctaacatgggaaaagttacaggtgaaatagggtttgcagagaagtttaataagtttgtacttattaaacttggagatgcctattaaatgtgcagtattgaagtatctgggtattcaagtcttgagtttatggtttaaggtctaggttaaaactatgaattcagaagtcatcagtttatatagggtgtgtgaaaccatgctactggatgagatcccaagatatccagtgtatatactggatgagatcccaagtatacacaagaaagcagaggtctaagtatactcagccctgggcctgcaaatgttaggaggctgggacatgaggaggaaacagacagaagtaatagccacagagtcaagaaatcaggataggctggtggctcatgcctgtaatcccagcactctgggaggccaaggcaggtggatcacctgaggtcaggagttcgagaccagcctgaccaacatggtgaaaccccatctctactaaaaatacaaaaaaattagctgggcgtggtggcggaagcctgtaatcccagcgacttgggaggctgaggcagaataatcactggaacctgggaagtggaggttgcagcgagctgagatcgtgccattgcactccagcctgtgtgatgcagcaagactccgtctcaaaaaaaaaaaaaaaaaaaaaaaaaaaagaaatcaggataatacggaatcttgagccaactgaagaaaagtgtttcaaggactactcagttgtgtcaaatgctacagagaggccatagaaagtgaggcctgagaattgatcacagtagtttggcaacatggaggtcactggtgataaggataaaagaaattttgttgtagtgggagacatgaaatctggattaaaggaaattcagagaggagaggcattggaatttgttcagaattttattaaaagggaaggtgagaaatgagatggaagctgcccaagaagcgggtgaatagagaggtgaattgttttgttttttggtaagttgaggaaattaacagcatgtttgtaggctgataggaaagatctagcagtagagagggaggaaaaaaaccagatgatgccagagctttcctagagacatgtccttgagttaaggggagggctatgtcatggagtgaactgtgtcctccccaaattcctatgttatgttgcaaccctaaaccccaatttgactgtatttggagatagggcctttggtgaggtaattaaggcaaaatgaggtcataagggtggggccctactccaacaggataggtgtcattataagaagaggaagagacacccatctttctctgcctgtctctctgtatgcacacacaggaaaggaaacagcaagaatgtagcaagaggcctcaggaaagcaatcctgataccaccttgatcttgggcttctagcttccagagctgtgagagaatgaatttctatggtttaagccacccagtctgtggtgttctgttatggcagcccaagccagctactacagggtgggacgaggggaggagatggcctctgctggaagtgcaggcaaatgatcccccaggaacaatgatgggagcttctgattgctctcattatctctgcaaagtaggaagaaagattcatcagctgagcatgaggatggtagaaaacatctttgggaaatttcagaagtgaaggaaggcataaaatagtcatctaaaaaaagcaggaaagggaaaagacagagaaatccagtatgagtcccaggactccaggaagcatcaggacccacttgaaattgccaatgctgaatttaaaatgaggccagtctgtacagaagcacttctggaatttgctaacagctaaatagagtagaatcaatactttagagaatacgagtaaccaaaggaataaaattaactgatcaacttttgtggtttttactattaatattttcttcagtgtaaatcatagctgcctgaattcctgaacccctcttatataaatctaaaaagctctggtttatcatggttgaaaattcatggctaacttatcaggcaaactgtccctaaagcattttttgaatagctttagtatcaagatggtactgagtgtacatttcatttccctgcttaaaggaaggcttagttattttaaaccaagtcttatttttatagctatcatttgtatatagaaacacaatttttaaacaactaccagcagcataacttgaacaaatatataacagaagaggagggaaccacaatttgggaaccacatagtgagacagggtctcactatgttgctcaggctggactcaaactcctaggctcaaaggatccctcagcatcgcaagtagctgggattacaggtacatgacactgcccttggctctgctctatttttattatttcctttcttctgctacttctgcaaagtagtagtagaaatagtagtagtcatagtagtagtagtggtcgttgttttcatctttggttctttctgactgttgccatttctgattggttgtgcccgtcctcctccagacagtattcagttctcatctgtttttctagggctgcttcctcagatcattctccttattaaagagcccaatgtattggttcacttttaattcctaacaaaagcttgggtttaaaactcaattagaaagggggaaaaatacgaccaatttacaaaagtgtccatggttgtaattatcttaatgtgctacccttttctttgcattatgcctcaatttttaaaaagtccttcattccttcattttccatttcctatcattaatggtgaaggttcaggcattcatgatttccaggaaagtgatttggagagaagaaaattaggagatttgtctaaaatatttatatttaaggcaagcccagatcttactatgatagctttaaaatataatagctatgtctttaaaatcttcaaatatctttaaaatataatagcataagtttctgaataaaatagttgttttaggctgaaagaaagcaagaatgcttcccagatcctagaaacatggcataaagctcagataattatgcactactactttctattcaaaagctttgtaggcatctatttgaaccttcttggaacactattgtcagaggcgtatgaaccagagcaactccatcttgaataggggatgggtaaaatgaggcggagacctactgagctacattcccaggaggttaaggcagtcgaagtcacagaatgagagaggaggtaggcacaagatacaggtcatacagaccttgctgataaaacaagttgcagtaaagaagccagccaaaacccaccaaaaccaagatggtgataagagtgacctctggtcgtccttgctgctacactcccactggcaccctgacagtttacaaatgccaaggcaatgccaggaagttaccctatattgtctaaaaaggggaggcatgaataatccaccccttgtttagcatgtaatcaagaaataaccataaaagtgggcaaccagcaaccctaggggctgctctgtctatggagtaaccattcttttattcttctatttccttgataaatttgcttttactttgcggactcaaccctgaattctttcttgcgcgagatccaagaaccctctcttggggtctggatggagtcccctttcatgtaacactatgaatccagttatggccagcctggtaaaactccgcaccatcctaccagcaaaaatatttagaaaatttataacaaatatttgtatttaattttaaatatttacaaaacattcaaacttgaaaataatctgtattttacttcaaaataaatgtgcaaatttgtaaaacagtaaaattcatgactgctgccctggctgtgatgaagtaactgccacagtaaacaatgagaaaactggacaaaacaaaggagaaactgttttaggatatcaggcaacaggaagcagaggattgtgacccaaagagaagggaaacaaatgaggtaagcgctcatttagttgttctttgatttatttaattcttctctgattctttcatcagaattctgtagatttcatcatataaatctcatacatacagatggttcttgacacgcaatggcatttcaccccgataaatctgttgtaagtacaaagtatcttaagtagaagatgcatttaatacctcgataaacccattgtaaagtcaaaaaaatcatgaagttgaacctttgtaagtcagggacagttattatagacgtatacctaagtagttaattttgggggtactaatgtaaatagtattgtgtttttggtttaaaattccacttattcattgctggtataaatgaaagcagttgatttttatttattaaccttgcatcctgtaaacttgctataatcacttatcagttccaagagtttgtcgattcttttggattctctatatagacaatcacatcatctgcaaacaaagagagttctatttcttcctttccaatctgtatacctcttatttccttttcttgtgtattgcattaactaagatttctttgatgttaaaaaggagtggtgagaggggaatcacaatcaatgccctgtttctgatcttagagagaaagcttctactttctcaccatgaagttcaatgttagctgtaggttttttgtagatgttctttatcaagttgaggaagttcacctctattcctagtttgctgagattttttttcatgagtggctgctgaattttatcaaatgatttttctgcatctattaatatgatcatatgatcacacagatgcgattgattacattcgctgattttcaaatgttgagacagccctgcataactgggatacattccacttggctctggtatataattctttttgtacattgttagatcagtttgctaatattttgttaaagattttttcatttatgttaatggaatataatggttaatagattttttttcttataatgcttctgtctggttttggtatcagggtaatgctgacctcacaggatgagttaggaattatttcctctgtttttatcttttgaaagagattgtagaggattggtataatttcttccttaaaagtttggcagaatttaccattgaatccatgtaggcctggtgtattctgttttggaaaaggagggtcattaattattgattcgattgccttaatatatatatccattcagattatctttttctgcctgtgcgagttttggcagattgtgtttttggcagattgtgtctaggttatcaaatctataagcatataattgatcatagtatttatttataatccttacaatactcgtgggctctttagtgatacctcatttttcattacttttattagatatttatattctttttctttttttcttagtttgcatggctaaaacctatcaaatctattgatcttttcaaagaaccagcttttggtttcattgattttctctattgatttcctgttttcaagttcattgatttctgctctaattcttttaaactttttttaaattatttttatttttatttttaaagacagggtctcactatgttgctcaggctggattcaaactcctaggcacaaggaatccctcagcatcccaagtagctaggattacaggtacatgacactgcctttggctctgccctatttttattatttcctttcttctgctactttggatttaatttgctcttctttttcttgtttcccaaatgaaagcttaggctattgattttagatatttcttcttgtctcataaatgcattctatgttataaatttctctttaatcactgctttctccctatcacataaattttggtaagttctggtttcatttagtccaaaatatttttaaatttatattgagatttcttctttgacccgtgtgatttttaaagtgtgttatataatcccaaagtatttggggatttccacctatctttctgttgatttctagtttagttccattgtggtctgagatcagatattgtatgatttctactcttttaaatttgttaagatacgttttatggcccagaatgtagtctatctaggggaatggtccatgtgaggttgcaaagaatgtgtatgccgctgctgttggatgaagtagtccaagatatccattatttccagttgattgatggtgttgttgaattcaactatgtccttactgatttttctgcctgctggatctgtccatttatgatagtgggtattaaagtctacaactataatagtagattcatctatttctccttgaagttctatcagtttttgcctcacatagtttttgtttgttcgtttttggtttttttgcctcacgtattttgatgttctgttaggtacatatacacctgttaaggattgatatgtcttcctggataattaaaccctttatcattatgtaatggctaccatatccctgataattttttgtcctaaagtccactgtatctgaatttaatataactactaattctttcttctgcttagtgttagtatggtatatattttttttgatccatttactttaaacctatatatgtcttatatttaaagcaggtttcttggagacaatatatagttgggtcttattttttgatccactctgacaatctctgccttttaattggtatgtttaggccattgacatccaaagtgattacttgatatagttagatcatagctaccatatttgctactactttctattcattgtcctggttcagttttcctatttttgtcttacactgtttttcctgcattttgtgggttttaattgagcatattccattttctctccatgcttcttttttaaaacatattttttactggttgccctagagtttataatatatatttataaataatccaattccactttcaaataacactatatcatctcatggatagtgggagtaccttatatgaatgaaataatcctaatttactccttgttattttttgtattactgctgtcattcatttcacatatatgtaagcttatgtaagtatatatgtctgtataaatatatatgaatattgttgctgttaatattttgaataaactgctgttaggtcaattatgaagaaaaataaaagttttaattttatcttcacttattcattctctgatgctctatgtagatcaaagtttcttacctatatcattttcattttatctaaaaacttctttttaacatttcttgtgaggcaggtctactggcaacaaactcccccaatttttgtttgtctgagaaagtatttctcctccatttttgaagaataatttttcgaggtacagaattctagattcgtagaggtgttttctctcaacacttgagattgttcacttctctctcttcacgcttgcatgatttcttagaaaactgatgtaattctcacctctcctttttatacgtaaggtgtttttcttttccctctggcagatttcaatactttttaaacattttttattttctgcattttgaatatggtatgcctaggtgtgtagcatgttttttctttcatttatgctgattggtgttttctgagcttacagatctgtggtttggtgtctgacattaatttggggaaattttcagtctttatttcattaaatatttcttctgttcctttctctctttcttccccttcctttattcccatatgtgtacattacaccttttgtagatgtctcaactacaaaagatattttattgttttttttcagtctttttttttctctttgttttacaactttggaagtttctactgagatatcctcaagctcagatattctttcttcagctgtgtccagtctactgatgagtctatcacagtcttcatttctgttagggtttttgatctctagcatttctttttcattctttcttagaatttccatctctctgcttacactgcccatctcttcttgcatgccatctactttatccattaaaacccttagcacattaatcgtagctgttttaaattcctggtctgataattttaagatctctgtcatatatgagtctggttctgatgcttgctctgtctcttcaagctgtgttttttgccttttttgtatgccttgtaatttttttttccttatagctggacatgatgtattgggtatatggaactgcagtgaaaaaggctttaatcatgtggtggtaacgtgttagggaagaggaagtattctacagtcctataactaggtcagtcttttagtaagcctgtgcctctgggctgtaaatgtcactgtgcttctcagtttctccccctcctagctcaaccaggatggttcaagaatggagggatctggacttgtgtattttccatcccccatatagaaggctagagttggctgtaggtggttatctcccttcccccagattggttaggctctgaaaaatccccaataatttaggtgcttgtaaaaccatttttcttggtattttgttgctgttggatacaaagttatatatagcccattttgtctaaagcacaattcaatgtcagtatttcccttttaattttctgtctcattatcggtctgttgttgatgggggatattgaagtccccactattactgtattgctatctatttctcccttcatgtccattaatatttgctttatatatttaggtgctctaatgtctaatgtctaatgtgctctaatgtctaatatatatttacacttgttatatcctcttgatgaatgtcctctttatcattagtgactttttttgtctcttatgaaagtttttgacttgatgtctattttaaatctaaatatggccacttctgttctctttttttttttaccatttgtgtgcaatagcttcttccatcccttcactttcagcctatgtatatccttaaggctaatgtgggtctctcataggaagcatataattggatcttgattttttattcattaaactactctgtgtctttggattggaaaatttaatccatttgtaattattgacgtttaaggacttactactgctatgctgtttattgtctcctggttgttttgtatatcctttgttccttttttcctttcttatttgccttcatgatttggtgatcttctatagtgttaggtgtttattcttttttctttatttttttgtgtatctgctatagtgttttgctttgtggttaccacaaggcttacgtaaaatgtcttatagttatataataattgactattttacactgataacaacttaattttttccacatacaaaaactctaaacatttatcctccaccctgcttgatctagtctgctgttgaagctctctattgcatttttaaatttcattcattgaattcttcaggtccaagatttctgttcggttcttcgttatgatacctatctctgttgaatttctcattcagatcataaactgattgatatcatcaaattgtctctctatattctcttgtaatttttttgagtttccttttcttattttgaattgctttacaaacaattcatacattttcttttctttggggtcagttactaaagaattattgtgttctttggtggtgtcatatttccttccttttttaggtgcttgtaaaacagtttttcttggtaggctctgttaagtgcaacaaagtgctctggtgtatttcacaatggtcacttttctccttcccctgccagaagcacaaatgatttttttctacaatattcatgacgagaacctggtcaagctcctgggggcaaaactcacaaaagcccaacactgctatggctgcttgcaagccatgttagacccaataccaagagagtttccctcagctaagactctccattgtggggaacatttaaacagaaggaccccaagagcctgtgctactgtgaactctcacaatatgttgctgccactgattccctaaactcttatagcctatggcactgaggtacccacagtcatctgtgatactgatcacagctgaagaagctgcatggaggcttgaccactgcatctatccagaagcagggccagcacacccttttcaaccagcacattaaggtctatctgcagatgaaaatattttcctatgaaagtaactctgtaaagtttggaagtggtgactgtttcatcagatgtgaagacaccaattcagaaacacaagaaacatgaaaaaggaaggaaatatgacaccaccaaagaacacaataattctttagtaactgaccccaaagaaaagaaaatgtatgaattgtttgtaaagcaattcaaaataagaaaaggaaactcaaaaaaattacaagagaatatagagagacaatttgatgatatcaatcagtttatgatctgaatgagaaattcaacagagataggtatcataacgaagaaccgaacagaaatcttggacctgaagaattcaatgaatgaaatttaaaaatgcaatagagagcttcaacagcagactagatcaagcagggtggaggataaatgtttagagtttttgtatgtggaaaaaattaagttgttatcagtgtaaaatagtcaattattatataactataagacattttacgtaagccttgtggtaaccacaaagcaaaacactatagcagatacacaaaaaaataaagaaaaaagaataaacacctaacactatagaagatcaccaaatcatgaaggcaaatcagaaaggaaaaaaggaacaaaggatatacaaaacaaccaggagacaataaacagcatagcagtagtaagtccttaaatgtcaataattacaaatggattaaattttccaatccaaagacacagagtagttcaatgaacaaaaaatcaagatccaattatatgcttcctatgagagacccacattagccttaaggatatacataggctgaaagtgaagggatggaagaagctattgcacgcaaatggtaaaaaaaaaaaaagagagaacagaagtggctatatttagatataaaatagacatcaagtcaaaaactttcataagagacaaaaaagtcactaatgataaagagggcattcatcaagaggatataacaagtgtaaatatatattagacattagagcacactagacattagccattagagcacctaaatatataaagcaaatattaatggacatgaagggagaaacagatagcaatacagtaatagtggggacttcaatatcccccatcaacaacagaccgataatgagacagaaaattaaaagggaaatactgacattgaattgtgctttagacaaaatgggctatatataactttctatccaacagcaacaaaatacacattctcctttagtgcacatggaacattctccagtacagactacatggtgggccataaaacaagtcttaaatttaagaagatcaaaatcatgtcaagtattatttctggccacaatggtataaaattagaaatcaataacagaattaactttggaaaattcacaaatatgtggaaattaaacaactggctctaaataatcaatggatcaaagaagaaatcaaaagaaaaactgaaaacgatcttgagacaaatgataatgaaaacacaacataccaaaacctatgggatgcccaaaagcataaatgtcccataagaggaaagtttatagcaacaaatgtctacatttaaaaagaagatcccaaatagcctaacattaagcctcacagaattagaaaatgaacaaattaaacccaaagttagcagaaggaaggaaattaataaatatcagaaaagaaatagagaatagaaaaaccacaggaaaaaaacaataaaactaagagttggtttttgaaaaaatgaacaaaattgataaactcttagttataccagcttaaaaaaagaaagagaagattcaaatatataaactcagatatgaaagtggagacattacaaaagatgttctcagaaacaaaatagatcataaggaactattattaacaattatatgtcaacatagttgatcatctagggtaaacagattaattcctaggaaaatataactgaagaaggttgaataagaaagaaatagcttgaacaggccaacaacaaatgaagagattgaagtagtaatttaaaatctccccaagaaagaaaagcccaaaaccagatgtcttcatggctgaattctaccaaactttcaaaaaagaattaataccaacacttcttaaatacttccaaaataaaaaagagctggataatacagctgacccttgaacgacatggaggttagtggtgctgaccaccccccaaatgcagtcaaaaatctgcatgtaacatttgactaccccaaaacttaactactaatagccaactgttgactggaagccttactgataacatgaacaatcaattaacacatattttatatattacatttatcctacactttatttttacagtaaagtaagctagggaaaacaaaatgttataaaaataataaagaagagaaaatatatttaatattcattaagtgggaagtggatcatcctaaaggtcttcatccgtgacatcttgatgttgagtaggctgagaagaaggaaaaggagttggtcttgctgtctcaggggtggcagaggcagaagaaaatctgcagataagtagacccatgcagttcaaacctgtgtcgttcaagggtcaacactacttcctaacacattttatgaggcagcattaccttgatacctaagccagaaaaagcaacataggaaaactataggccaacctctctgaagaacattgatgcaaaactcttcaataaaatattatcaaaccaaattcaacaacacatcaatacatcgtgattaagtgggttttacccctgacatgcaaggctggtttaatatacacaaatcaatcagtgtgatatatcacattaacaaaccacatgatcatatcagttgacaaaaaagcattcaatacagctcgatgtctgatttgataaaaacttttaacagtttagatacagaaggaaagttcttcaacataataaagcctatttgagtaaaacccacagctaacatcataatcaatggggagaaactgaaagctttttctctaagatctggtataaggtaaggatgccaactcttagcacttctacttagcagagtactggaggtgctatcaagaaccattagacagtaagaagaaataacaggtattcaagctggataaaaaagaagtaaaattatgtctatttgcagatgacatgattgtgtatgtgaaaaatcccaaagattgcacacaaaaacctattagatctaataaattaactccataaagttgcaagatataaaatcaatatataaaaatctgacatttctatacacaacaatgtagccaaaaaggaaactgagaaaacaacctcatttacaatcacatcaaaaaaataaaataggaataaatttaaccaaggagagacctgtacactgaaaactataaaacattaataaaagaaattgaagaggacacaaagaaataagatattccatgctcttggattggcagaattaatattttttaaatgtccatactactcccaaaggaatatatagatgcaatgcaaaccctatcaaaatttcaatgacagtcttcacagaaatagaaaaaaaaacctaaaattcataaggacccacaaaagaccccaaatagccaatgcaattctgagaaaaataaagttggaggcatcacaaatcctgatttaaaattgtattacaaagctgtggcaaccaaaattgtatggtactgatatagaaacagatgcctagactaatagaacagtatagagagcccagaaataaatccaaacatatatggccaactaattttcagcaagggcaacaagaaaacacagtgaggaaaagatagtttcttcgataaatagtgctgggaaaactgtatttctacatgtaaaagaataaaattggacccttatcttacgccatacataaaaatcaactgtctctccaaatttgggagcagcagttttccctgtgagtttacttctctgataaatataaaaaatgctgatcagtttttttcctgctttttacttgttgttaggatgaatggcaacttccaagcaccttacatgccagggcagaaactggaaattaagctaaaaataacattttaaatatccaaatggttcccagagagacaaggagtaagtttactgaataatctcagttatctctgagatagtatcacatcatctaacatatgtgtagttgtatcccagaaagagaaagaggtttggaaaaatatttgcagatggaatggctgaaaattttccaaaatgaaaaaaaaaacctctaagaccacaagtccaaaagatcatcaaacaaacaaacaaacaaaagatgagataaatacagagaaaaccatatcaaggcataacataataaaattgcaaagaaaagaaataaatataaaatcttataagaagccagagaaaacagatacattaaaaagacaggaatcaatgaagatttctcatctgaaaagtcagagaacaatacaatgaatctttaaagtgctgaaattaaaaaaaaaatctgttaatctagaaatgcatatccagtgaaactatccttccaaactgaaagtgaaaagcacacatattcaaagaaaaattggagagaatttgtcaccagtagatgtgcactacaaaaaaggttgaaataagtcgttcaggcagatggacctgatactaaatggaaacctggatgaaaccaagggaacaaatagtactggacataaaaaaagtgtgtaaatataaattactttttattctcacgttaaaatttctttaaaagacaattgaatatttaaagcaataataacaaattgcgaggtttataatacttgcagaaacatagaatatgaatgtggaaatggaagtatactgttaagaaacttacattttatatgatctggtacaacagtaggtgaagacagactgtaattaagatgtatataataaaacctagatcaacaactataaaaaccaacagtgaagaggtatagctaataagctaatagtagaaataaaataaaatgttaagaaataattaattcagccactgcactccagcctgggcaacagagcaagactccgtcttaaaaaaaaaaaaaaaagaaataattcaataaaaggtaggaaaagaggagaaagaaacaaatataaaagaaatagcaaaatggtatattaaaacctaacaatatcaataactatgttaaatataagtagcctaaaaattccaactaatcggcaaagcttatcactgtgtttttaaaaaaaagtttaactacatggtgctttcacgataaatgcttaaaaatcttttaaaaaaggttaagattaaaaggatgacaaaagatgtaccatgcaaacagtaatcataagaaaagtggagtcaacatatgaatatcaaacaaagtggattccagaacaaagaagctgctctgtatctctgtagagatacagaggggcatttcacaatgataaaaattgaattcatgaaaatgatctaacaatcctaaatatgtatgtacctaattttaagggcttcaaaatacatgaaacaaaacctgacagaaatgaaaggataaataggcaaattcacaaatgacaactgaagataattcaaaactcctttcacaggaagtgataggacaagtagaccgtattagtgaggatatagataattcaaaaactgctatcaacctacttgaccattaatcaagatagaccatattctgggccataaaataaatttcagtaaattaaaaaggattgatctcatacagactaaatgctctgaccataaagaaattaaattagaaatccataacagaaatttatcttaatttttgtaaagtaaaagatagacatatactaatattagagtcaaagaaagaatcatggctaggcatggtagctcatgtctataatcccagtgctttgggaggccaaggcaggagaattgcttgaggccagaagttcaagatgagcctgggcaacatagtgagaccccatgtctaagaaaaaaaataatttaaaaattagccaggtgtggtggtacatgtctgtattcctagctacttgggagttgggaggtgggagggttgcttgagcccaggagtttgagtttatagtgagctgtgatagtggcactgctctccagcctgggcaacacagcaagaccctgtccctgaaaaaaaaattgcaaaggaaattagaaaatatttggaaatgaatgaaaatggaagcatatacttatacaatgcagctaaatcagtacttagaggaaatttttagcttctgaattcttttattagcaaagaagggagttgaaaaataagtggtataagctttcaattgaagcaacctgaaaaagaatagcaaattaaagaccaagtaagcaaaagaaagaaaataaatataagagttgaaatcaatgaattagaaaagaggaaaacaatggagaaaaattaatgaaaccaaaagctggttctttaagaacaataaaattgataaatttctagatgtatagatctgaaaaagaagacacaaattaccaatatcagaaatagagacaggggacattactatcagattctgtagacattaatagggtaataagaaaatatgaacatcatatttacaaatgtttgataatttaaacaaaatggataaatctcttaagtgttagaaattactcaaagtgactcaagaattagaaaactcaaagacccctctatttattacacacacacacacacacacacacacacacacacacacacacagacagccccttctgaaaccctgatatacccctctgcactgtgttagttttgcaaacatttactttgaggaccttctccgggttaggcactgtatgtttacagaagtaaaagatttaatgcagttggggagggaagagacagatgagtgaataaataaaatactgcataataagtgtcatgaaagagatctgcacagggtgttattaaggaaaaaatatgagataccctacatgagagaagacttccataaggaggtgaatattaaagggtaatgatgataatgatgatgatgatgacaatgacaatgatagcaacaacaacaaaataactgtttacttttctcttgatctattgacacatattggctaaatgtgttacacatatgaatgaatctaaacctctcaaaaactctgcagtaggcactattatcctcactgaaaccgagagacccagcagataaagaacttgtctacggctatgcagccagggatgaaaacgaatcaagtgactgaaagagaagaaagtttcagatgacaggagtgacgtgcaaaggtacagacgcttgaggaagcatggtaggtagatttgaggctgcaagcttctttccttccttcacaggcacatttcttgaaaggtaatatctaccccctgccttcattttcgtttccttattagttcaagaaatatttactgagctccttggtgactacccagtctttccttgatgacctgaaatttgaccctgtcccttctattcaacttgccaacaacctttttactgctgtaataagaggccatttttttataatactcattttcttctgattataaaagtaaattcagattgtggtgatggtatacaattctgtaaatctgttaaaaatcattgaactggacacaaaacaagaatgtctccaaatgtaaattatacttcaataaagatgggtttttttaagtaaataaatgctcattgtagaaaaaccaagaaatagaaagaaatacatatggtgactatctcctgtaatctatcaccgcatgtagctagtgatttttcggtgcaatgtttttgcacattacctggatatttctgaagtcttaaacctgatattttcttctactcagccctgcccagcttgtcattctaccttccctgcctcgtgggaaagtatagaaaaagcaaaggaggttgggcacagtagctcacgactgtaatcccagtgctttgggaggacgaggcaggtggatcacctgaggtcaggagttcaagaccagcctagctaacatggcaaaaccctgtctctactaaaaaaatacaaaaattagccaggtgtggtggcacacgcctgtaatcccagctacttgggagcctgaggcaggagaatcacttgaatccgggaggtggaagttgctgtgagctgagattgcaccactgcactccagcctgggtgacaaagtgaggctccatctcaaaaaaaaaaaaaaagtccatttttggatttaaacgataaccagggctgactggatccagggcggggaataagaatactacttgaaagtcggttttatctccctgcttccctcacccccagactagaaaagagggatggggcataatcgggaatgaaggagaaaatgtttacctgcggttttgttcccgagaaaagaccctatttcttaccctgccttctccattaagcctgggagatggggaaacaatagaagccccatataggtcaggggtcctctgagagcagaaggagctggtgttcacagacaggtcaggagaggtgagaggctgtggggccacactgtagagcagagagacacaagcagggatgagcttggcagcgtgtgttcaagctggccaacaagactgcaggacccgtttcctgtgggctccccactgccccctgaccacacacaggaagaatacaacatttcctgggtgtctgagagcagcacggatgtagccaaaataatgtccaaccaaagattagtggggataatcgatgtctccgtgggtgctgggtgcgtaggtgacatccaggatcggaggccctaccccatggcatgatagagccactggggcttacatgccatcctggaaccaggggagtgactgaggcctgaggtgatgaaaggcaagtagcaagtttctgctgcacagccaaatggtgattcaaaacagaaatggattccagtgaagcaggcacctctgactttatggcctgagatccagacccttcacagcatatcagcaggaagggttcagcgaggctttggtggtatttggctcagatcctggtttgctgctctgcttcctcttcacgaaggagacatgcaggaaaggagtagtagcagcggagacacaaaaagctgctttattacaggctgcttctgtgctcaatacccttgatgtggcgagtgggcgggaacatgaggctcagtttctgagccccatgaggtcaagactccctcctcccaagcttgaaaatcagcatttgaccatcttttggtcaacataggggagaggaacctgaagccgtagcaagctcacttaggcctaaagagagagcgagccaactgggcctgcctggaaagactccagccctgtcataccctcacagctgggacacggagtcagaggaagctagggccatgcaagtgtgacaccagggaccctgctcaccctcaagcatggcagagacaatgtcctcaccagatcagtgctgcctctgcacgcaggggaagggggttgaggaagtagagacggcaggaaagcacaagcatttttatcacggttttccccactttgcattatatcataaacattttctcatgtaattaaaattatttcaaaacctaatttttaaaattttattttaaattttatttttttttgagatggagtctcgctatgtcatccaggctggagtgcagcgggtgcgatcttggctcactgcaacctctgcctcccaggttcaatctattctcctgtctcagcctcccgagtagttgggattacaggcatgtgccaccacacccggctaatttttgtatttttagtagagatggcatttcaccatgttgactaggcttgtttctaacccctgacctcaagtgattcacccgcctcagcctcccaaagtgctgggattacaggcatgagccattgcgcccagcaaaacctaattcttaaaagcttattatttcatcatgtgagttgagacttttaaaatgttcccataaattcaggaaaaaactgattcttccgtagccacagtaacatgtagccatcagaactggttttaaatccgttcaattaatcagtgacgactggctttggtgaacacactttcgtaatcaaccaagaggtgtcagcccctgacttcgaaaagccagctaatcagagatgaactcgctgcagcaaacatacctctgaggccaaccaatcggcaacagtctcacacaagtcgctggacttctacttcacaatgtcaagccgtggcttcgaaaggacctcccacctccatctctatgccaccccaaaccctgtacaagatctaccatctgctctattcaaagggactgtgcctgaccggcatagctgcccgcccccatcccctttttttttgagacggagtctcgctctgtcgcccaggctggagtgcagtggtgcaatctcggcttgctgcaagctccgcctcccgagttcacaccattctcctgcctcagcctcccgagtatctgggactacaggtgcctgccaccacgctcagctaattttttgtatttttagtagagatggatgttagcccggatggtctcgatctcctgacctcgtgatctgcccgccttggcctcccaaagttctgggattacaggcgtgagccaccgtgcccggccagctgcccctttttatagttagtatgtgatcacctttctctttttatttgagatactgacaggagatagcatgacttattgaaccattcttctattgctggatatttagattatttccaatacttaatcataaataaaactgtggtatttatctgcacataaaaatgtttcattgcaccactgattatatttttaagataaatcccagaaagtgaaatgactaagtcaatggatagaaatggttttagagatttttataaatattgtcacagtgctttccagagagactgtatcaatttacactcatatatatcattgtctggggtgcccattctgctatatgtttgtaagaattaagtatttcaattaatacaatctttgccaatgtaataagaatagtttcttattttaatttgtatttatttctgagaatgaatatgctagttgtttccataacacctattctcccttcttccataagaataaaatttttggttgggcatctgctgtccagaataaagactacattttccagcctcctttgcagctggacgtggtcatgtgaccgcatttaggtggcatgtaaatggaggcactgtgtggcagcttctggaaacttccttttgaggcgccatgtaggtgaacttggattcttctctgtccacttcccactcctcattctgatgcctaggctttaatgcaagcttggaccacaaagttgaggactgcaccacagggatggcatagggtaagccagactgtgacctgaatgtgagagaaataaactctcttgtttaagccactatttagatttggagttttctgtgactcactggtgattctaatcataatgaatacacccctggtttattggccatatttcctgaccttctgttctgatttgccacctgctgacttgccgcttccatctaagctgtccccctgagaacataacaatttcacatctcaacagttctaagtactttgagggtaggagctgtgctatagtcatttatcatcccactacccacaccctacacaccaaggccagtgatcaataagcaggtgcttatcgtagtactcaatatgtgtctagtggttgaagttctcctccccttcatgaatattcttaatctggagctatagctaggctttaagagtccatagaccactccctaaagttttattcaaaccttttattttagtttattatattttattcatatataaattttttacatatatcctatatttttttctggaagagaatctaaatatttcagcatatattttcaaaggactaaatgactcaaagaagtttgaatggcactgtacctatgacacactggaaccaccattctgccccaccaataggcttaaaaccattactttttcttcagttcattggtccatcacatttccactgccttacccaattcagttatttctcagtctcacgttgacagtattctcctgacctgtctccctacctcaatcattagcccatctctaatgtgccctggacctctatggtgactgtcctgccgaaggatcagtcctgcttaccaagtccacagtccccaccctggtactcaaggtccttcgtgataaggagcccatgtctctttcaaacaccacctttatcctgttggagatcaacttctcaaagacaggaatcttttgtctgttctgttcactgatatatcccaagaccaacacacaacacaaccaataactgctgaatgaatggaggaatgaatgaatgttttctaatatggattaatggggcttttccagatcacttttttgctttgcagtctctgtccctctgccataatcctaccaatataccatgactagttcatatgctaacattgttttctttgcttatttcccttagaagtgatttactttttgccctttagtatttagagtcctggtaacatgcatggctgttctatagtcttttgaaaatgtgtcttctttctgaataggttattaacacagctcgtggctttggcatcattgttcagcccttagtagttgcttgaaaaatactgtttaatgaattaattaaaaaaagaaggctgtatgggctgaattggtgagatttttatagcttttagataaaaagatggctatttctttatctccacttagcatattaaaggtaaggcagagggagaggtggaagtgaaaaagtttctaagtatagaaaaatatgatttactatactttttattttttgttatttcttctaagtggagataaaagagaatttggggtaaaatgaaaattggacataaatttacccaaaaaaaggcatctttcagggtgcagtgacttgcacttttaatcccagctacttgggaggttgaggcaggaggatcatttgagcccaggaggtggagcctatagtgagctatgattgcaccactatacttcaccctgggtgacagagcaagaccttatctctttaaaaaaaaaggcatttttttgtcttggtaaacaatttgttttatatgccataaatagtttaaggcatttaaaaataattcaaatatttaaagaaagttgatgataaaaaataaccttttaaagacataatttaatatcaattcaaagaaaaaactctcacattgcagttataacttccccaaacattgtactaaacaataaaatcttactaacttagttgaaaacacaaaagctaataattgttcctagcaagttactattaagtagtaggcagactgtcatttacaacacttctgattatcacatttctaatttgaaagccccttcttgaaaagagtaatcgagacaggagagtggtaggaagtgagcaaacatttgtgtactatctactaagtgtcaggtatgaataagattgttcttattcttgatgttgtatcctaagacttttgaatcttatcttaagtcaaggacaagttctcagtttgatgtcatcatcacaggaaagggtactttaattcaagaattcttgtcctttttcatcattacatataaatcccaactcaagaaaatggcaaactagtttaaatagcaaaacatctgcaaatgtcactgatccatatttagtgactcctcagtttcaattcgtttctagaaaattgactgaatcatgttagatggttgctttacccagaaacagaagctaataattaggaactacaagtgctcaggtttttgtcactgcctattcattttataagaatcccataggaaagccacatactttattaaagaaggaataaacaagaccgtttttgagaagtgttgtagtgtatgcttatcaatacccctatttactaatacttaacaaaagctctttttcctatactggacctactgagttttccattaaactcagtactgagtttctcattaaatactggacctactgagtttctcattaaatactgatgaatccattctaagaagaaatgcccatatattcctgaatttggtcctatttctgaatatgtctattggtactggatacattccctgtccacacagagttagtaactgtggtcagttttgtggacttttataatatttatttaatggcagttaacctaaggaatagcatgggacagttgattttcttctctcactataattcaggactaattttctcaccattgcaacatatatttacatggctaacacccataaatgatcacataagatttacatgcatttccccaccctgctcactgaataagaaagcaaactgtgaaacaagcttatggaaatagttaaagaattaagatctaatcatatttcaaagctcaccctcagagaagctctctgaagcaaaggccgcagaaactgaaactcatttattacttgggctgaaatacaaactttaagagaatgagggagaaaaaaacctttactttgctctagggaagaagcaactattctctgatgtgcagaaaataatttatcctcaaagaccaaatgtaaatggggtcaattaattttttttaaaatctctaccttctgtaatatttttctaagtctttgacactgttacactttatactaaaatctaatgtgtgatttgacaaatgtcaaaggaaactgactactgtatttaacaaattttaataagcataatgtatactttaaatatacttaacacaaaatttacatgagtggccattctgtggtatagtactcttaggaagcagatagaacacctatgtcaaattttgacttcaaagatttaaaaaatagtgacattgttcaatgatcaaatgacatgaatcagccaagtaataaattatttgaattataagctttgaatctaggcattagatgccccaatttggcatgctcataatgtcttattttttgtttttaaaattttttactttttggttcaattgggtaagaaaaaaagtaatgtatattaattggaaagtttataaaatatatttgcactaagctatgctatgtcagatttgtagacagttcaatataaaacagtggtctcaatacttaacaaaagctctatttcctatactggattattttgagtttagaatagctgctgaaaggacgttcttgagatttaagcattagctgtttctaatttaaaatgacctagactcaaggatacaaaatcaatgtacaaaaatcagtagcatttctatacaccaataacatccaagttgagagccaaatcaggaatgcaatctcatctacgatagctacatactcacaaaaataggaggggaaagatctctgcgaggagaattacaaacattgctaaaataaatcatagatgaaacaaacaaatggaaaaacattctatgatcatggattggaagaatcaatatcattaacatggccatactgccaaggcattttacaatctacagattcaatgctattcctatcaatctaccaatgtcatttttcacagaattggaaaaaaaactgttataaaattcatatggaacaaaaaaaaaagcccaaataaccaaaccaatcctaagcaaaaagaacaatgctggagggatcacattacctggcttcaaactatactataaggctgtagtaaccaaaacagcatggtactggtacaaaaacagacacatcgattcatggaatggaatagagaacacagaaataaagatgcacatctgcagccatctaatcttcaacaaagtcaaccaaaataagcaatggggaaagaactccgtattcaaaaaatggtgctgggatatagatagtgggctagccatatgcagaagaatgaaaatggatcccttttaccatatacaaaaattaactcaagatagattaaagacttaaatgtaagacctccatctataagaatcctagaagaaaactcaggaaacaccattctggaccttggccttgggaaataatttatgaataagtcttcaaaagcaattgcaacagaaacaaaaattgacaagtggaacctaattaaactaaagatcttctgcacagcaaaataactaccaacagagtaaacagacacactacagaataggagaaaatattagcaaactatgcatctgacaaaggtccatccagaatctataaggaatttaaacaactcaaacaaaaaacaacctcataaaaaatgggcaaaagacatgaccagacatttctcaaaagaagacatacaagtggccaacaaacatatgaaaaaaaatgccccatattactaatcagagaaatccacatcaaaaccacaatgagataccatctcacaccagtcagaatggctattactaaaaagtcaaaaaacatgttggtgaggctgcagagaaaagagaatgcttatacactgttggtgggaatggaaagtaattcagacactgtggaaagcagtttggagatttctcaaagaactaaaaatggaactaccatttgacccagcaatcccattactgggtatacaaccaaaagaaagtaattcattctaccaaaaagacacatgtacatgagtgctcactgcagcactattcacaatagcaaaaccatggaatcaacctaggtgcccatcaatggtgtattgcataaagaaaatgtggtacatatataccatggaatactatgcagccacaaaaagggcgaaatcatgtcctttgcagcaacatggatacagctggaggccattagcccaagcaaataccacatgttctcacttataagtgggagctaaacattgggtactcatggacataaagatggcaacaatagacactggggactactagaggtgggagggagaagagggtaggggtgggaaaactaactgttcagtactatgctcagtaactgggtgacaggatcatttgtaccatagacttcagcatcacgcaatatacccaggtaacaaacctgtacctgtacccactgaatctaaaataaaagttgaaaaaaaaataaaaataaaattgaaaaagaaatataagactatgcaaacttttaagacaacatacattatctgcactaaaagtttactacttttcaagaaaatatttaaaaaaaaagaataattcacatttaaaaaatgggtaaagaacttgaataggcatttctcaaaacaagatacacagaaggctaaaagcacctgaaagttatttaacatcattagtcattaaataaatgcaaatcaaacacattgaggtactgctacatacccagtagaatggcaatagtaataataataatgatgatgatgagaataacaagtgttgatgagaatgtgtcaaaatttgaactctcctagattgttgacaaaaatgtaaaatgtttcagctgttgtagaaaacagtttggaagtttttcaaaaagttaggcatagaattcttatgtgacccagcaattaccacccaggtaaatactccaaagaactgaaaacaggtactcaaacaaatacttgtacacaatttatcataacacttctattcacaatagctaaaaggtggaaacaattcaaatgtacatcaaccaataaatggataagaaaattgttgtataaaaataaataaaataaaatgacttagagtgtatctagttttccagaatcatctacatcaaggctgaattacttcgccacttcattttaatataatattcaaaatgtttgaaagcaataagtatgatgcccatacaaaacatgtcttatttccccgttcagttgacaaaaataaggtgtccagttggctctgttgctttatagttgaatttcccatcacccagaccctaaaatctacttccaccatctttttcattacataaagttcctttgatcgactatttcaactgttgccaggtggtaagcagtaaagcatgtggttaacagcatgggctatgaagttaaaccaacctgggtggtgtgaccatgggcaaatcatttaactttcctgggtattattttataacatgtagataaagtggacaataaagattaaataggactgaggtttagcaatgtaggagtgatgcaagtgcaagatggcaatggatcagagagtagtgagtcagcactggaatgaagacaaacactaggttctttatgcgtgagaaaatgggaaaaataaaatgcaaggcaagagcgatcaaaaggagaatttggtagactgaaatcctggaggtgaactaggcgagtaatgttaggtctaaggcatggctgcatttttgcatggtctaaagtggaaacaagatataacagaagtgactttactacagctgagcttataaacttgcagggtcagactgttagaaaagacacctaccaaaacagtcttttacagtagattctggttactctttcttattcatctttccactttaaacccaaaagaactatttgcctcagcttctttactggggaagcaattttcttcctggcatgtccccaagactggggtgctctgctactttttctttttgtttgagacggaacctcactctgtcgcccaggctggagtgcagtggtgtgatcttggctggctgcaacctctgcctcccgggttcacgccattctcctgccttagcctcctgagtagctgggactatgggcgcatgccaccatgcctggcaaatttttgtatttttagtagagacggggtttcaccatattgaccaggctggtcttgaactcctgacctcatgatccgcctgcctcggcctcctaaagtgctgggattgcagagtgagccaccatacccagccagattttctatttttaataacagctgtagtaagatataattcacatatcataaagttcataatttaaaactgcaccattcagtggtttttagtatattcatagatctgtacatttatcaccacgacaaaattctagaatattttcatcacctcaaaaaaacaaaaaacaacaaaaaaagaacccatccctattaacagtcacttcccattctcccatcctttgagccactggcaaccactaatctattttctgtctctagggatttttccactctgggcatttcacgtaatttaaatcatacaacatatgacctttcatgaccagattctttcacttagcatgtttccaatgttcatctatgttgtggaatgtatcagtacttcattccttttcctagtcaaatccattgtgtggatataccacattttgtttatccactcctcagtcaaacatttgagttttttccactttttgactactatgaataatgcttctgtaaacattcttgtacaagtttctttgggaaatattttttcagttctcctgtgtgtacttaggagttgaattgctgagtcatgtggtaactatgtttagctttttgaggaactgccaaactattttccaaaatgactgcaccattttacaatctcaccagcaaagtatgaaggttctaatttctccacatccttgccaaaactttcgtctgtcttgttgattacatccagtctaatgggtatgaagtggtatctcattgttgttctgatacatgatttgtgattatttccttctatctgtgggttgttcttttactttcttggaagtttcctttaaagcttttcattttgatgaagttcagtttatctattttttcctttgtcatttgtgcttttagtgtcatatctaagaattctttgcctaatcctgaaatgtcatgaaaatttacttgcatgttttcttctaagagtttcatagcatttttctctgatattgcttttttctaaaagttttatagttttaccatttatttttaggtctgtgattcactttgaggtccttttatgtgtatcttgtgaggtagaggttgagctttactcttttgcatatggatatctagttgtcccagcactatttgttgaatttccatataaatttcaggatcagtgtgtcaatttatactaaaaaaggcagttgggatttcggtaggattgtgctgaatctgtatatcaatttgggtaatactggcatcttaacaacgttaagttttctgatctgtaaatatgaatgccttttcatttatttagattttaattttttcattgatgttttgtagttttcaagatacatattttgcacttcttttgttaaattctattcctaagtatttaattatttcatgctattttaaatgaatttgttttcttaatttcattatcagattgtttactcctagggtattggaatacaattgatttttctatattgatcttatatcctgcaaccttggtaaactcttatttttcaaacaggttttttttttggtaggattcctgagaatttttctgtacacaagattttgtcattggaggatagaattttacttcttcctttccgatcgggatgacttttcttttcttgccagacttcctaatttctgtcagtctattagatataacatttcattagtgtcttatttttcatttccttggttactgacgatatgagcagttcttcatgtatttatgggctactgatatttacacctctgtaaaatgctgttttgtctttagccaattcttttttttttttttttttttgctgttgttgttgaggcagggtctcactctgtcacctgggctggaatgctgtggtgcaatcacagctcactgcagatttgatctcctgggctcaagctatcctgctgcctcagcctcctgagtggctaggaccacaggcatgcaccaccacacccgacgacctttttatttttactagagataaggtctcactatgttgcccaggctggtctcaaacttttaggctcaagtgatccgcctgccttcgtctccctaagtgctgggattataagcaaagctgctacacctggccttagccaattcttttactaaactcttcatttctgacacatgccaaatttctatggcgtgtgtcagaaatgaagagcttaacaaaagaatattatgccaagtttccataactacatctatatcatctatatatatcaatatatggctttatgtgctctctattctgtttctttggtcagtctatctatacttgtaccagtgccaaactactaacgtccatacctttgcaacaaattttgattttgtatgtggtaggagggaaatacttttgactttttctttttcagaataattttggctgctcttgggccttaggccaggcacagtggctcacacctgtaatctcagcactttgggaagccgaggtgggaggactgcgtgaagccaggagttcaaggtcagcctggacaacaaagcaagacccccatctctacaaaaaattttaaaaattcagctgggcatggtggtgtgcaactgtagtcccagctacttgggaggctaaggtgggaagatcacttaagcccaggagttcaaggctgcagtgagctataatcgcaccagtgcactccaatgtgggtgacagtgagatcctgtctttaaaaattagatttatttttgtcagataaatccaaggaattgcattaaatctataggtcaaattgaggacaattgacatctttaagatacttaaggtattcaagatttagtgggtatatttctccatgatttaggtcttctttaatttcttttaaaacagttaaaagttctccaaataggacttatacggctattcttagattcattcctatacactttctattttgctgtgttagcagaatcattttttaaattatgttttctgtttcttgctggattatatatttagacaactgctaaactgtcttattatttccaatagtttactgatccacttaggttttatgtatagattttatgtacagacaatcatatcatcagtgaataatatcaggttgcttccctctttctaatttgtatcctatttctttttcttgtatagctgtgaccaatggcatctgtatttcactgttgaacagcagcagtgattaacgggcacccttctcctttcctgattttaaagggaatccttctaacatttcaccctaaaaatgatgtttgctctaagtttttgattaatattctttatcagggtaaggatactccctcctattcctagcttattaagattatcacagatatgagttgaattttgccaaatgcttttctttacctgagatgatcacatggtttttctcctttcagtgtggcaacgtgatggattatattaatggatttctaacatgaaatcacccttgcattcttgcattcagtccagcttggttgaaatgtataaacatttttatgtactgctagattctgtttctaaattttggttaggaattttacacttaaaattaaatgtaagattggtatgtaatttgctttttactgttcctggctgactttcatatcaagactacactggctttagaataaatgggggatattacttctttttttcctgtcacagattttgtttattattggagttttctgttccttgaatgtttggtaagaacttgaccaaaatcatttgagtctgatgttttctttaataaaatatttaaaactaaatgctatatttatttaatttctacaggactattagagttttctattctttcatttaatcacgttttctaaaaatgtttccatcttatccagattttcaattttattggcataaagttattcattaaattatcttttctatgttttttgactcaatcagcagtcatttttcctatttcctcctttccctatttgtgtcttctccctatttttctgaccggtcttctaaaaagtttatattttactagtcttttcaaaggatcaaactttgcgtttgccgaattactgatttttaattaaaacctctaactcctatggcatctatgtccttatttcctcctggttctccagggacctctctgacaattgcttatcgatctatagctggttttaaataattgccccattccatctgccctttccttaccatagcaacctctccctttttaatccattccgatagtaaatcatctttttgttgatatgacttccaaattcatccctagccactacagccttggtacccagatccagacacctctctgtgatgtcccaaaggcactcaactaactgaactcgatcatttcttcttgagtctgttccttctcatcttagttagtggcacttacatttagacacccaaataagaaacttagtagaattttttagaatccctctctctcgctcttgacagtcctgccaacttttacttctagattttcacctttctctcctgaatttttctagtagccttctaacttattgtcctattcactctagatatttcatttttgctgtctgatatagatccacccaccatctttcaactgatactctatctaaagtataaatatgatcatatcactttgtaattaaagaagcaattttcattgcttcttagcaaatactaaagttcaagttccttaatggggcatacagtaccattcagggccaggactttacctctccagcttcatgtttctctacttcccactctaccttttatgcctctgtgaacaccagactttagttccctgaatatgctatttcacaccctgtgtttttgtcccattttttttttcatgaatatcattcatttccttggtaggatcttaatcatcttgcaataatcatttgaacatcaggaagtcttccacaaaacctcaagaaatctcagtttgggccaagtcacatttctctatcggcctatacacaattattttattgcttattatattaaaattatctatacaactagactgacaactctttaaggggagggggaatatgttgtacatgttaactccaagcatctagcatataataggatgcaaatttagcttccttgagagaactggatcatagcccacccttctactccaagtctatatcctaactgttgcctgacaggctcagtgtgcctcacaggaagggagtagcagctgaaactgaccaaaggaacagaggaaaacaaaatgggtagccttgcctcttccctgcctgtagaagaagctggcagcttaaatcctgggcaagagtagattagacagtttgctactgaaagtgcttaatttgagaatgcagtatgggacttggaaggcagagcttctagacaggggtagttcttgacatttgtgtcctaaaggaaagagagccatttttggctttataagaagaatcagaagcaaagactataagggatcaaggtttccaataaaccaagctagggatcagggcctgattcaaatcccagcacggatctatgatgggaactgagaccaaggacccaggtagaagcctggggaataaggaaaaaggtgagcagtaactagggaagatgcagatcatgactacaagggctcctcaggggtcagttcagtcgaggcccagcaggtgctgaatgtgcaagctgcatttctatactcttgaagcagcagtcctcaaaaaccaccagcttgggcccagctggcttcagtgactgggcccagtctaagtgctctaaatcattctctcttcagtcttaacctctccagtcctcagctccttcgatcctcgcatggaaatagccttaattaggacctatattttctaaacacagggctcaggccattttctgaaagctctgcttgcttttggcttttcacagtgatgctctaacatagtggctcccacccaggggccttagatttaggaggcatctcaacattatcagaggacctgaggaaaagcctgttagaagagcttggggcttgtaaatagaatctctgtgatcttctgctaagttcttcaaactgttcagtctcttctaactaggccttggcagaatcactgctaaaccttccatcttagtctaacacccttgcgttggggatgtacctgacatacaggcaccaactggcattttatttcctttcagaccaaaatcagcactgcaggctaccctatctatatcccaattacactttattttgatcccatttggaatgggggggaggcttaatcttcatatgattttgggggggatttgattaagtctaatgtcagactgatttattacagcattagtgtaaatcttttagatttcacgagaggaaaaatatcaataaaaggatgacagtaggggatgaaaaataaaacaagaaaccaaaaccttgagaaataattttgtaaagcttaaatgtctgttaatgggctatagcatttaaaaatatttctccaaacaggattagaatgaagaaagaaagtaggaaagatgatgccagagtaacaggagaaaaacgcttttgagctttttctactgaatcagccaccaggatcttgtggcccaggaatctgatttaaaagctccctggttgcttctgataatcagctttaggtgaagaaccactgttctagctaatgaggacaaaacagagggcacttccctaagtaaaagtataaggacagtaattgatacaaaacacatgatttctgctaaccacttctgccatattatctagtttctatgaaaactttttctctgaaaagaacccaaccagttgagattatctattctaaataaatgaatatcatcaactttgataacccctaaagagtttctatagtaacacagaacaaagataataaccatcaagatctaggtaatcaagactgcttagtgtgcttaaactggcttactttaatggttttaaatgcagtaaaaaccaaagagctcagctctaaggaatcagacagcatcgctacaagaatatttaattatgtggttccccctaaaaaaacccaaataaaatacaatgaaatatattgtttaatcacaaaagcaattaaaatacataaagacaattttcactgagtccgcaactctcagcatgtaattatttatctaattcaagtcatgcagctaggtgttggaattaacttctctgaactagatacaaaaatggaaagtcattttgggatttgatcctcattcattttcaaccaaatatccaaattcatttccaattcacacaagaactgccgcagctttacctaaatcagttttctacaagttaaacagcgctcctacactcagatgtgattgtggaactactttgatctttattcccaaacttattgctccatgtaatccatgacaaaatataatgtgatttactatatctctatatgacagcacagcagctgacagaacttaataatttagcataagaaaaaaaccttctggcaccaaaatacacagatcgtaatggggactctttagtatcagtttacaatgaagcctatacaagctgatcctaagaacttcaaaacaattcttttttttcatcatgcatttaatgaaggagatttttattccttaaacatgctttgtagctgcaagcaagtaattcgggaacattttgtttttgttctcattaaaacaatgcagaacaagttacataccgatgtctctttctcaaagaaaagtactaaatttctccattttcaagtaagtgaagaaatacatcatacaggaagctaaaaactctttaaaaaaaaaagtaaatttacgttgtgttatgttacataaaaagcagagattagataattaggtactgtatagagaaccatcagaattaggtgaaatcaagacctgtctctgaagctgctagagctgaattttctctgacctgcacatgtacccctgaacttagatgtttgaaaaaaggaatagaagctatataccaaaagagggtactgttaagtcagaacatatggctggcactgatatgttttagtagtgggtatttaaaaaaaatatttcatggaggaaattgcctataccaaagattatataacttccttagtaatctagaaggtactgttaattcatttttagtaatcaagaaaatacacgattgaacacctctttttagctggacgcctagtgggcactgaggatgtagccatgtccaaatcgaagctcctgtctacagaaagcttaccctgcactggtggggggcgagggagggggcacacacaataaacatatagaccaataacggagtaacagagggatgcatgaaatatgaaataataacccagagtaagagagtggagggtgaagatagctcatttctttttagcactgaataatattccattgtttgggtagtacagtttatttacccattcatttattcagaaaaccaaataccgcatgttctcacttataagtgggagctgaatgatgagaacacatggacccatgagggagaacaacacacaatggggcctgttggaaggtggggagtgggagaagggagagcatcaggaagaacagctaatggatgctgggcttaatacccaggtgatgggatgatctgtgcagcaaactaccatggcacatgtttacctatgtaacaaacctacacatcctgcgcatgtacccctgaacttaaaagttggaaaaaataaacaaaaaataaaaactaaaaatgtcttcctctaattcctacaagaactcacactttatctcacatattctctctctctctgcccttgaggcaacaggtggcaaacttacctaaatctgctttgctaatactttgaacatagacacattttcctttatttctcagccttacttagtccatcatttatgaaaactggatctaaaattgagataaatctgtaccctctaggtttgttaatatattcttctgctccaataattgttctacagaaaaatagcatttgtgtattcctggaaaagttcttctggaaaggataatctttgttgtacaataatcctaacttcattacctttctcttattccttcagtttgacctatatcttatttctctgtgagtgcccccattctactctccatagctacgaagcagtgattatggaaaagaactattcctgatgaaacaaaaagaatgatagttttcttgaataattcagatattctctttccactgaaacttctgtctattcaacatttatggaatgcctgctatattctaggtagtcttccaggcactggggatacagcagtgaacaaaacgggcaaaatttctgttgtcatagaagttacactccgatggggagtaataaaaagctgtattggcatgtatagtcttctgttgtagggtaaactcacttaaggccatattcttaataatcattttcatctttgtacgcatccccatgacaaaatatttcgcaaaccatagaaaaaggataaatattcattaaaagaatagacaaatgatctgtttcatagcttcaatctttctccttccactggctcatttcctttgccaaatctgaagacagaataagctacttctcaagctgctttctccttctttcctttccttccctctataatgcatttaaaggttagtctgtgcctacaatttctactctctaatttctccacatcccaccactttactgaaattggtttactgagggtcaccaattacctacaggaaactccccctggcgaaactctcaacttctctaatttcagaaaaatatttcccattgcctactagaaagctccaaatgggtatcctgatggcattaaacatgtgaactccatcattttctccttcgaatgtacctttcctctatgctccctctgtaggttgatggacggcatgacaaccttggacaccctcctcaagtctccctttcctttccacccacacccagtcaggaatcgcacctgcggcttctaccgtctccccttccaccaccactgccttagtccaaaacctgtgtcacttcccaagacaactgcaatagtctttcaaccagtgttccctttcaacaataacagtggtcacttagaatgtgagatccacaagggtggggactgtgatctgttttgttcattgatatattccaagtacatggaacagtatctgacacaaggcaggtattcaacaaacgtgttgaaagaacgaataaactaagtgctaggcatataaagccctttaatatatactctctcatttgatcaacacaaaacctatgaggctgggattgtcatccttattttatagatggcaacactgtcacttggtaagctgtcctagtcacagagctcataatagtgggaggtaggatttgaagccaggtcagccagtctcactctgaaacaccagctcatgatcacactactaactgtctaaaccactgagattcttaaaaattggttattatgattaaaggggtagctactatttaatgaattcttactaggtgccaaggctttgcataattacttcaccaattacaattctacaggagaggtattaccccattttacaattatgtaacctgaggctcagtgagtttaagcaacttgtcaaagaacagtaagctataaagcaggaattcagactccaaaattctagactacccctggtttcttacaagtactatactagaattatttctctaaaactcaccattttggctgggcacagtggctcatgcctgtaattccagcagttcaggaggctgaggcaggaggatcacttgaggtcaggagttcaagaccagcctggccaacatggcaaaacctcttccctaccaaaagtacaaaaattagctgggcatggtggtgcgcacctgtaatcccagctactcaggaggctgaggcataagaatcgcttgaacccaggaggcagaggttgcagtgagctgagatcacgccactgcactccagcctaggcgacagagtgaggctctgtctcgaaataaataaataaataaataataaaaaataaaacttaccattttattccactaaaaaatcttcaatggtgcctaatccacaaaaaataaggcccaaccccctgagtaaggcatttaacactgttcacacttcggtaattagctctcatttacccatttcaggtagagtttgccctggccacacggggtctgccctttgaatgttttctgggcctctatattcttcctcgagtgctcccaacagttagaaagcctttgccacttgttccagcccatcctagaagaaccagttaaagttacatctctcccaagctttctcagattccaccactgagaatgatgaattctgctttccccttgattacatgagccctgtgtacctctaatgatggcttctgtaacagtttgtctgtagcagttatgtagatatgtttgtcttcctttattagactacgattcctcagaacacaggaaccttctctgaaacccttataagattagcacagttctttgtgcaaaatcaaccactgcagcctgccgaatgaactgagagaatggcctggggctcatctgttgcaggtaggataatacatcaactctgtatatgagggtatttttcttttgtactcattgatcattactttaaaaattagcaaacaatacttaagcaatataaacatttaaatttcttctacgtagaaatcagatactaaactctattttttaaaaaacctcactgaagcgggaagatcccttgagctgaggaattcaaggctgcagtgagctctgattgaccctgactctaaaagcaaaacaaaaacaaaaatgcctcaaacacctcatacagtttgaaaatatcagttaaagtcgaatattgtaaaaatgtatgtgtctttaatattggtgccttggtcattcattatattaataatatcttgggttgggcatggtggctcacgcctgtaatcccagcactttgggaagctgaggtgggtggactgattgagtccaggagttcaagagcagccttggcaatatggtaaaaccccatctctacaaaaaaaaaaaaaaaaaaaaagacaagaaaaaaaattagctgggcttggtggtgcacacctgtagttccagctgcttgggagcctgaggtaggaggaacacctgagcctggggaagtcgaggatggagtaagctgtgattgtgccactgcacaccagcctgagtgatggagtaagactctgtctcaaaaacaacaacaacaacaacaacaacaacaacaaaacccatctttgatagccatcatggtatgtaccatgatattcatttggatattaagactgatgatcagtaccacagatttcatattcttctgttcccattccttggcttccacaagagtgactggttctgctggagcagcataacatctggagtcatacactcaccacccaagcccggacacaacttgttgatattcatctgcaaagggattgttgagatgtccactgattacaatggtagcttctggacatagatgcatcttctagtacccagtaccagcatctaaccctggctcatttgttactgcctgtttgctagcttattcttgagtacttaaacagtttgtttaccatttgggaggataaagatacctgctgatctcttaggctgtcatacctacctcactagcatgtttgtttatcctatctgcaaattcagcttatgattttccttcatcaaaatgtcttgcttttcctgtatgaccttgactccaatgtcatgctgacagacatgagtcatgtttccagtttcaaaatatcacttgattataaaaatgtccagtagcttcataccacacacctgaatagtttagaaaggaagacacggcagttcaaggaaggctcattgactttcttcattgaatctggttaagtttgaagaggattaagtcattttttaagcccagttgaaagctggttcagtgcttatgctagtcacctcttctatccacttgtgaaaatcttcttttgcctgacaatcatatttaatcttgttcttgaccctgataaatcagtggagggacccttcatgtagagtatcattgtggttctagtagtgggggaggctgcacacgcatgcgagggtctctgatgctactggctaaagtggaaactggtgggagatgctggcatcttacttgcatagcgccccctggagatgactgggtggtatatgagtgtgggcctcagtcatatggtctagctgagtttgcagagcttcaaggtcccttctggaatcccactggttttccatcactatggttctcaagaaaatgcccccagccctctacactccttagagctttaggaattgtcagcctatgaccctgatcaatggagagttacctcctgatctcctctccaggtatttagtcataaaaaaaacacattatatatttataacttcaaaaatttgaaacctattatcttctcatatgtatctgagtgaaatattctttatctgaattagtgtatactggggaaaggctagctggctggctggcttctaagaatactcaagcaccttttctgaagtcatcagtaagatccaccatgcatcataatctggttccccatttttgtacaaaaattcaatgttgtgagtacccctgtgtggttattttaaaagactgactcacggactaaagttatagtagacctaggttctagggatatctccctactctcctatgttctactcattattcaatttcatttagatttgcacatcaccttgcttgcattctaaaccagcctgatgacatgcttaatacctgttatttgtcacaagcactgatctccagtactataatcgcagaacagaatttggaaaaatccgagaatttttactgtctcttgtttagaaaggttatagttaattgctttagaatccaaagctactgacatccttgaagtgcttttctgatgaactatgtgaccatggttttcaatccactaaaaaattaagagcaaataaaattctacatgaaaatgcattaggaaccagaatttgttccggagtgctttagtgaatcttaatttttattaatgaccgaaagccttcagaatattaaaatacacaaaaaatgaactaactcatttactagccaaagaggcagaaaccaaatgtttgaatttccttgactggtcaaaggtataatacacatattttaccctaaattagactcaaaagttgttcccttccacttggtttaaaaggtttaagtatatgataatgtagtatttaattctctagtgttacttcccttttattttgaggtgaaattaagagaaaatattttctaggcaaaaaatttcctgaataaggtgtattttctttcccctccaattctgaaacaaatctgtggctaacaagaatatctaccaatagaaacactttcctcttgacagcttaaagaagcttccaatgctgggatacggagctgggaatgtaagctggcaccggatcctctaccttacccacatacatctcattgttggttatatctcatgtctgtctcccactcaattctggggcttcagggtcaacaattcagggttttagtcaaatcaaggggtcacaggccaagaaactggatttcattttggatgcagtgggatggggaagaggtctgtgagcagggaataaaatgaatagaagtccagttgggaagatgaatcctctggcactgtggagaatgatccagaagagcagaggagacaactgtggcaatagtcaaagagcactgctgcccttaggcaagtcctaaagcaactacagttctgaggaggcaaaggcagtgaaaaggggctatctcagccttgtgcctctttctgaaacagaaagccacattgacgcaagtcaaacaactgaacaaaaggaaataactaaacaaaaggtaataatcctttatgcaccatctacctttctacccttctaccattgctcacacacacactggcacccacacactgtcacattcacaaatggatttttctatagttgttttatgtttaaaattttttaagtttgggtatatttctcagagtacatctagaaaaaatgcaagatgatgtattaagagatttatataaactacaggtgagtcatacataattcctcggaaactaagaataagaaacttgtcctctgaacatgaaatcagtttctcacatgttcttctgcttcttgatagactctttttcaatattactaactgccttttcttccatagccatctctttaaaaaactgagatataactcatttaccacaaaacacaccttttaagagtatacattttaatggtttttactgtattcttaaagttgtacaaccatcaccacaatctgattctgattttttttttcactacccaaaaaggaaatcaatagccatcattccccatttccctcgactgaaactctaatccacattctgtttctacggatttgtctattctgaacatttcatataaatgtaataatacaatatgtgtgcttttgtgtccagattttttttatttacatagtattttcaaggtttatctgtgtcatagtatgtatcaggaactcattactttttacagctgagtaatctttcattttatggatataccacattttgtttacctatccatcagtgactgggaatttgggttgcttatactttttggctatttatgaatcatgctgctttgaacatctgtgcacaagttttaatgcaaacctacattttcaattatcttggtatatcccctaggagaggaaatgctggattttataattctaagtttaattttttgagaaaccatcaaactgttttctaaagtggttgggctgttttaaattcccattgtaaaatacgaagattccaatgtgtattcatgtcttttccaacacttcctattgtttgtcttttttaatacagccatcctagggggtgtgaactagtgtttcactgtggttttggttagcatttccataatgactaatggtgttgagcatcagtggtgttgatctgcttactggtcatttgtatacattctttggagaaatgtctattcaactccattgcccatttgtcagttgtattatgtctttttgttgttgacttgcaaaattctttatatagtctattaggtttttatcagctggatgattttctcccattctgtgggttgtcttcattttctttctttctgtcttcttcatcttcttttttttgtcactctgtcacccaggctgtagtgcgctggtgcactcactgcaacctctgcctcctgggcttaagctatcctccaacttcagcttcctgagtggctgggactacaggcacatgccactacatctggataatatttctaatttttgtagagacggggtttcaccatgtttcctaggctggtctgaactcctggacttaagcaatcctcctgccttagcctcccaaactgttgggattacaggcatgagccactgcacccagccatcttcattttcttgatgttgctgtattctttgaagtacaaaagtttttaattttgatgaagtccaatttacctcttttctcttttatcacttctgcttttgttgtgatatttaagaaattattgtcttatccaaggtcataaacattttctggtatgttttacacttttataagttttataattttagttcttacatttaggtctcacaagttgctattgacaaattatctcggtttgtgtttatctgagaatattcttcattttaaaaggacattactggaagtagaattcttggttaacagtgtttttctttaagggcttttagtatttcattccactgctttctgaccttcatggtttccaaagagaaattagctgttaatctttatttctttagacataatattttagttctttgaacatatttcaagtaacttatttaaagtctttgtctattaaatccaacatctgtgcttcctcaggaacagtttctattatttttccccctgcccacgggaaataaagtgtgcccatgccacactttgtttctttgcatgtctcataattattttgcagaaaactggacattttcaatattttagtatggcaactctggaaatcagattctcttccttcccccagggtttgttgttgttgatggggacttttgttgtaatagtggtggtgatactgtttatttagtgacttttctgaacaaatgctgtaaagtctgtgttctttgtcatgtgtggcagctgaagtttctgcttggctagttagtggtcagctaatgattgggtagaggtttctttaaatgcctgcaaacaataagtcttccagttttctcattgcttttatggaaaagagactttgtggaggcttttactctgtcattttccctgacatcctctcagtacacttgttcactgttgtttgctacagggttacattctttccccttttctcttattccacaaaatttctctgggcaatatcatacacatctaggtcttaaaattctaccccaaatttattgacttgcaaaactacatcctcagcataaacattttccctggaagatgtatttgtaaatgatcaatagtcatttctatgtgtatgttttacagatgtctctagctcaacaggtcttaaaccactcacccactcagtcacacaaactagaaaactgggaggcacgctagactactcctttatcttcaattcttcactaaaacacctcctatcaaatcttacaacattccaccaagctcatcattatcttatcacattatacataccccatggaaagcatttatttacatggatgttcttactagactataggcatcttgtgagcaggaattgtatatatttatcatcttattctaggactcatcgtgatgcctaactcattatactcagccaaatgctttatctgtgtagcaggattgtattttccaaagatggccgcatcaatatattcctcttcccacacgctcttttccctatatagtgtcgatgctccatcaaggggtggagtcaaggagctctcatctcttgaatgtgggaagacctttacaagtgccttcaccaaatgaatgtgacagaaatgacaccacttgaaatctaaggctaagtctaaaaggtgatatgaattccacctggctttctgtcccaggacatgagccatggagtactgagctaacatgtgagatatccaggtaccctgaagctgtcatgtagacagactacatagagatagagatgccagaggagctccagctatatgtatcttctctctccaagtaccaggagcgtaagtgaagaagacttcaatatgacctcagttccagttactgtctgactgaaaccacatgagacactcaaggccagaaccattcagttaacgagcctccaaattccagaaacagtaagagataatattgctgtttgaagccactacacattttgtggtgattttgttatacaacattagataactaaaacaataaatgaagaaatgaagattagagtggagatatatcaatatcccctttcatttctctaccatgcatcattttaaagtggaaaatagttttaaatatgtgcttaaaacaaaagtatctcaaatttatatcaaaaagtttcaagatgtaattaatgtggatataaaatgaacatacatctagcaaggaagtcctttctccaaataccttaggtgttacattattttctcaaaatataaatgactgcactatgtaatcaagtatcacatgccatcttaaaaggtaaaacccctgttctttactccctcccaatagataatttcatgaagataatttctggatcatccacgttagaagtttctagtactataatatctaagtgcatcatgttcatgcattgactgctcttaggcaaacttttgctaaattaaatgtcttactgtgtttttgtagtttcctagtcaaaagagcatttttatgaatcatgagcatttctgttgattcttattttttacacagcaaaatttaataaacttaaaaatagtttataatgatggactattcaatatatcctagatgtagacaaatccactgtgtgtgtgtagcacaagtttaacctcaagctaatagctgttaatatcttaggattacatttctttagaacagatccttatttaacatagataaaagaaacaacattaaatgaaacctcatccagaagaattttctaactttcaataacctctcagcatgttttaaaaaacgagttgggattaattacttttaatttttaaaaatgtgtttcgtctggtttccctaagccaaaagacatgttaatttaaataaacacaagagaagctttgtattttgattcacaaatataaaagaaaatttttctgaattattaaaattagatgagccgctcataacactgttttgtattctatgtctataaagctcttttcaaaagaacaaatttcagtcatttatccatttcaaatgtagatgaatacatctaattactcactcaacacgtatgtttgaagccccatatcgacacaaaatttctcctagaagagatattaggagaaatttccttaattgacatttcattttgcttaatacattaatcataatttccattaagtgtgtttctgatgacatcatttaaaaagtatcttctctgagttttaatttctaattccagtctgctgcattctgggcagaataagaaactgaatgaaaaaattactactgctttgtgaattatttaaaatgcattatatagagggtaaatataaaatttattttcaaaactagacaaattttgagaataaaagtaatgttaagaattatactgaaaaataagcattgaaactggaacctgtggtcattctaaatatgaatcatatcctcagtatgatattaacaatattaaatatcaccatgttaggtgagggccacagtccatctagcaaaggacaaactctgtacaattaattttttttttttttgagacggggtctcactgtgtcacccaggctggaatgcagtggtgtctcaacctccacctcctgggttcaagcaatcctcccacctcagcctccagagtagattgcagtacaggtgcacactaccacatgtggctaatttttgtatttttagtagagatgggattttgccatgttgaccaggctggtctcagactcctgagctcaagtgacctggccactttggctcccaaagtgctgaaattacaggcaggagccaccatacctggcctacaagtaatctttatagtggcaggaagagtcataagtgtcctcattaacatcatcattttcatgtgttttatgatattttactatttctatgactaccgtaatacctcacttgcccagagatcagagttccagtggcaatggtgtgtattatttaggagctgcccttagtcccttgctcatgctacttgttgtataaactcagtcaacaaattaaaagcagctgccaaaagcataaagtaacaactgaaagaaaagggaggagacggaagaactataaaaaggagagaaaactgggataacaatgtggggtagattttattgtagggaatcttttatgtggtatcaaaacattctcaatgatgactctgagttgatgtctttagcatttttcgtttaaaagagtagaggagtaagtagagcgtgctagaaaaatatccttcaaaatggtaagctttggcacatatattgagattacattttagttttttggaaactgacttgcggaacattttattcctggacaatatctgataaatgaggtattcctgtacttccttttatttggcttgaaacaatctctttaaaactcttttaagcagtgctttgttgaaaaaataatctgaattaatccatccatggttttagcaaattttgccatagaatctctcaatgttctgcctaaaatcaaaactttaaaaaaatcttcatatggaaacaccttcattctctttatcactttagttttcctgtttcaaatgtttaccagttctgtattattttcagaattttaagctgcattatggatccattcaaataatatttgacacaaaagcagaaaaaaatattttattattttgtcctattctgtttccagagggttataagtatctgtgtcaatactactgtttggtgaaatcaagacccaagaattattcttgacagaatctttccagtctcaattagggtgctatagttggaaaacattagagattcatccatctatctattcaacacacttgtactggtgcctaaaacatgccaggcatgtgcccaggggaaacaagcatgcataaacaagtaaaacaataacaaaaacagtaataataaatcataaggattgagaagtagtgtagagaaaaaaggtagtgtacaataatagaaagtgatgggggatattctaacatttgggtggagagtaggtagtcattggaaaatacaagatccactatggtttgaacgtgtcccacgatattcatgtgttggaaagttaatcctcaatgcaactgtgttaagaagtgggaaccgtaagaggtgattagatcatgagggctctaatatcattaatatggtttggctctgtgtccccacccaaatctcatcacaaattgtaatccccacatactgggggagggccctggtgggaggtgactgaatcatgggggtggaattccccttgctgttcttgtgatagtgagtgagttttcatgagatctgatggtttaaaaatgtgtggcacttcccccttctctctctcctgttccaccatggatgggaagatgtgtcttgcttccccttcaccttctgccatgattgtaagtttcctggggcctcccagtcatgcttcctgttaagcctgcaaaactgtgagtcaattaaacctcttttcttcataaattacccagtctcagttctttgtagcagtgtgaaaatggactaatacagaaaattgatactaggatttgggcactgctataaagatacctgaagatgtggaagtgactttggaactggataacgaacagaggttggaacagtttggagggctcaaaagaagacagaaagatgtgggaacgtttggaacctcatagagatttgttaaatggtttgaccaaaatggtgacagtgatgtgaacaatgaggtccaggctgaagtggtctcagatggagataaagaacttattgggaagtggagtaaaagtcattcttgctatgctttagcaaagagacaggctgcattttgcccctgccctcgagatctctaaaactttaactcaagggaaatgatttagggtatcaggtggaagaaatttctaagcagcaaagcattcaggatgtgattggctgcttctaaaagtgtatgctcatatgcatgaacaaagagatgttctgaaattgtaacttatatttaaatgggaagcaaagcatacaagtttggaaaatttgcagcctgaccatgtggtagaaaagaaaaacccatttttgggggagagatttaagtaggttatagaaatttgcacagaggagccaaatgttaatagccaagacaatggggaaatgtctccagggcatgttaaagacctttgtggcagcccctcccaccataggcctggaggactaggagggaaaaatggttttatgggcccctctgctctgtgcagcctggggacatggcaccctgtatcccagcctctctggctccagttgtagctaaaaggggccaacatacagctcaggccattgcttcagagggtacaagtcccaagccttggtggcttccacatggtgttgggcctgtgtgtgcacagaaggcaaaagtttgggagcctccacctagatttctgaggatgtatggaaatgcctgaatgtccaggcagaagtctgttgcaggggcaaagccctcatggagaacctctagtaaagcagtgcagaggggaaatgtggggttggagcccccatacagagtccccactggggcactgcctagtggagctgtgaaaagagggccaccatcctccagaccccggaatgctagttccactgacaactttcaccttgcatctgaaaaagctgcagccactcaatgccagtccatgaaagcagctgctgaggcagtaccctgcagagccacagtggcagagctgcccaaggctgtgagagcccaccccttgcatcagcatgccatatatatgagacatggattcaaaggagattattttggagctttaagatttaatgactgccctgttgggttttggacttgcgtgggtcctctagcccttttctttttgccaatttctcccttttggaatggcagcatttacccaatgcttgtactcccattgtatcttggaagtaactaacttgtttctgattttacaggctcataggtggaagggacttgtcttagctcagatgagactttggaattgcacttttgaggtaatgctggaatgagttaagactttgggggactgttgggagggcatgattggttttgaaatgtgagaaggacatgagatttgggaggggtcagggatagaatgatatggtttggctctgtgtccccaaccaaatttcatcttgaattgtaatcctcacgtgtcaggggaggggcctggtaggaggtgattgaatcatgggggtggacttcccccttgctgttcttgtgatagtgagttctcatgagatctaatggtttaaaaatgtatagcacttcccccttctctctctctctcatgttccatcatgggaagatgtgccttgtttctgcttagtcttccaccatgattgtaagtttcctgaggccacccagtcatgcttcctgttaagcctgcagaactgtggcctcccagtcacgcttcctgttaagcctgcagaactgtgagtcaattaaacttcttttcttcataaattacccagtctcaggtagttctttatagcagtataaaaatgaaccaatacaatcatgaatagattaatgtcatcattgcagaagtgggtgtgatacaaaattgagtttggccctcctctttttctctctcaccatgtgccttctgccatgttatgacacagcaagaatgcccttaccagatgtagcaccttgatcttggacttcccatcctccagaaccatgagcccaaggaatttctattctttataaattactcagtggtgttctgttatagtagcacataatggactaagataagatctgaggggggaaatccagacaaagagaaaaaataacttcaaaggccttaggtaggaacaagcttgaaatacttacaaaaggcaggaaaaccacatgctggatccatgtaactgagggggagaggagtaggggataagctgaagagatgggcaggggccagatttccattttgtttcaatactgatgagaagccattggagggtttttagcatggaattatataatctcatttattttccaacagatttgattgttgtacaaatgaactgttggaggaagtaggtatgaaaataggaagaccaggtgggagttactgcaacagtccagtgaagagtcaatttagatttattttagacttgggtggtaatgacagacgtgatgggaagtggtttgatgtaagatatatttgaagcagcaggaatttttggtaggaagaatgtaggcgtgaaagaaagaaatgtgtcaagtatgactcagtactagttatgatatgaagaatattggggaagaattaagagctctgtttcagaaatattaagtgccagacatctattagaatttcaaggaaggtgtttaggaaaaggttgaataccagcctggaacttcagaaagagactaggactagagatacaaactggaagtcatcagcatatagatggcatttaaagcaatgagactgcacaagatgagttagggactgagtaaaggaagtgggggggggaagataaggtggtgttactaaaggagatggagtaggagcagctagccaattaggagaaattcctggagaccacgatgttcttcctaactgataatgtgattaaaacctatcagagaaggagtgatcaatggtgtcaaaacttctgagaagtcaactgtgatgaagactaaagacagagcactgcatttagtgcagagatcacttgttgattggacaaatgtttcaacatattgaagtggcgaagagcctcattgccatgaataaaagaagagaatataaggcagtagaataattaagtattaatagaaagaccttttgaagactctggttacaaagataaacaaagacgtggcacagtgattgaagtgagatttggattgcaacagagcatttactggtagttgaatatatacccccctccctattgcatctccccttccccacacacatttcctagccccctgcaggtaggtggagccttttgtctagttctggctaatgggctgtgattggaatatgggtcatttctgggccaaagtacaaagaattgggtgtgagctcttcatatcctgtctcctctagccatcggtgaccagtagtgttcaagataatggaatctttctatcaaccaacattgaacttacaatctgaaaaagtattaatcacattaaattattgataactaaccagtttagatctataaaaacagcactttcttatggtttcacttaacaaatctttgctgagtgaagccactgagatgtgggggtcaatttgctaccacagtataacttagaataatttggcatacgtgatcaaagaattctttaacatattatttcatatttttatatttttgaaataatgtatcagagagaaaaatattgatataagagaaatggtggataattataggagaaaaacccttgaataaggatgaggagtgtagtgtactagtgaagaccttagacagaggtacacatttccataaggaagaaatccatctaccctaaaggagggaaggtggaacatggatatagatgcaattgcagagtagatttgggatgggcagataaagtggttctcttctgtttgcctccacttttccagtgaaatcgaggtcatcatctcagaacagaaatgaaaaggcagtgttggaggtttgagaagaatagacggagatgaaattttctactgggaaaatgaattaacattgcagtgctgagggctctttggccttacgttcaagggaagatagttaacataagtgtcttctcttgaaccatggtcaagtgtttagatactgtagtagagtacatgagtgtttggtgtagccagggttggggattgccaatgaggaaggtagaggtaaataggggcaaggaagctgagagtagttcaaggaagtggttactctgatggaccatgaaatctaagctgagaagtgaaaacatgaagaagttaatggaaagtggaaaatgatgttaatcgattgtaagtcccacagggcaaaaaactgctagtgtgaggacgctaacctaactgagttagaaatgtgggggttggggagggcagagagaatggaatgccagaaaccaaaattttcaaggtggtacagttactggaattgttaaagactctagtcatacccctgaacaggtggctgaggtggagaactgatgagctcaagaaaccgagaggccaatgagttgtaataatctcattcatgggctaatccatccaacatcatattggctatgagcaattatgatttagggtaggacatgctttgttcttcctgtgctagttttatcacatacaagttatagccatgaaagtgaagcgctgtgaatgagatagtgtgaagcaatatctaaatttttacaagtgaagtgttatttaaatgaaaatttcttgaaaaattgcttttcttaattttataaatctcctatttagaaccgaaaactaaagagcctggcttttctgtaataacagaatgcctcatttttggtctacaactctaaattgaagtggtattttactactaaatacctgtaaattattctctttttctttccataattaatacataattttctgtcattgctgctttccaatcctaatcatatgtattaaaatacatttttttttcttttttttgagatggagtctcactccattgcccaggctggagtgcagtggcttgatctcggcttactgcaagctccacctcccgggttcatgccattctcctgcctcagcctcctgagtagctaggactacaggcgcccgccaccacgcctggataattttttgtatttttagtggagacagggtttcaccatgttagccaggatggtcttgatcttctgacctcatgatccacccgcctcggcctcccaaagtgctgggattacaggcgtaagccaccgcacccggcctaaagaattttttattgctgaaaagtatcttactttcccttgatttttcattttctctgggatatttctccaggatatttacatggggaagaaaatggccttttcctccttgtagatgattcagttaagaaaggaatagaattggcttaaacctcattgctccaaaacgaccctaagagctccaagaaaatttttccacattcatcaaaatctgcagtctgaagcagctgacaagggcacctgaagcaatccaacaagtcagcccgtttataattgaaggcttttattgaactatttttggatcctgttatatattatctccacaagaaaacaaccagattaaaatgaaatactacaatggaacaacaaaacttcagttttatttacataaaaggcaaccttctaaaaaagcatccctaatctctcaaagacaatgataaggcaatctggcagcttgaaaagtcaaagtgactttcaagcattgttgtttaaactgacaaaaatttctacagatgccaatgcaaaattaaaaaaaagaagtaacacgtttaaaatatatacactttagagtttatatagaataaaagctttttttgaacttttctaggattgaaaacaaaagcaaacattgctcttccaaagccattatcgagcagaaaaatattcatacagaagtaaaaatctacagtgcaaattaaagcagagagaaacaatctagaataaaacattatttcaaataagataatgtatgcatgagtgagcatttcctctgaatccaggtgactagcagggcatgatgggaagattacacttcttgtcatcctatacagaaacaccaagaaaaggtctggtgtctctccaggggcaaggaccaataattcttcgagaaaaggcatactgagaggattctttaagtcaaatggatctaagatcaagtccaaagtgatcaataagagctgaaagatcagtcaagtaccaaatactcaaggaaactcatcaacgtagaaacaagaaacagggaaggggacttgtgaacaaaaggtgtgggcaatgaggaattaggaacccaatcagagcctcgttgggaaatgaggaatgtggcaacaagcatgaattggttcataaaaccaatgatcttgtgaaacaggagctgcttctatcttttgctcatagtgacctatctgagccaacagatggttggatttgcttggaaatagcatgagaagccaacattcctgacataggtgttggagaaagacacactagaatcttggttctgcaacttgtagctgtgtaactctgagccagttgtgtaattcctctgagcctcagtatcgcctacaattctaaagcattcagtgagttgggagaattaaagtagataaggtgcgtgaaagtgctttacacatggaaagcacacaatcagtatcttcttccattaggccaatacacctgtatattgcttattgtttaatttacaccaattattttcaggaatttatttgagcacaaggaagtgtggaattaagaatctgtgttgtatctgactttaaaaaatacagagaagatcgttcattttttttatgacattgacaatgtcaacgtttaacacaaacaattctattttaaaatcttgtatttcctgatcaatctgttgggagtgaaaattagaagagagggtagtaaacaaagtaagaatttgcaaacatagttgaactcagataataaatacctatatcctctacaggtgcccttttctcataatagaaaagagatgagaagacatgaaaagtgaaagcttaaaaagacagtacccatgtaaggcaagagtagaatctgttcagagaggttacttgtctagggctgcttagctagttattgacaggggctttgctagaactcacatctcttgtggaatgtgtgtctaacatattctcaccaaagaagaagcgtatgcattatttcctcagtgaagccctttcttggtcccaaaaccaagctgtctgctctgtatgctctcatagctttctctatttcccttttcaacacagtcatcaggcatattgttaccatgtggataatggagtgagtggttaaaagcataggttctggtgtcaaactgtttgaatcttgtctctccaaattattcaaacgatttaagcatccaaaaagaataaaagcacttaatttacagagatgtagtgaggagacaataaacctttacaacaatgcttgacacagtgcaataaatgttggccatttgtattattagtaaggataattaaggcaaggagtgtttaatactggatgtccaacacagagtggtgctctccccaaagatagcacaggatgtgtcccctgtcaaaccctcagaggaattgcaaacctataaaattaataaactttgaaagtagttgtgtgattatgtttgctaaataaaggcagttccaattggcacaaatttcagttttcatggtttagtttaaacaaactcagtgccctaccaacatagttaaaatttcagttaccacagtctatcttctgtggtgaagagcctattaaaccattttctgatttttaaaagtatgttttcttcttattgagttctttatatatgctgtataaaaatactttttcaggtatatattttgcaaatattttctccaagactagtttgtctttttattttcttaagagtgtcttctgaagagtaaaagttttatttctgatgatttctaatttatcaattttttcttccatagttcataatttctgagtccaattgaagaaatgtttgtctaaatcaacatcactaaggtgccctatgtttcttccaagggttttatacttgcagcatttatgttgaggtctacaattaatttcaaggtaacttttgtgtaactgtgaggtaaaagttgaggtcttctttatctccatgtgaatacccaattgttcagaactatttgtggaaagactatccttcccccattcattatcttagcacatttttgtcaaaaattgattgattataaatgtgtaggtatatttcaagactctttattttgttccactggttgatatgttaatctttacaccaataccacattctcttgattactatagctttatggttagtcatgaaatcaggaggtgtaatttccccaactccattcttttccaaaattgatttgacaatgctgtaatgaaatttagagccagcttgtcaaattcaacaagaaaactgcttaggtttggatgaggactgcacttgatctaaggatcaatctgggagaaatgacattcttacaaggttgagtcttcctgcccatgaacttggtatttccttccatttaattacatctttactttatgccacaaaagtttagttgtcagcacacagatcttggatatatcctgttaaacaagtatttcatatttgtgatgatgttgtaaatggctgattttaaaaaattcaatttccaacattcattgcaaatacataaaaatataactgattttgcatatggacttggtacaccatgaccttgctaactttagttattggttcttgtagttttgtatttttgcagattccttttatctcatgtagatgacatgtctgcaaatagacagttttacttcttcctttctgatttgtatgccttttatttctttttcttgccttgttgcacttcctacgacctccagtataaagtgaatagaagtggtaacagtagatgtcttttccttgttaccaatcttgggaaaaaataatatggtctgtcatcattaagtatgattttagttgttggtttttctttttctggtgtcttttctttttaaaaaagtttttaaaaaacatttttgctgaaatataaatcacataccataaaaatcacccattaaaatgtccaattcagtagttttggtatactcacaaagttgtacaaccatcactacagtctaagttgttttttaaaaaaattttaattttttattcccataggttattggggaacaggtggtgtttggttacatgaataagttctttagtggtgatctgtgagattctggtgcacccatcacctgagcagtatacactgcacccaatttgtagtcttttatcccccacccccttcccacctttttctcctgagtccccaaagtcttttgtatcattcttatgccatctgttctttattggctctttgaataggtgttaaacttttaatgctttttctacatctactgatataatatgatttttcttttttagtcttaatatagtgaattacattgattttttaaaaattttgaaccaactctgcattcctgagataaaccctacctgaccttgatgtgctatcctttttatatattgatggatttgattggctaatattttgttaagtgattttttgtgtgtgtctgtagtctgtagttctttttctcttgcaatattaatatctagttttgttatcaggataatgataagttcataaggtgacttggaaaatgtttctcttttattttctgaaacagtttgtgttgaaatggcattatttctttcttaaatgtttggtagaattcactggtgaagtcacctggtataaaatgcacttgtttattcattattcctaaactaattccataaaaacattgtggaggcagttgcttataattctttcttccagcaaatgctagcagttacttgcatacagagattgccaaataagtatctgtgaaagcaaaaactaaaatgttacatacctttgtttttttctgcctcacttaaaaatattttgtgtgtgaacaaacaatatgagtgatgatttatataggtatatattatacaaaattaattttaaatgaagtataatattaagggctatttttaaaacccaggtataaggagattgctacttattatttaacaaacatagatattcagcatattgactaatgttcttcatttaatttggtggttaattaaaccatttaggttatgagaacaaaatcaaagtactgtctagttaaaaacgtttcaaaacaggtgctaaaatatgggactgaaacaaccaatagctatttaacggagaaagattacaaaatcatttcctaaataactttcttctttccttcttgcaagatcagatcaaagcaaaaatcagattcccttcatgttcatgcaagttcctgttcctgtgatttttaaaaatctgattcctccaaaaattgtctttcaaaaactgtcctatttatttctagcttcttgaacaataacaattaggtttataaaaattggacaaattttgttttggctctattcattagatctcacagggtacttcaaaaataaaccaattccaacatctggattttttatcaaagtgctgtctaattccttggccatatgaggcatattttaaaaagatggtacagagcagttaaaaatcatgctgaaacaccactctggaaacttttatagtattttattttcagcttataacctagtaaatgcagataacatggaaattctacagagcctgacaaacgtaatttgcttaccccaggtaagctttttacttaatttgagctactatgttggggttattttattcttagctatattttatgtgaaataaactaatttgcatttttttaaaaacctgtgttaaaatatattttcatccattaggtcctgatcaattatgacgccttttcttcttcgtattgtcaacacttaacacgctgcccagtttacactgtcattactcaataaatgctaaacttgaacatgaagtttaactgaactaaactggtcttgtagcaatttacaaagtaacccagaaggtcagatatcaatgtgacttacagtgaaggaagtaattacacatttttctttcacttgaagtggttctaaatatacaaatatatttactttgctttcctcaggtaggcagccctttacctaactaccatgaaaagagtttttaaaaactttttgttaaaataacaaagccctcgttgcagaacaccaaaagccacatattttaagatatcaaaatcttcaatatttttagctctttagaaatagaaaactagcaaaagatagcaccatcagcaaataatatctcagccccttccttactactcccccaccatccttcctcaggattcagttccagtgaatgatcatcagaagcaaaacctgaagcaaaaatctttcaaaaattacaacaaataaggtacattcttggcaagtctcaattttgtgataactttctcctcaagtttattattataaaactatcttgtaataaggttatttggggacccccttagatggtctgagactaaatgatttctacttcagaaaaaaatactctataacagggttttggttatttaacacagcagcattcaaatagcaggaattcaatttttgttcaagtaaatactatctgctcattaatttgtttaatcacaaaatgatttcacaaaacaatacagtttgtgacttcttaaagaacttctggtgttcagattgacttttaatacattatgtctcacactaatagtcactctatttttagaaaagttaaaatcaaaataatacctattacacctccattctaagggaaaaaaatatgtttcatgaggatgttgctgaagatgttaattaaccatattacacttgtcctcttggtgagaatctcttgtaattttttctctaaagatttcaatccactaatttttgaaataatgacttttaaaagtttattgcactgaatcttgttttaattgtgatgctttttataaattgacatttgctactgaaaaatgtggagtcaaatataggtccttcagcagaatttatccaacgcttagagtgtgttgtgttttcatgaacactaccactagcctcaccttattttttcttttattttctgttagctgtgattccttactttaaaagaatcttgcattttaaaagcaaccttgagcttccaatattttctctcctaatgatatgaaacaataaaaataaaaaccaaaaaccccacaccctcagcataacttaaagctagaaaaatgacaaagtaactgtgagtaaaagaacaggtaattatttcaggtaagattcaccaatggttcagacaaaattagtgaacaaaagtctaagaatatgtgcatagtctcaaactatgtctcccaagatattttacctcttagaaatgaaaaatgattaattttacagcacagaaacctggcagataccatctttaaaaagtgatcaatgtttgcatcaccaataacaagatattttgataccatgcatcctttgatataatgcatctgagaaaggcacaatatcacttctgcattattcttgccagaaatgcataacctcaatctaatcataaacaaagtgagaaaattctacaaaataaccagcagctagcacacttcaaaagcgtcaaagtcatgaaagatcaggaaagacaggggaggtgtcatagattgaaggagaataaagagatataacaactaaatgcactgtgagatcctgcattgggtcctagaacaacaagaaggactttaatggaaaagctagtgaaattaaaataagatttgtagttatttaatagattgtgccactgttaatttcctggttttggcaattgtactatagataaataagatgttaacattaggggaagctgggtgaaggacatatggcaattccctgtactatttttgtaacatttcagtaagtgtaaataaaagtttaaaaacaaaaatgttaaaaaggcatcttcaatctttttaaaataagtgggattttcataaacaattaccgtctgacattcttccgatttttcctaagctcatagcttcctcgtgttatcccctttgactgcctcagaaaattcttcatatctagtgccaattcaaatattgtctctcttccataaaagatcccgcttcctacagacctcagatctcccagcattgtaccctaaagtagaagtttaccatgcatgactagatagttttctagttctttttttacctgtatttctcattgtcactgcaataagaaaagctcccagaatgcagtgacaaagttacatgtcttttcatgattttccccagcactgacctaaatatacagtaaatgcttgttaaatacatgttgactcattcactcataaattatttaaggaaactagagatttgtaagttcacatcatccattttacagcctctctgtgaaatcagacatcaaatacaggactgaatgggccattcgctataatctaagtatggcaattctgataatttcttattctcaggaagtctctaaaatgtaaaatgtatgatacttccttcaacttcataaggtagttggggttgaataaacaccagaatccatagaaataacaggcctaaatttatagaaatataggcctaaattataaatctttaaaaggtcattgaaaactgttagaattccgcattcaatattaatatgaaatgtacaataacataagcaattgtcacaaataagattcaaagatactgatgtttgatgagatattttccatgacccggggttgcttccttagagtattcctaggatgtctactgatctgttaaagtcatgcaatgggaacaaatgtccattttctttgccaagaaaataccatagatgaatattaaaaacagttatgtaagccaaaactcacatctgcacacacttaaaatgtagcccttttttaaaataataatttgtaatacattctgaaaaaaaaaaacaaaaaatgttgtacaatgctctacacctggctgggtaaccagtgtttttagccataagtgcagtgatacaggctatgtaattactgaaattgattagtgtactctaaattgtggaaatatgtatgtgtttgtatattagtaactgtttttggcatctatttcaggcttgtttatattatactatgtgtatatatatacatatatgtagaacacaaagttcaaaatatactctactgatgtaaccaaccaattaaaggaaataaaatctgtttaaggggaatataatgcatggaacttaacgggattttctacacaatctggggcttccaatacttaaaaaattatcaaattattaaacttatatatataattatatatatatatataattatatatatatatatatatatatatatttttttttttttttttttttttttttctgagacggagtcttgctctgtcgcccaggctggagcacagtggtgcgatctcggcttaccacaacctctgcttcccaggttcaagcaattctcctccctcagcctcctgagtagctgggattacaggcatgtgccaccacacccggctaatttttgcatttttagtagagatgaggtttcgccatgttggccaggctgttctcgaactcctgacttcaggtgatccacccacttcagcctcccaaagtgctgggattacaggcatgagccaccgtgcctggcctaatattgtttctttaaaaaaacgtttaaaatgtcactaattcactaagaaggtatcacaaacaatgctctaaaaagcttttttaaaaccaatttaaaaaatatgtgtggggaaaaatatattttggtctgatattgaaaaagaaatgatttgcaaaatttttaaaatatttaagtagtcaaaattcccaattcaatggaatatttagcatacatgcatatataatattattttaaaatatttctatatcattttatttttaaaagaatgattactacagggagtaatgtagtatactacatcctactacagtaggatgaagaataatttgtatcttaaaaataggtatttaaaaacatagatcacttttcctatccatgttggtttatattgttgttataaaaaaaaaatcagatgtatggcgtaggacacaacaaagtacagtcttccttaggtacccacaggggattggttccaggactccggtgataccaaaatccaaagatactcagcacctttaaacaaaatggcagagtatttgcatataactatcaacattctctcgtatactgtaaaacatctctagagtatttgaaatacctaacacaatgtaaatgctatgtaagtggttgttatactgtattgtttttacatttgtattactttttattgttatattgttatttttatatttttaaaaacatttttgatccacggttggttgaacccatgagtacagaacctacagacacagaagacagattataaactgaaaaattacaaatgctcatgtattttccctggtacatttgattcttcataggttagatttgttttgaggagtcattttccaaaattcaccagtttattaataacatataccactgtgaaaaataaaatatgttgacatatgtggcataattaaaattaatccttcatagggaaaactattaagaaacaggtattcagctaattatatatgtagaaaaattccaaggaatctaccaaaaatagtgactagaattaataaatgagtttagaaaggtcacactgtataatatcaacattaaaacatctattatatttatatattagcaaagaacaattgggaattgaagataaaatcatgattcaatatcatctaacaaaatatgtgcaacctctagatgctgaaaactataaatgctgatgaaagaaattaaagaaaacctaaataaatggtaagatcttccatggtcatggatcagaaaactcaatttcattaagatttcaaccttaatgtagattaaacacaaatttaaaaatatctcggtaggattttgtgtagaattcattatgctgattctaagaaaaacaaagaaaccatcataggcaaaatgatcttgaaaaagatcagtgttggacaacttatactacctatctctaagactgactataaaagctacagtaatcaagatagtgtggcattgtaaaaggatagacatatagattaatagaagaaaaacagaaagtccactagtaggccacatatatgtggtcaaatgattttcaacaaagctgcaaaggcaattcaatggagaaaggatagtcttttcaacaaacaatacagaaacaattgaatcttaatccatatattgcaccatccacaaaaatctactcaaaatggaccacagaccaaaaagtaaaacctgaaactgtaaaattctagaagaaaacaggagaaaagctttgtgaccttaagtcaggcaaagattttttatacacaacaccaaaaacatcatctataaaagagtaaactggtaagtcagaattcataaaaattaagaatctctgctctttgatttgggagaaagtgtttgcaaatcacatatcttataaacaacttgagtccagaatacataaataactctcaaaatttaataattagaaaatagcagtaaaaaatcagaaaaagatttcaatagatacttcaccaaaaaagatattcagatgacaaaatatacacaggaaaaggtgctcaacattattagtcattagggaaatgcatgaatggtgagaaatgtgtatttggatgactaaaataacattattaactccacaatatgaagggtgcaacctaactggaactctcatacactgctggtgggagtgcaaaattatgtagctactttgggagacagtttggcagtttctaataaaatttaaaaatatacttaacataaagctcaacaatctcatttctttctatttactcaagttaaattaaagtgcatattcacacaaaatctttatgtgaatgcttaccaacccagatatttcccagctggagaatggataagttttgtactcccatacaatggaatactactaagcaataaaaaggaacagattacagtgacacacaacaacatgagtgaatctctaatgcattatgcaaagggaaagaagccagactcaaaaagctaactactgaatatttacatgacattccagaaaaggagaacctatggtcacagaaaatacatgagtgattactaggagctgggacatgagaaaagaagtggagctgatgacaaaggtctggagaaatgtttgaggtgatggaactgttcttcatcttgatgtggtgatggtttgtcaaaacttgcagaactgcacataacctatataagttatagttgttttaaaaagaggaataaatgaagagttagaggaatacaagaaagagcttgactgcttctgagttggtgtggaaaggaggaaggcagggacatctttgaggaagaaagatgagttaccaagtcttccaggcagaggggaaaatgtgtgtgaagccacaaacggagattgtttacagcctatttatggaaaacagagttgtctgggagtgggtacagcacagactgttatctgtggtgggagagacagttaagaaaggtagaagacatcaattcacacccattacaatggttattataaacagtgttggcaatcatgtggagaaactggaacccttgtgcactgccgatgggaatgtaaaatgatgcagatgctatggaaaatatatggcagttccctgaaaaattaaaaacagaattatatcgaccaattcctacttctgagtatataccccaaagaactgaaagcagaaactagaacagatatttacacatccatgttcacaaaaacattattcataatgtgacaaaaggtggaagcaatccaactgtctgtccattggcagatgaatggatgaacaaaatgtggtatacacatgcaatggaatattattcattttgaacaaaacaggaaattctgacacatgctacaatgtggatgaacttgaagacattatggtaagtgaaataagtcagtcataaaagaactactactatataattccattcatatcaggtaccctagagcaatggtcctcagcctttttggtgcaggtttcatggaagacaacatttccacaggatgagggtagaaggatggttttgggatgaaacagttccacctcagatcatcaggaagtagctcacctgccactcacctcctgctgtgcagcctggttcctaacaggccacagacaggtacgggtctgcagcccaggggctggggacccctgccctagagcatcaaatacatacaggaagtaaatgatgcttgccaggggctagagggagagaaaatgggagttactgttcagtgggcacaggtttagttttacaaaataaaaaaaaattctcgagacggatcgtggtgatggttgcacaacaatttaaatgtacttaacaccactgaactgtacagtaaaaaaatagttatcataacttaaaattaattaattaaaataaatacataagaaagaaaaacaatgaaaggtacagaggggaaatgaaattatgcaaatctttggccagacaactaggaagctgtggcaacttcactttttcttgggctacagcactttgtaagcttttgagcaagggagaaaatgccattagctcacaatctacctcttccagaaagttctgccagattctgcctgttgcccccagatgtcagacacctccctgcatttcccagggcatgcagtccagcatatctagatgatggcccttatttctgttcaatgtgattgcagtttgttccatcatccctgccctatcaaaattcatctccttgagatgaattaccaatgcctaactcagctcagcaatgagatttattttttcagcaagatccctatgtcaggaggacagaggttgtcttgttcttaccttcttctctttgaggttagattttcctgtatccctcagaggcttcaaacttcctgcctgctctgtcttggggacattaccattctcttctctcatctctatcagtctcagggcttggttttccttggcagatggatggtctaaactcagagaagcccacatcttcgttgacccccattaagatctcagaagcagtgatgagagccctcagtgcaggctgtagggcaggcagaacttctaacaagaagccagtgagagcacagcctccctcccctgatagaaaggtgacttgggcccagagggttagagtgtctgagattccccaccacaatctcttaggtgggggtgaggtgagatagtgacatcacaaccacactgcctggctcagttcctgatgtcagctaatgtgatgccagggctaaagggccagcacaccttctttgtgattctggtctcccaggggcagaaaataggaagcaggctaaagatgccctaggacttagggacaaggcaacagtatgacgaaaggttgacttctgtgcatcactgttcagcttacaaagtgcataatagagaacatttcgaaatacagaaaaatacaattcaaaattcacatatcccatctcacagagaaatgaactagcatattttttccatgttttcctgtgtgtaactatgatgattaatactgagtgtcaacttgactggaatgaaggatgcaaagtattgtccctgggtgtgtctgtgagggtgttggcaaaggagattaacatttgagtcagtggactgggagaggcagaccaaccctcaatctgggtgggcaccatctaatcagctgcctgcatggacagaataaagcaggcagaagaaggtggaaagagcagacctgctgagtcttctggccttcatctttctgccatgctggatgcttcctgcccttgaacatcagactccaagttcttcagcttttagagtcttggacttaaaccactggcttgccaggggctctcaggtcttcagccacagactgaaggctgcactgttggcttccctacttttgaggttttaggacttggactggcttccctgctcctcagcttgccacaggcccattgtgggacttcaccttgtgagtcaatactccttaataaactccccttcatatatacatctatcctattagttctgtccctctagagaaccctgactaacacacgaagcttatctatggcttactttctggctctcatgacccctatcaaatccatcagaaaatcatatttactcttacttaaagtatattttaaaaatatatccagaatatgatcacctccccagctaccactctggtctaagccaccatcatttcctctcatctggattaccaaagttgccttctcattggtttcccacctttgttctcatgcagctagaatgatcttttaaagcctaagtcagatcatgtcccttcatggcataataccctcttactctctcattactcagagttaaagtcaaagtcattggaacagcctcaaaggccctacatgaccaggccttggaatgcctctaatgtcttttccaactcccccatgtccactatgttctcgtcacactggcttccttaagtcctctagcaatgccagccatgctcttgcattagggtctctgcactagctcttccttctatcagcaatttcttcctccgaatatcaacatgcctcactcgactccttcaaatttgtttgaatgttaccttcttgatgaagccagctttggccacactatataaatggtaccagccctggtactcgagagtctccctgaatcttctctatcatttccttttcaatagcactttgacacttaaaaaaattctatataagttacttatgcagcatgttcatggctaacaatgtatctctcctactagaatgagctctgaggggacaggaatatatgccattttgctcactgctatatcctaagtgcctagggccattgtacaaaaattaagcacaaaatgctgaaagcaatgggtgtgtgccattagtctgttaactgttccccagtacctgttcttcatttcttttcaaaatagtctccctgcaacttttagcacagtgcatgcaaataggtccctgcttccccaggtgtgcccctgggactgttttctccagtaaaatgtcagaatgatatgcacaacttccatggcaattccctaaaaggaaatatttgtcttcctcatctttttcctctcttcctgctggttaagaaatggtgtccatcagaagagcagcctttaaagcagagatggagacagtatgttgaggatgactgaggaatctcactagtcagcctaggttcctaagtgacctcatgaaagagaaccatttgatcctagccctgggccatcctaatacatctggattcttacgcaaaacagaaataaactttcttatttcatttctccactgcattatggggttccctcttacagcaacttaggcttactctaactagtatataaagaatcacaaataatttttcttttttgatttatcagtatagtaatttatattattaataatagtgctcctaatatcaaaccatctttgcactcctggaataaaatccatgtgattatgatgtacaatattttaaatatgctactagattctcctgcttaatatttagttttttacaatattcaaaagtgagattaatatgtttttagagagtttttttttttcagttttgacactgatattatgctaactaaggaatagattactaggtcaaaagatagggatatttttaaggttcacagtatagataaccacaggctttcaggaaggttgtaccaatttatattctcaacaatagcattttagagtgtttatgcactgcaccctaggcatcttggtattattaatttaaaattacgcttggtaatatttaaactaatttactttttcaatatattaaaaaatagtatgtcttaattagcattttctttattacttatgagaatgaagaggtttatttaagccaactgcagttttagtggtcatgtactttctatttatttttttaccatgtctcataatgtattcaatttagttaaattactcaaccactttcaatttttaatttatttaatctgcacaaagctggatcaggcaaaccaggcccatagagaatttttttttccattatgaatatgagttagaaccagacctgactctcaacacagaacccttccactatactagacccataatgtatctatgcagctttatgcccatcagctcattctattgtcctcccctcaaagaaggtctaaacataggaggcgggagtgtgaaataagaggctctgtccctttatcccaacatccctgagtctcttaataaagagaaaataagtttggttctaagtgcataaaatgctattcgaaatgttgatgtggtgtggaataaacatcagaaaggctgcttggaatattaaaataattacagtctagctatctataagctaaatttggtattactgtcaaaaaagcactcatttaaaatatatatagtgactacaatgatattcaataattaaagtacagaaaacaaaaaaagaaaaggtacatcgtttacataaaaagtactcaacttagcatgaaagctgggacatatttaacagtgaaagggatagcaggaaatgctaagtcacacaagatactgggacaacaggtaaaagtgagaatgttttggtcaaattaaaatgtatagacaccctattaatggtaagatatcaaagtagtaccataagtaattatttctgttcttatttgtaatcatttcatcactgataaagatcccagtaaaatatattttttcattttattaactttagtgttataaaaaacagatgcactgtccaattaggctattacaaacttagccatgaagttgaaaggatcaaaagatttatacaggcaaagactgggagtggcatcagcaagatggtggaatagattgtctggcatcactcctgccaaaaaatataactaaaaactatccaaagacaagaataccatcctgagttcaccagaacttggaggaaagcagagaaactccctgggcccccagaatcaagagaagccatgactggtaagagaaatattcatgttggactatgctgccctctcccacaagccatcataatgtccctcacacaaaatttctctagattcagtttccaaggtaagaggttgtagacattagatctcctccacagtctgggaatcttcacaggaagaccattctggtcttgtcccacaggaactaatgggaatgccaggaatactgaaccaaactggggtgaactggggacaaacagccggcactgattacttgaactagtgcatggatcttggcagctactctgtacttcaatcagtgaggaagccatattaaagagactgcttgctgctctattgcagcagtggggcagaatctgtgggaaggctcgaattcctggctagatttttccacaaaccccaactgctctatggagccttgacctgacccagaaacaactaaaaggttaagattaagttctggtgcctgcttaagtcttccttacactaggaaacaatggcaggtcagcaaggtagttcaaaggtaatgtttaacttccaattctcactataagtcttccccagaccagaaaacagtggcaggcagtgattttgtttcagagaagcatttaagttctggagtcaactataaatcttccccagaccagaaaaaattggcagggcaatgagtttgttccactgcaatgttttagttctaatgctcactataagtcttccccagaatgggaagtaacaacaggccagcatttaacttctgatgctaagtagtaaaggtctgataccaccaaagaatacgtgcataaaatagagaaagtggatgtctcctcaaatgtgcagccaccaacataaagatgcaaggattgtgaaaactcaggggaatatgacaccactgaaagaaactaccaatagactcagaagagctgacaaactgtgaaatatcagagaattcagaataatactttcaaagaatttcagaaaatcaggccaggcgcagtggctcatgcctgtaatcccagcactttgggaggccgaggcgggtggatcacgaggtcaggacatcaagaccatcctggctaacacagtgaaaccccgtctctactaaaaatacaaaaaattagctgggcgtggtggtgggcacctgtagtcccagctactcaggaggctgaggcaggagaatggtcagaacccaggaggcggagcttgcagtgagccaagatcgcgccactgcactccagcctgggcgacagagtgagactccttctcaaaaaaaaaaaaaaagaacaaatttcagaaaatcacaagcaaacatggatagaaaactaaaagaaatttggaaaacaatccaggaacaaagtgagaaatttgacaaggaaattgaaataaataaaaaaccaaatagaaatcttagaaaagataatacaataatagaactgaaaaactcttttgaaagtttcaacagcagacttgacaaaacataggaaagaattagtgagcctaaagacagaacatataaaattactcacagaaggaaaaaggaaaaagaaaatgagtgaagaaagcttacaagatttatagggaaaacaacagaatatacattcatctcattgccacatagaacatactctaaaattgaccacataattggacaaaaaacaatcttcagcaaaggcaaaagaaccgaaatcataccaaacacactgttgtaccacagtgtaataaaaatagaaggcaagactaagaatatcattcaaaatcatgtaattacatggaaattaaacaacatgctcctgaatgacttttgggtaaataatgaaattaaggcagaaatcaggaagttctttaaaactaatgaaaacaaagatacaacataccagaatctctgggacatagctaaggcagtgttaagggggaaattatacagagcactaaatatccacatcaaaaagttggaaaaatctcaaattaacaacctaacatcacaactgaaagacttagagaagcaagaacaaatcaacctcaaagctagcagaagagaagaaataaccaaaacgagagctgaaatgaaggaaactgagacacaaaaagccattcaaaagatcagtgaatccaggagtttgttttttggaaaaaaaaaaaaaactaaaaagacagataggccactagctaaactaataaagaagaaagagagaagatccaaataaacacaattagaaatgactatgggaatgttaccactgaccccacagaaataaaaataaccatcagaaactcctatgaacacccctatgcatacaaactagaacacctagaagagatggattaattcctggacacatacatcctgccaaggctgaacaaggaagaaatttatttcatgaacagaccaataacaaactccaaaactgaatcagtaataaatagcctaacaaacaaaaaaactccagggcctgatggattgacagccaaattctaccagatgtacacagaagagctgctaccattcctactgaaactatttcaaaaaattgaggaggagggactcctccccaacgcattctatgaggccagcaccatcctgacaccaaaacctggaacagacaaaacaacaaaaaaagaaaactttaggccaatatacttgatgaacattgttgcaaaaatcctcaacaaaatactggcaaactgaatccagcagcacatcaaaaagctaatccaccacgatcaagtagacgtcatccccagaatgcaaggttggttcaacctacacaaatcaatgaatgcaattcatcacataaacagaactaaagacaaaaaccacatgattatctcagtagatgcaaaaaaaggctttcaataaaattcaacaccccttcatgttaaaaactctcgataaaccaggcattaaaggaccatacctcaaaataataagagccatctataacaaacccaccaccaatattatgctgaatgggtaaaagccagaagcatttcccttgaaaaacaaaacaagacaagaattccctctcaccactcctattcaccactgtattggaagtcctagccagagcaatcaggcaagagacagaaataaaggacatccgaataagaaaagaggaagtcaaactttctctgtttgcagacatgattctatatctagaaaaccccacagttttggccccaaagctccttcagctgataaaaaacttcagcaaaattttaggatgtaaaatcaatgtactaaaatcactagtattcctgtacaccaacaacagccaagccaagagcccaatcagaaagcaatccattcacaatgccacaaaaagaataaaatacataatatacctaggaatacagctaaccacggaggtaaaaagtctctacaatgaaaattacaaaagagtgcttgaagaaatgagagaagacacaaacaaatggaaaaacatcccatgctcatggattggaagaaccaatatcattaaaatggccaaagcaatttataaattcaatgctatacctaccaaactgccaatgatatttttcacacaattagaaaaaactatttcaatattcatatgaaaccaaaacagagcctgaataccccaagcaatccaaagtaaagagaacaaagctggaagaatcaccttactcaacttcaaactatactacagggctatattaaccaaaacagcctggtactggtacaaaaacagacacatagaccaatgaaacagtatagaaagcccagaaataaggctacacatttataaccacctgatctttgacaaagatgacaaaaataagcaacagggaaaagactccctattcaatgaatggtgttggaataactggctagccgtatgcataagactgaagctgaatcccttccttaaaataaaaagaaaaatcaactcaagaataattaaagacttaaatgtaaaacctataactataaaaaccctggaagacaatctaagcattaccatcctggacataggaacaggcaatgatttcatgacaaagacaccaaaagcaatcacaacaaaaacaaaagttgacaagtgggctataatgaaacttaagagcttctgcacagcaaaagaaactatcaacagagtaaacacacaacctacagaatgggaaaaaatattcgcaaactatgcatgtaacaaaggtctaatatccagcatctataaggaacataaataaatttacaagagaaaaactaccccattaaaaagttggaaaggacatggacagacacttcttaaaagaagacacacatgtggcaacaagcatatgaaaaaaagctcaatattgctgatcattagagaaatataaattaaaacaacaatgagataccatctcacaccagtcagaatggctattagtaaaaagtcaaaaaataacagatgctggcaagggtgtggagaaaatggaacacttatacactgtctgtgggagtgtaaattagttcaaccattgtggaaggcagtatggccattcctcaaagagttgaaaacagaactaccattcaacccacaaatcccattaccaggtgtatacccaaaggaatataaatcattctaccctaaagacacatgtacatgaatattcactgcagcactatccacaatagcaaagacatcaatcagctaaatgttcaccaatgacaaactggataaagacaatgtgatacatatataccatggaatactatgcagccataaaagaatgagatcatgtcttttatgggaacatggatggagatggaggctattatccttagaaaactaacacaggaacagaaaaccaaagaccacaggttctcacttgtaagtagtagctaaatgatgttacctatgcaacaaaccttcacatgtacccccaaacccaaaataaaagtaaaaaaaaaaaaaaaaagacttaataggacatcagcaagtgaatgaatctccacataacagaaattcccaagacagaaaaaggcccacaaagcatatttttaaaaaatgactgaaaatttctcaaatcccaagaaaaattataccatccacgcacaggaagaagtaatcaatcaaatttaacccaaaggggaaatccccaaggcacacactaatcaaattagcaaaaatgaaagacaaaaaaagaatactcaaagcagcaagagaaaagacacatatcatattcactggagccccaatacggctttcaatggatttctcaacaaaaaccctgaaggccagaagagagtaggatgctatattccaagtttaggggttgggggtggaaaggagagactgacaactaagaatacatacccaacttcactattcttcaaaaatgaaggaaagataaagattttcccagacaaatcaaagctggggttattcatcaacaccagacctgtcttacacaaaatgctaaagggagtttttcaatcagcaagaaagaaatgaatgctaacatgtaacaagaaaacatctaaagatattaaactgacttggaaaaacaagaaaacagacacattcagaatagtctaatactggaatggaagcacttaaaccactatgtgttcagcatgcagactaaaagacaaactattttaaaataataactacaataattggctaagaggcaatataagaagattcaaattgaagcatcaaagagtcaaaaatgtggtgaaggggatgctgttaaagtgcagtttttttcttatttttcttttggttgtgttcaaagttaagtcactatcagtttaaaataacctcttataactaaaagatgttttttgtaagcctcgtggtggccacaaagcaaagtaaatacactaaaaatagcacagaatcaatagatacactaaaaatagcatagaatcgaaacatactaccaaagaaaatcagttaaccgcaaaggaagacagtaaaaaaggaaggaaggatttacaaaacaatcagaacacaagtaagaaaatggcagcagtaaactctttcctatcaataataactttgaatgcaaatgggttaaattctccaattaaaagacacagaatggctaaatggatttaaaagaaaacaagattcaactgtacgctgtcttcaagaaactcacttcacctataaagacacacacagactgaaagtgaagagatagaaaaggatatctcatgcaaatggaaaccataaaagagcaggaatagttacacttatattagtttatgttgactttaagaactgtaaaaagagagacaaagaatgttatataacaaataaatacagaaagataatataataattgtaaatatacctgcacccaacactatagcacccaaatataaaaaaacaaaaattaacagaccaaaagggagagactgactgcaatgcaataatagtagtagatttcaacattccactttcagaatggacacataatccagacagaaaatcagcaaagaaatattcaaggtaaactgtcctctagaccaaatagacctaacaagacatttgctctccctctccctctccccatccccttccccctccccctccccctctgatgcccagccgaggctggactgtactgccgccatctcggctcactgcaacctccctgcctgattctcctgcctcagcctgcccagtgcctgggattgcaggtgcgcgccgccacgcctgactggttttcgtatttttttggtggagacggggtttcgccgtgttggccgggctggtctccagctcctaaatgcgagtgatctgccagcctcggcctcccaaggtgccgggattgcagacggagtctcgctcactcagtgctcaatgttgcccaggctggagtgcagtggcgtgatctcggctcgctacaacctccacatcccagccgcctgccttggcctcccaaagtgccaagattgcagcctctgcccggccgccaccccgtctaggaagtgaggagcgtctctgcctggccgcccatcgtctgggatgtgaggagcccctctgcccggccgcccagtctggaaagtgaggagcgcctcttcctggccgtcatcccgtctaggaagtgaggagcgtctctgctgggccacccatcgtctgagatgtggggagcgcctctgccccgccgccccatctgaaatgtgaagagcacctctgcccagccgctaccccgtctgggaactgaggagtgtctctgccccgctgccaccccgtctgggaggtgaggagcgtctctgaccagccaccctgtccgagaagtgaggagcccctctgcccggctgccgccccgtctgggaggtgtacccaacagctcattgagaacgggccatgatgacgatggcagttttgtcgaatagaaaagggggaaatgtggggaaaagaaagacagatcagattgttactgtgtctgtgtagaaagaagtagacataggagactccattttgttctgtactaagaaaaattattctgccttgggatgctgttaatctataaccttacccccaaccccgtgctctctgaaacatgtgctgtgtccactaagggttaaatggattaagggtggtgcaagatgtgctttgttaaatagatgcttgaaggcagcatactcgttaagagtcatcaccactccctaatctcaagtacccagggacacaaacactgcggaaggcggcagggccctctgcctaggaaaaccagagacctttgttcacatgtttatctgctgaccttccctccactattgtcctatgaccctgccaaatccccctctccaagaaacacccaagaatgatcaataaatactaaaaaaattaaaaaaaaatacaatgatacaattaaaaaacacaaataaaaaatggattaaaaaaaagacatttacagaattttccacccaactgctgcagacatttacagaacatttcctcaacagcacatggaagagtctccagtatagactacatattaggtcacaaaacaagtcttaagaaatttttaaaaatcaaaatcatatcgtcttttctgatcacaatggaataaaactagcaattaataacagaaggaatgttggaaactgtacaaatccatggatattaaacagcagacccctcaataagaaatggatcaatgaagaaattcaaagagaaatgttaaaatttcttgagacaaatgaaaataaaaatacaacacattaaaacctatgagatacaggaaaatcagttcaaagagggaattttataacaataaatgcctacatcagaaaagcagaaagccatcaaataaacaatctaacactgcacttctaggaaatataaaaggtagaacaaaccaaaccccagatttgtagaataaatgaaattataaagattggagcaaaaataactgaaattgaaaccaaaaaaagaaaaatcagcaaaacaaaaagttgtttttaaaaaagataagcaaaaactggcaaacctttagctagactaaataagaaaaaaaagagaagagacccaaataaataaaaccagaaataaaaagggagacactaaaattgataccacagaaatacaaagtatcagtagagtctattataaacatctacacgccaacaaaatggaaagcctattaacagaagaaatggataaacttctgggcacatgcaacataccaaaattcaactatgaagaaatagaaaaccagaacagaccagtaatacataatgagattgaagcagtaataaaatctttcatcaaagaaaaacccagaacctgagggcttcactgctgaattccaccaaacatttgaagaactaatatcaattctactcaaagtcaacaaaaaaatgaagaggagagaatacttccaaacttactctacaagaccagcattaacctgatactaaaacccgacaaggacacacacatacacacacacaaagaaaactagaagttaatatccttcatgaacatagatgtaaaaatcctcaggaacatactagcaaactgaattcagcaacacattaaaaagatcattcatcatgatcaagtgggatttatcctggggatgcaaggatgattcaacataaatatatcagtaaatgtgatacatcacattaacgaaaccaagaacaaaaaccatatggtcactttagtagatgctgaaaaatcattcaataaaattcaacatccctttatgattaaaaaaaaaaaacctctcaataaaccgtgtatagtagaaacacttcacaaaacagtaaaggccatatatgacaaacccagagctaacatcatagtgaaaagggaaaaattgagagccttttctctaaaatctgaaattaaacaaggatgctcactttcaccatttctattcaacacagatagtattgggagtcctagtcagagcaattaggcaagagaaaaaaataaggggcatccaaattagaaaggaagaagtcaaattatccttattcacagacaacatgatcatatattaagaaaaacctaaagactccaccaaaataatgttagaaccagtaaacaaattcagtaaggttgcaggacataaaatcaacatgcaaaaatctgtagcaattctatacaccaacagtgaacaatcatgaaaaaaaatcaagaaagcaatcctatttacagcagcgataaaaaaaatctaggaataaatttaaccaaaagtagtaaaagtttctacactgaaaacttaaaacactgatcaaagaaattaaagagaacacaaaaatggaaagatactccatgctcatggattggaagaattaacaatgataaaatgcccacactacccataacaatctacgggttgattgcaatctgtatcaaaacaccaatgagattcttcagagaaatataaaaaacaattctaaaatttgtatggaaccacagaagaccccaaatagccaaagtgatcttgtgcaaaagttataaagctagaggaattgcaccatcaggcttcaaaatatactgcaaagctatcataaccaaaacagcatggtactggcagagaaatatacacactgaccaatggaacagaatagagaacccaccacacctttacagctaactcatttttgacaaaggtgccaagaacataccttggagaaaggacagtcccttcaataaacagtactggcaaaactggatacccatatttagaagaatgaaaccaggaccctatctctcaccatatacaaaaattgaatcaacatggattgaagacttaaatgtaagacctgagagtatgaaactacttgaagaagatattggtctaggcaaagattttttttggtaagacttcaaaagcacaagcaaccaaagcaaaagcagaaaaatgggattatatcaagataaaaatcttgaaaaatattgaagtaaatatacattagtattgactttctgcaagcaaagaaaacaatcaagagtaaaaagaaatgagagaacatattggcaaactatccatctgacaacagattaataaccagaatttataaggaactcaacagcaaaaaaacaaataatccaatttaaaaattggcaaatgatctgaacagacatttttccaaagaacacatacaaattgccaacagggcatgtgaaaaaaatgctccatatcactaatcatcagagaaatgcaaaccaaagcaataatgagaggatatctcatccacttaaaactgctattatcaaaaagacaaaaaacaaatgcttatgaggatgcagagaaaggtgaacactaatacattgttagtgagaatgcaaattagtatagtcactatagaaaacagtataaaggttcctcaaaaaactaaaaataatctagcatataacccagcaattccactgctgaatatatatccaaaagaaaggaaattagtataccaaagagagatctgcactcccatgtttattggagcattattcaccatagcaaagatatggaaacaacataaatgtacatcagcaaaggggtggagaaagaaaatgtgcgatatatacacaacagagtatgactcagctataaaaagaatgaaattctgtcattttcagcaacatggatagaattagatgtcattatgttaagtgaattaagccaggcacagaaagacaaatattgcatgttttcattcatatgtgggagctaaaaaagtggatctcatgcaggtgagagtagaatgacagttaccagaggctgggaagggtaaagaggagaagacataaagagaggttggttaatgaatacaaaaatacagttaaacgtaaggaagaagttctagtatttgacagcacagtggggtgactatagttaataatttattgtatatttcaaaatagctagaaaaaaagatttgaaatctccttaacagaaagaaaagataaatgtttgaggtgttagatatcctaatttttctgatttgatcacaacactttgcaagaatgtataaaaatctcacatacatctgataaatatgtacaattcttacatatcaacataaattttttaaaagtttgcataattatcagcactaatcataaacaaacacacatacaacaaaaaacaaaccaaaaaagtccccccagacctaaactgtgtgtgtgtgtacacacatacacacacacacacacacgagacttagggcacaaatatctgcttattttactcacttccacttctctccatttaaatataaaactttgatgatagcaaataaggtcttctactttcaataacttcccaagtcgagtcactgtcttttgctgtattgatctaaggcattttcatttattctaaatagaatttttttcatcacagggcatccaaaaagacaaaatcaataacctctgaggaatacagaactccaatttttaatggttctattagaatactaaaaattaggctacagaaggacaaaggaggattaatcttgtaatttttaaatgcctactttaaaactaaactaattcatttataattctaggttttattttcaaataaccttaacataaaatatactctcttttaattttctccaagtaaaacatagttttctagcttcagacaactagactttgaagttaagctattgacttgctctcctggattgccagaaaataaagtgctctttaatgtgcagcagaaggcagagggagaaagaggaaaagattattcgggaaactgtgaaagccattgagaagggagcagtctatttccatctacatccatgactccacactgacattgagctttgtagtccctctcaggtaaggatgatagacctttgaacatgtaaatactcaagcattaatgatgataggtacccctgcttattttgttaataaacagatgctccagatattattctaatacttgtttagtggactcactgtgatacgagtgcctcacatacaaaccagataaagtaggagagctggggctcatgtaaaaaagggtctaaggaacatcaatttcttcttgttacataggagatacataaatacatttaaaatatttgatttggtttgatttgtgtattttgtcaaagtaacaacaaaagtcttagtttttctttttaattatgccaataattattttttaaggttttttttggctttttaattttttatttctttaaatacttatcctacaatagtactccaaacctcagcatcacacactatacccatgtaacaaacctgcacatgtacccccgaatctaaaaagttgaaataaaaaaattatcctataaaaagtgttagtttttgtataagacaagattataacccctgtcatagtcaagaaagctttacaatttaggtcattcaaaagcacattaatataaaccttcatataaatgaacaccaattcatcgcattcaaattatgtacacatcctaagttttccaagttatttgtgtatgtttttacctggtaaattaaattattgttatatttacaggtgccattatctattacaccaggctatagcttatatatccagaggaaaatgacaactttaggttcaccaatatttgtggaacataataaaaaatatacgggatattgttggccaatcaattttataattctaacctgaggataacatttaatttaaagtttaaggatataaaacttcacgttttttagcaaaggaaaaagtcatggaaaagataaaagtaaaaagaacaaaagtgaggttggaaatccatcttaagccaaaatgacaatgtcttcataagttaatattaatcctttaattataaattttaaaggtttaagtagtttctatgaccttaactttgaataattatgccatatggagcttttcttaaatttgaaaaagatgctgaattgttgctcaaagccttttcatgatttcaggctggcagaattccagtataatccttcagacaccacttaaaattacagaccaggaacccaagctggtaaatgctatgtcaaaatgctaagagccttttactgagtagagcacattgtagaaaacgtttgatgtgttggtatatttataaatatcaaaacatgaagctgaaaacaactatttatagtggagaatttacaaaggaaaagatgaacagattagacgaaatttaaataaaatgtttgtgtatcataaaattaaatcataaaaggcaaatgccaaagatatttgccacaaagataagggttttatcattctaaatataaaaggagtttattagatgagctgatgagaaaaacattaggaccctaaaggaagaaaaactggaaaaagacatgaacaggcaatttcccgaaaatgaaatataaataaataacaggtaaatccattgtaaatgttcaatctctcacacttaaatatacaaattaaaacaactgtttttcacaaacatgtactacaaattaggtaaaactactaataaatctacagactaagtagatactctactgaagtaaatatacattagtataaactttctgaaatgcaatttgacctgttaattctactaggattttaacctaaaaaaattgaaattgaaaatgtcaacaaaagtttatgtatgatgatgccaatctccacattaaacaattaaaataaaatctaaaagtttggctgggtgcagtggctcatgcctataatcacagcactttaggagtcaaggtgggcggatcacctgaggtcaggagttcaagaccagcctggtcaacatggtgaaaccttgtccctactaaagatacaaaaattagctggatgtggtggcgcatgcctgtagtcccagctactcaggagtatgaggcgggagaatcgcttgaacccgcaagccagaggttgcagtgagccgagatcaggctccatcctgggctacaaaggaagactctatctcaaaaaaaaaaaaacctaaatgttctaaaataaagaaataacacaattaattacatctggctgggcgtggtggctcacgcctgtaatcacagcactttgggaggtcgaggtgggcggatcacgaggtcaggagatcaagaccatcctggtcaacatgatgaaaccccgtctctactaaaatacaaaaaattagccgggcatggtggcgcccatctctagtcccagctactagggaggctgaggaggggaatcgcttgaacctgggaggcagaggttgcagtgagccgagattgtgccactgcacttcagcctggcgacagaacaagactctgtctcaaaaaaaaaaattatgttatatcaaaggccggatgaggtggctcacgcctgtcctcccagcactttgggaggccaaggcgagtggatcacttgaggtcaggagttcaagaccagcctgaccaacatggagaaactgcgtctgtactaaaatataaaattagccaggcatggtggcacaatgcctgtaatcccagatacttgggaggctgaggcaggagaatcacttgaatctgggaggtggaggttgtggtgagtcgagattgtaccattgcactccagtctgggcaacaagagcaaaactccatctcaaaaaaaacaaaacaaaacaaaatttgttatacccataaaacaggatatcatgaaacaatgaaaacaatattttcaaagaatttcaaatgacattggaatattcttagtataatgctttaaaaagcaagagatcaaattaattagtttgatcttgggcagctaagttagtatggctattttacatatacattaaattattactattatatctgagtggtggtaggaacagggaattttacacctttctccactttccctattttctaaaatatcttctatttcaaggaaggttatttttaaaatagctgaataggtttctaaaaccattgtccaatttagataccaaagtttaatcaaacttctgaaaattacacactatcatcacttagtaatgttctttaatttttcaaaagttcatattttatggactttgtttcaattaggtttgaaaagattttaaaaggccacaaaagaagctttcactttgcaaaatgtcaatcatttactctcttggattctttatttgaagcattttgaccttgtggaggtatttcatgtttctcttaactcaaaatcattgaagatatcatttgggtctaaattgctgctgacagaaactcaggtaggatgtggacttaggaattcttttataaccttaacatcgtaagtgctactgaaacaacacagacccatatagaatgtcacactgagattatttattattctggtattattgtcctttcctctttgaacctcaactttatactcaatgatagaaaatgaacttctaaacctctgaattcttgactgggttttaaactgctggcaaatattttaaatttcagatttatttaaatacgataaaaacatccaacttaaaaagatactgtgagaagagttcaagcaactggcagaatgacataacagactcacaaaagaatcagcagcttgttagttttattcaaactcacagtaaaaactcaaattttaaaaaatttgtgtagaaaaattcaaagtatgtctcaataaagattaatgctatgtttttaacttattaagtgatatgaaggaaatcaaaacactaaaagaacatataaatatttgaatacaaagatgtatcatatcctacccaaagtatttataatgatttgagatcaaatgtggataaatcaataacagtttattcacatgaccaggcacagaggctatcttgaatttctcagtagattatcattctttttgttttgttttgttttgttttgttttgagacggagtctcgctctgttgcctaggctgaagcacagtggcgcaatctcggctcactacaagctccgcctcccgggttcacgccattctcttgcctcagcttcccgagtagctgggactacaggcgcccgccaccacacctggctaattttttgtattttttagtagagacggggtttcaccgtgttagccaggatggtctcgatctcctgaccttgtgattcgcccgcctcgattatcattcttttattcactcacttaatatttaatgagtgcttactgtgtgtaaggcaccatgcaagctcctggggcattagaaacaaatatttcctgctttcagggaattcggagtccaggtctttactgcatttgaaaatgctaaactcctttgactatttatgtaaaaatatcaatcattggaaatacaaattactcgatgtgagcacagcatttagatatcatcatatggactctgaggttggtgaattccaccaactggacaaaaaccgaactcatcgcactcaacaccagcctatgtaaaagagagtcttccctttccccagactctccctttttgtcaacaagtccctccattctggttcatctcagtacctctacccatgtcagctaaaagaactgtcctcaaacctcccttctaaattctgggatcccttgtgttctcacttcaatccaggagcattccattcttccagatgcaggatacccatgctccctcctctacctgcagaactccaattctataggaacaaattcccttatatcttcttcctttccaaggcattccactgttcagctggaagcctgtttcgctttttttgaaactcctcacctaagcagactactctgattctttactaagaatacagatgctattagctacaaggtcttttcaagtcttgtcagagagcttctctatatctttaccaatgcttgacttccttcctccattggtgaaggtcatgcctcctgtcactcattcatgtcatacccggagggcacctgccccgagctgggttttctaggcactggtggtacagaagtaaacaagctagacaaggtcctgctaacagagcttatgttctagtgggtgggaggaaacaagcgaacaaataaaaggatgatttcaggtaatgctatgagctatgaagacaatgggacaaaaaaaggtggcataggtaggccagactttggatgaaaaggtcggggaaggatgctctgaggagtgtagaatgatgtcaaggaggttggccattgaaaaaatcatgtggagaagcattctggaagagggtgacagcagctgcaaagacctggaggcaggggagagtgtggcacattctgggaaaagaccaatggacccttgcagccttgtagccgagggctgaggtaggcctgtgctgcgtctgtgctggggatgccattcccacctgcaccacctcacagatcacaagccatcaatgatctctgattcttcacgtcattaagctgttcctctccattagtccctttgtgtacttcaaaatgctcaacccatgttcagccccaaaatatattctctttaactcctgctgctctttggaactacatctttcttttaacatcgtattttcccaaacaacaggatgttccctcacttccacttccagacttatcttttgaaaccctgtttctgggcacacaatcattttcagcgcactgtccaagatcatcaatgactttgtggtttcacatccagtgacctttcttcaaccctcatccttcctgagtttgggtcacattcttgacaatccccctttccaaatagtcttttcctctatttccataaaaatgcattcttctcatgttccttctaccttcgtgacccttcttcaactgtttcctccctggcctctcaaatggagctgtacccctaagttcttccttcacagttgccctctctctccctccctccctgcctctttcccccttgctttaacagtcccactcactctcaaggccactggccaggccttctctgtgggtgattcccacagctgtttgtctccaatcctgcctgctcttgggatatccagaagcattctttcaacagcaagggaaagtgtagtgtcacttcaaactccacatgttcttaactcagttcagcttcctcctcctccgaccagaaacttctacattcctgatcgatttatatttaaccaacctaatcagtgctatctctatgatgattttcaaatgtcctctttgtccccttgctactgccgacactctcactgccttctcacgcacatctgctgtgccctcaaggacctcctgcctggattaatccagtccttgttacctcctgctgctgctaccacatcttgccaacaccaagaggatgatgttcctaagaatcactggaatcttgacacttcatttccccaaaacctttggcaactcctcactgtttacccaatgaagcaaaaatgcttatcacagctttggagactttcgatgatcctgaagctatcttagcttggttgctagctctcccctggatcaacctctatgtcatggaaacggttttgtttgctcttgctttccttattcttttgacttagaatgccatccaacatatctactaattaaaatcctacttatgttacttatgtctcattcaagtaacatctctcccaattaattttcccgatttcctcagcagaaaatgattttccccaaattcacactgtcttgcattatagttatctgtgtagtgtacttgcagtatttttcttgcagtcactattatttttctatttgagggcagtggccccctcccctgttttttatatacccacagtgcctgggataatgcctttctggaatataaaaattcaggtttctaatactaatttttaaattatctttaccctgtaaattagcatcacgtataaacctacatttcacgaagttcatctcctattaaaaagaggcatttggaatgtgaatatataatgcaggaaaattacggcctaaattggatgtgttatatgtctgactttggcatatccaattttcttaaatcaaggtgcacaggtatctgtgctatttaagaacatttacttagaaatactttgaactgctagaagagttgactgaagccaaggtgaagtgagtgtaagagttaacagaaaagataagtggcaacaccactttccctttccatcagtctctcttttatctgctattgtcaaagtctgagactataccatataagaatatttcctggcctggcgcggtggcttacgcctgtaatcccagtactttgggaggtcgagttgggtggattgtccgaagtcaggagtttgagaccatcctggccaacatggtaaaaccccatctctactaaaaatacaaaaattagccagacgtgctggcgggtgcctataatcccagctactcaggaggctgaggcaggagagttgcttgaacccaggtgccggaagttgcagtgagccgagatcatgccactgcactccagcctgggcgacagagtgagactctgtctcaaaaaaaaaaaaaaaaaaaaaaaagaatatttccctaattcctgaactgtatattttagcatcgagacattattattttatcctgctgtgagggaattatcactaacatcccacttagcctgaacatgtcccgagaggcccaacctattggtcttgtagtcttcttcctttcggcaaagaggaattccatctgtccactggcttgggaaaatagccttggtgctgcccgtgactgttccaccctacttcccaccccccagcatattccacgaaccaacagtgaatgctgtcaggtctaccttcagaacatatcccaaatctgatcaggttttactaccttcattgctattggctagacccagctctctattacctttcctctatatttttgcaacagcgttttaactgttctctctacttcctcctttgccatcaattcagtctattctcagcacagcagatgatgacatcctattcaagtgtgagtcaaatcatgtcactcctatgctcaaaatctgccaacttcctctactcatagagagtcaaagcaaagccctctcactggcctactcagacctacgtgacctggacccacaccctgaggtttcttctctggcctcatcactttccctcttcttctcactcatcatttccagacacaccactttccctgctgttctgccaagaagtcaggctcactcctgcctatttacagtcctttttcctatttatttctgggttcatagctatgctatcaagggccaaatctgctgaaatctgactttcaaattaattaaagtacaataaagcaagtaccttaggatctcagtctatgtaaaatcaatgtagtaatggctagtatggtattgcatactctttaaaagctcaacattatttgaagatgaagagggataggtggaaagaaattaaacaaaatttagatgattcttaagttaccctttgcaagtttctcattcccaagataaagactggtcttaagaaactcaagaggcaattttggaaacagcaattcacatttagtacctgactaaaatagttatactttttctgaacgtcaaaagaaagaatatttgagattgcacctttaatataagtccaatcaaaatgtgtaaacattatattgacatttattccaataatatatacttctaaaaagacttttcttatctcgactgaaatatcaacctgggaaaataagtcatcatttatgtgacactgttataaaaagctgtaaaatctagaaatgcttattagacaactgagggaagatctgaaacttagtcccatttaggaaaatttagggatacagccccagtatttctaatcaaaataatattggacaatattataatatcactttattacaacgtgtatttaattactatggaataggatattccatataatcccttccatgaaagccaagggaaaagttaggaaattccctagattattttactggtacttagacataggagcaagatacttaaattcctcgactgaagagtttatacatttaaagagtaatgccatgtctactaccttttggagattaaatataagggtggtggcaatggattttaaacatggatttcaactgcctattaaaaaactagttaaatatcttaccttttccagtgtcatctctgtctcagcagcatgagtctttttcagctctattttcatcttttctgattcagccttcagtttattgacgacaatctcatgttcccttgtagccctttgcttttcctcttcacgaagaagaccaagctctaccagctgctgtttccgctgtgagttcacattgatcaattcttctctcaacttgtgaacctgggcctccatgtcggcaataaccttgtttttaaaaatggaaaaatgggcagaagatatcaatagggaagtcacaaaagaagaaccaatgggcaaaaggccaataaatgaaatatgaacatatggaatagaaagcttagattgcactccatccttccttctttccttccttccctccctctttccctctcccttccttccttccctccctctttccctctcccttccttccttccttccgttccctttccttccctccctccctccttcccttcccctcctcccttcccttcccttcccttccctttccttccctttccttccctccctccctccttcccttcccctcccctcctcccttcccttccttccttccctccctcccttccctctccctccctccctcccttccttccttccctccctttccttccttccctccctccctccctttccttccttccttccttccctccctcattccctccctccctccctcctctacttccttcattccatattcccatgtcattccttcctagctcagaggcaaataccacctggaacattttaccatacttttggatctttaaacaacatattgtttagttttacttgtttctaatttctatgtaaatggaatattacatgtatttttctgaaacttgctgtttcaaatattcaacatcatcatgttcctgaaattcatccagtgttccctattggatttttactttttattgattgatttctgcttttatttttatgtccttcttcctactttcctaaggtttattttgtattctttcttctaacttcttattttggatacttaactcatttattttttatcatttcttcttttctgatttataaatgtaagactacaaatgtctctctggatactgatttagttccatctctttggtttagatatgtggtattttcattatcgtttagttcaaaatacttttttaacttccattataatttttgtctttgacttatgaaccatttagaagtatgtttcttaattcccaagcatatgggacatattagtttcccagggttgccataacaaagtagcacaaactagatggcttaaaagaacagaattttattctctcatagttctggaggctagaagtcttaaaatcaaggtgttggcagagttggttccttctggaaactctgaaggagaagctgttccatgcctgtctcctagcttctggtatttcctgacagtcactgtgccttggtgtgtaaatgcatcattccaatcagtgcctttgtcttcagatggatttgttctctctgggtgtctgtgtctctgtggtgctgtattttataaggacactggtcatactggatttagggcccaccttaatccagcatcacctaattttaacttgattacatctgcaaaaattctatttccggccaggcgcagtgactcatgtctgtaatcccagcactttgggaggccgaggcgggtggatcacaaggtcaggagttcaagaccagcctggccaagatggtgaaaccccgtctctactgaaaatgcaaaaattagctgggcatggtggtgggcacctgtaatcccagctgctcggaaggcggaggcagagaactgcttgaacctgggaggtggaggttgcagtgagctgaaattgcgccactgcactcccgcctgggcaacagagcgagactccatctaaaaaaaaaaaaaaaattctatttccggttctgtgtagacaggaaattttgagagggacaccattaaactcaggaaatggacttcagtggttattgttttgtcattcacttctaattgcactgtggccaaagaatgtagtctatctcccattaattctttgcaaattttgagaatgtttgatggcaagttatgtagccaattttttaaaagcttcatgtatgattgctaagaaatgtctatgctgtattttctacagttttcagtgctatatcctatacatgcctatcatatcaagcttgttacatagttgaaatcttctgtcacttacttactgccactaacacattagccagcaatgcaacatttcccaaaacacaatgataaatgtttcatttcatgcctaatgtatgttcaacaagcacagcctaaaccaacatttccttgactggaaaccagaaaaataaaaaagtgacaggaatccaaatgtcacattatgatgctgggaataagaatacaaagctaaatgatgagaagttgctttggtcaaaatatctacaagaattatttcattttcaatataaatattatattcatccaatttttaattttaacaattttgtgatttctacatgataaataataattgctataattttgagtgtttactttgcaccaggcatcttattttggattgtgttcagtatacattagctcaactattaaccctgtggcctctctacactagactggaaaagacatctagaacagtaacatttgtgttagaggaaagaaaatgctttatagtaataaatctgagccttcgaggctggaggtgataggatgtcccatttttatcctgcctttctaagaaaagcttacttgaactagtcccaaaggaatatgtgagaggactttatataaaaggctgatccttgtaaacctgtagtggaaaaattagttattttttcttcaggaaatctatgcactgttttaacatctatttgtttctctatttcatagattgatatctgtgtatcaataatcagctgtggatcaattgtccgtgaaaacagtcttttaccttttgttctttgttttataatgattcttttgaacccaagagaagagatagtcaatgcaatcagattctgaaatagaggatacatcttctaaaaacagatagactttagcagtgacaacagttatgtgtttgggaggcagaacattctttttttaaaaaaaagctcagggatatcaacatggcagacaaggatgggttgctggctcccttccccaaaatcaatcctggagaaagcacaggaagcatgaatctgagatactaataactataacaataataaacataacaaaagcaaattttgagaagctcctgggtggaataaagacagtcctaagggggtacagcctggggaagaaaataatagaaaaccgctgtaagaaggtgggttgcaggaatgctttaccttctgctcttgtctctctcttttgtagccaggtaaaatcatatctgttccattaccatgttgggagcaagaactcaacatagtgttgacatcagtcagtcaataccaaggaaagcaaagccctccttgggtgaggagttgaagaaaacaggcacagacttctctgaacttcctgggtattcccccttccaaaggcttccctccaaactcccaggactagtgactcagtcattagacactcacttccaggagcttaggtaaattcccgaccagcaggttttcctgatgaagtaactgtgaaagggagtggtacggcaatgaagggctctgtcttggggttcataatcttgtccttctataagctcatccaacaggtcagggactaaaggtgggcttctgctcttccccagtcaggatatctgatagtcccaggggaaaatgggctccctggccaaagtaaataaacctgaggagcaaaactactaccaaaaagagacacctaaataacatatattatctgaagcagtataattggaacagatgaaacaagaattttttaagtgcgtaataggccgggtgtgttggcttatgcctgtaatcacagcactttgagaggccaaggcaggtggatcacttgagcctaggagttcaagaccagccttggcaatatagtgaggctccttctctacagataatacagaaatgagtcaggtgtggtggggtgtgcctgtagtcccagctactcaggaggctgaggaaagaagatcaattgagcccaggaggctgcagtgaaccgtggtcataccctgtactccggcctgtgtgacagaaggagatcttatctccaaaaaaagtccataataaacatacaaatagtaatatatatatacttaatatactgaaaagtgtaatggaagaagttacagacatgaagctgcaattaatgtcatagaagaaggaaaaagtgaaaatgataggaaaaagagcaagttagctaaagccaaagaatagaattgcgcattggaaggatggtaagattgaagaactccctgggaggcagcagagaaagataataatacagaaaatgtaaaagaaaagctaatatttgtggaggacagaggaagtgacaacatctaaataatagagtctgagaaaaatagaattggaaagattttatccaagctcaagctgatttgaaagtctgctttttatcacatactgtatcatctcaaagtattaagaatttctcttaaggaagagtacatatttattgtactttattaatttgttattgtgcgtttctatcccctaattttcactatggttagtacaaagttaacatccaaaagccataagtccataatgtctttttttgaaaattaaaaaatacatacatttttatagatttgggagcataagtacagttttgttacttggatatattgcatagtggtaaaatctgggcttttagtgtaactaccaaccaaatattatacattgtgcccactaggaaaatctttaaaaaatgagcaaaaatgttagttttccaaaagcagtgagaccatcccaaatcgagtttcaatctctgtcaatgtaaatcaaagtattgttatgcacattgtcatcactgtgtagatactgttctatattttcacacacccaattttaatttaattcccatttattagcatatttgtcatatttagtggctccctagtatttcacccttccagtacaggcatatcacagagatattgtgtgtttggttcccgaccacctcaataaagcaaatattgcaatgaagtgaatactgcgatgaagcaaatatctccataaagtgagtcacataaattggttggtttcccagtgcatataaaagttatagactattcaggagtgtctgagggagagaatacagtcatgggttcttggtttctgtttctggttgggccagtaaagccccttcctcatccctcttttctgcttatcactaaagacagaaactttaaaaccatggcttctggctgctaaaagcctaaagcaaaacaaaacagaacaacaacaacaaaataaggtgggttggacaagcttgcagtttattcagtgagcattatgtctaaaaaacaatgtgcattccttcatttaaaatacattattgctaagaagggttaatgatcatctaagccattcttaagtcctaatctttttgctggtggagagtcttgtcttgatactgatggcttgctaaccgaactcctgacctcgtgatccgcccacctcagcctcccaaagtgctaggactacaggtgtaagccaccacacctggtcaatgtttattatttcaatgcattaatggagtaaattatattataggttattttcaaacgttacatcaaccttaggttacattcaattttttccataagataatattactggattcagtttgctaataatttgctaatgatttttgagagactgacctgagggatttttttttttggactctccttggcatatttttaaattgatgttatgctagtctcataaattcagttgctgaatgatgctacctttttcatcctctgaaagaatcagtataagatgagttatttgtttcttaaatatttagtggaactggccagtagggccatctgggcttgatattgtatatctggaaaacattttgactactatttcaatttttctgatggttataggatgattcacattttccggtcttttacagagtcagttttggtaaatttttatagtttaggaatttttcctcttcccctaaatttgacatttgttggcatttataaatttctatgtccttgcattctctacaacttggtgattacatacgttatttttatacattattggacttgatttgctaataattccagatttgtatgtgtgtgttcatgagtgagttggcctggaatttttatttctcttcttgtaccagtcatcttttctatcaatattacaatcttttaaattggtttgagagtatttttctctttctcgcttctctggaaaagtttgtaaaagactacagtgacctgtcccatgggagatttttatagaactcacctgtaaaattatatgaactcagtgttttctttgttgaaagatttttaactgtttttaaaatttgcttaattatattagattatttagtttcctgttttgtcttgcggcattttatgtattcctggaaatttgtccatttcacctgggttctccaattattggcataatgcttttttaatatcttatttttttaatctctgatgatctggaatatatcctttttaaaatttaatgttattaatatctctcttttattgataacattaccatagctttatttttattcccaatattgtttatttgcactttgttctttgatcagtcctaccagaaattgcttcatttttctaacttcttaagctggttgcctacttcattaacaattaaccgtttaaaaataaatggcaggttaagtgtacccatttctctcattttagcttcatccttcaagatttgagaagtactattttcattatcaattatttctaagtattttaatttaaatgttatgaacttatttttgattaggaaatacgttgacattgataagaatttataagccacaaaagtagatacagtaaactatcttccactcacccggactgtcatcaataaccacctcatccccacccaaaatagtaccaatgtaaaaagtgtcaaaagtgtcttaggtctaattccagaagatcaattcttaggtctaattccagagatcaattcaaagtgcttttaattttaccttaattttatcttatggaaaaaactgaatgtaatctaaggttgatgtaacgtctgaaaataacctataatatagtttactccatcaatgcattaaaagaaaaaacattggccaggtgcggtggcttatgcctgtagtcttagcactttgagaggccgaggcgggcagatcacgaagtcaggagttcaaaaccagcctggcaacatggcaaaacccgtctctactgaaaatacaaaaagtagctgggcggggtggcaggtgcctgtaatctcagctacttgggaggctgaggcaagagaatcgtttgaacccaggaggcggaggttgtagtgagctgagatcgcgccattgcactccagcctgggtgacagggtgagactccatctcaaaaaaaaaaaaaaaagaaaagaaaagaaaagaaaaaacattatgattatctgaatacacagaaaaacatctgataaaattaaacaacaaaaattcttagcaaaagagaaatagaaaagatcactttaaccagataaaaggtatttgacaaaagactcatcaaatttcatttattctttattgtgaagttttaaaatatcccttttaaactaggaagaagaaaagaaggtctactatcatcacttgtattcacaagtgtatgacaagaacataaaaaaaaaaaactgggccaggtgcggtggctcatgcctgtaatcccggcactttgggaggccaaggcgggcagatcacaaggacaggagtttgagactagcctggtcaacatagcgaaaccctgtctctactaaaaatacaaaaaaaaaaaaaaaaaaattagctgggtgtggtggcgggcgcctccagctacttggaaggctgaggcaggagaatctctttaacccaggaggcagaggttgcagtgagccaagattgcgccacggcactgcagcccaggagacagtgtgagactccatctcaaaaaaaaaaaaaaaacaaaaacctatctttaatcatagatgccatgacggtatatataaaaaatgaaaatgaatgtacaaattattagaaataagagcttagcgtgatgtctgaataaatgatcaatgttcaaaaagcaactgcagtttttatacatcagcaaaaaaattataaacatttacagctatgacaacaaacaaagaatcttagaaataagcctatcaaaagatgtgcaaaaccctaaggaaaaaaatataaggctttttgaaagacataaaaggaagatctaaataactaagagatatatcagggtgatgaaagtctcttcatcagttctctgcagattaatctagagtgtaagtccaattaaaacttcaagaagagctttcgacaaggtggatctaaaatgtacagggacaaacatagtaccatgacatccccaaaaagaacaggcggtgtgatattccctacaagaaatttgggtctaacataatgttatcataatcaacacagtatagtcttatcatagagaacagaaaaaaattgaccaatgaaacagaattgagaacctagaaacaggctcacactggacagagctggcattacagtttagtggggatgtgacaagccaatgtattctaaaaattacgctgacacaagaagttattcatattgggaaaaataaaagcaagcccctatcttacacaatggacaaaaataagttatttccatttttaggtctatatccaagagaaatataacttatgttaacacaaaaacttgtaacatgaatgttcatagcagcaattttcataacagccccaaaggagaaaccaccaaaatgtccatcaattgatgaacacgcaaatgaaatacagtatatccacacagtggaatattattcagcaataaagagaaatgcagacctaatacatgctacagtaggaatgaaccttgaaaacacgctgagtgaaggaagccagtcacaacatattgtgtgattccaatattttacatgaaatatctgaaacaagcacatctatagagatagattagattagtggattgtctaggtctgggagtgttgagtggaaatgaagagtgaccattaatgggtctgagtttttggagagaggtgacacagttaatggtgaagatggttttgcaaccctgaagatactgaaaaccactgaatggtacagtgtaaataggtgaattgtatggaatggcaattatatctcaataagactgtttctttttaaatcagttcttagtggatgagaaaccaaatgtgagaccaaacttttaaaaatatgggagatggctttatgacttcaaagtaaggaaaggcatgacttaaagggcactaacttgaaaagattgatgaattagattgcaatacagttaagaacatttgttcatcaaaagacacaagaaagagaatgaaaaactaaatcacaaactggaagggaacatctgcaacatatgtaacttacaaaagaatattatccagaatgcctaaagtatatcaacaagtaaaagataaataacccaacagaaaataagtaaaaacaatacatgactaggcacatcataaaaggcaacattttaatggtaaacatgaaaaggtgcccaacttcattagtcatcacaaatgcaaattaaggctattttgatatcattttacaatcaccatatttgcaaaactcaagaagtctgacaataccaaatgctggcaagaatgtgtatcaatgggtactcttacacattattgatttgggtgtaacgtgataaaaccctactgtaagttaacttggcactacctcggaaagttggacacgttcataagctatatctgttgagaatctcttacacgtgaacaccaggcacatgcccaataatgtacacagcagtatttgtaccataactcaacttgtccgtcatagttgtcattgatttatcttgatacaatggaatattatatacagcaaaatgaattaaccagagctgtgcacaacacaatgggtgaatcttaaacataagatactgaatgaaaaatgcaaatcagattacctacaacatgcaaccatttttacaaagttcaaaaacaaacaaaaataatattttgttcagagaatatatatatgtacaataaagccataaaacattattaggtaactatcaacacacaattatgaataatggttaactctggggaagggtggttaggaatatgggaaaggaaggagcacacaggtacaggcagcaattttaatagtgttccaattcttggccgggcatagtggctcacgcctgtaatcctagcactttgggaggccaaggcgagtggatcacgaggtcaggagatcaagaccatcctggctaacacggtgaaaccccatctatactaaaaatacaaaaaattagccgggcgtggtggtgggcacctgtagtcccagctactcaggaggctgaggcaggagaatggtgtgaacccaggaggcggagcttgcagtgagccgagatcgtgccactgactccagcctgggtgacacagtgaaactccacctcaaaaataataataataatatgttccaattctcaacttgagtggtcagttcatgatgttcattttgttgtatgtattagtatttaaatattaattatgacatattctttgtatgtatcagacactagataaaaattttaaaaagatgacacagacgttttaagcccagctgacaagaagaatgcttctaaaagataatttcttaaattttaggacaataattatttttaatacattgtaagagtgctactatttattatggaaatgcacatagcccaacaattttgctttttttgtgaatatttcataggagacacttaattctaattatgtttttgaatattacatggcttcattattccttacttttgtttagtatttaataaagttaattaaaaaataatatattctcttcagaataacatattagtagttctagtaggcattttaattatgtattgttaatattaaggccaccaaatttatgattttaaatcatatgaaatgtatcaaaattattcctccattttcattattctggacacaatacacatacttggatttaagcttataaattcaaaaaaatacattattttaatttacggtcttttagtctcctaatattattttgtaaatgtcacatgcaaaagaattttctttcattttataaacaactcccataagaccttaagcataaaagaatttaaccttaaaagaaaacatggcttttgccttccaaagataaaagttactactagaaataatgacagatggttaatttgtttctaacaaattaaatacaataattaaatactaataagctctgttttgaagcaggagaatggtgtgtcatgagcacgacgggttcaggccataggcatgattaaaaataaacaaaatgggccgggcgcggtggctcacgcctgtaatcccagcactttgggaggccaaggtgggaggatcacaaggtcaggagatcgagaccacggtgaaaccccgtctctactaaaaatacaaaaaaaaaattagccgggtgcagtggcgggtgcctgtagtcccagctactcgggagaccgaggcaggagaatggcgtgaatctgggaggtggagcttgcagtgagcgccactgcattccagcctgggtgacagagcaagactctgtctcaaaaaaaaaaagaaaaaaaaaagaaacaaaatggtagaagacagactattaggaggttttaattcagcacagtctgaggcagaggtgttcctagaaagatgagtgcctccacggccaggcacagtggctcacgcctgtaatcccagcactttgggaggccaaggcaagcagatcatgaggtgaagagatcgagaccaacctggccaacatggtgaaaccccgtctctactaaaaatacaaaaattagcttgacagggggcacgcacctgtagtcccagctactcgggaggctgaggcaggagaatcgcttgaacccgggaggcagaggttgcagtgagccaagattgcgccactacactccagcctgggcgacagagtgagactcctcaaaaaaaaaaaaaaagtgagtgcctcctgggaactctggatttgacacaggtttcagatctttcagatttttgatcctcgggcagtttgccactccatgtgtccacctaactatccattacctcttcgagtcatattttaagatgctgggttgtctatgttaatgtgcctaagtgtccctttcagaagagctgtagccttgtttatacccacgatgtagcaaggaagcagaattttcaagatgtggattagatttcaagagaagcagtccaagctcctgacttcctcatcactggaaatttcttcccacagtgaaagggcaaggaccctaataactggagccctgacgccattcttccaccttcctcgacattcttcagctggtcacaaacacaattagttagtgatacagtatggaagtgactaacctttggtcaggcattatcagaactgcttcattcaggcttctgagagcacgatgtcacagaattcaaatgtacttgtgcttcttatgtaaattatgagtgagcgtagactagaaaggctgaggcgtgcctgctcatggctgttggctaaaggaaagagcactacaacaccaccggcatctttattattacaaggacgtaaatgccgcaggaccaaaaacctcccagatgagtaaagatgtaaaatgaacatctaatttctctactggtcacatcatgtagaaaaggtcagagtgctactatagccactatagccactcctgcagtgggtgggctttttaggggtaagcaagtgtgtgtgtgtgtgtgtgtgtgtgtgtgtgtgtgtgtgtgtgtgtgtgtgtgtgtacatatctatgtaccttttattcacttggtcctttcattttactttatacaggaaagactgtttttttgtgtgttttgtggattttttttgagacagggtctcactctgttgcccaggctggagtgcagtgtcatgatctcggctcactgcagcctcaccttcccaggctcaagcgatcctcccacctcagccttcccagtagctgagatcacaggtgcatgccaccacgactgtctaatttttgtattatttgtagagacagggtcttgccatgttgcccaggatggtctggaactcctgagctcaagtgatctgcccatcttggcctcccaaagtgctgggattacaggtgtgagccactgcgcccagccaagaaggactgttgcagttggtgtgcatggctcgtatataagtgagataactagcttagggtaagtatcatacagtgagaactaagcgtactatattgaggagggcaagttgctagatatatatctataatactgatggcagcaatgggccgtccagatccccaaggcaacctagtgcaccacccacacccttgcacagctgggcaggacccacttccaggcctggagcctctgccacggcctcaacctccctccccataggtctcaggagcccaccagcacgtggctgaaggtgcagctggggactcctgaagccggtcccaagagcatcaggtttgcttgggcagggttggctggggttgccaggccacctgcccctcacctgccactgctgcagggaaaatgcagagagaaggtgtgcagtgtgcagaacccactcctgggaggcccctggagcccgccactctgggagctgttttgatggggtccggccgcgtcacctgacagtggcggagcagcacggttgggcacagaagggtggacagagaggtgccctgaggcggagctgggcccagggcggtgctgcgctctacacagccggtgggagctgggagcaggcaggagcctcaccctcctgggtgcagctgtggtcactcaggtcggggctgtggacctgggcctccctgtgctctaggggtctagaagcaggcaggagccctgccgtcctgggtgcaactgcagccacccagacgcagccacgtacccaggcatctcagcactctcgggggcctgggaaggccccccatttccccaacagggtcagagatgtctgctcccactgcctggcctctccctgctcccggcacccactccaatcctggagcaaggttggggccgagcccaggtgctgttgcagcctggccggttgtgcgcaccctcgaggtatcacggacacagcagccccctgctgcctcagtcccctccagactttgggcaccaacgggcatgggagggaggccaaggcggggctgagggcagcttggcactggcctgcgccccttggcacaaacagcctgggcaacatgaatggcagcaggaggcagacaggcttctggcaggaggtgggtccctggtgaagccctaccttcaagccagggagggactgaagcctgggagctgggctgctggtccccgcagatggcagtggaaacctgtggtgctttttctcggcctgccatagccatccatggaccaatcacaggcacttcctcccctctgaggcccataaaaagccccggacccagccatatcagaagagacaaaggatgaccagctgacaagaggagctacccacctcagggtcccctctctgctgagagctgaacactcattgggacaacctgcctgcagagaggagctaccctctctgctaagagctgaacacctgtctagacaccctggctacggagaggagctacccactctgggtctcctctgagctgttctattgctcaataaagctcctcttcatcttgctcaccctccacttgtctgcatacctcattcttcctggacacaggacaagaacttgggacctgccaaaaaaacaaacccatgccccttgctcaccacattgcagatgacaaggagagaggagagacgagagaaggagaagagctgcagcccttcagggagcccagactcaggagctccccaagccagggctgtaacatcctctttaaagctctgcggttcctgatgtctccaagcttctgggtgccacaccacattcccctgtgtcagccatggcagctgcttatggtatgcccagtccagctgcaactttgcagggagctagcacacctggagctgcccgccccaccgctgctggcatgccggcctgtgcacagcagctggaccccatgctcgctcacatactattcaccactttgagtgggatccaggcaggtaatgcaagctgacacagcctgccaggccaagtgggtgaaacaaacccagtggaccagagcaaaacccaggcaaagacgccactggccacagaggtttctggctggtgaagcaacaccccaaggatcctgtaacaatactctaatcttactttgaagattttgaaaatactccaggaccatacagtaattcaaagtcattattacaaagaccaattatcaatgtaaagtcacataaatgtataaagtttaagagattggggttaatctacagaagccagatgaatatcctgttaagtaattttgaaaaaaaaattcttgtttttagctatttactttaatggagcctatacatttaaattctccttacctctttttctttagattctaaataataaggagtttattatttaataacttagctttatttattactatgtatttcccattttaatgtttttatataaatcaccccaaatttgttcttagttatatgtccctaaaatttcactgagactgctgtcaagttggaaatactgagagataacttttagtgtctgcagcggccaacttatgaagtaaagggggaatgaagtcacccatggctattttttcaaataatgttgaaggggaaaaaaaaccctgatgactaggtttgagaatacatatttctgttatttataacataaaatcgaagtatatatttattatgagtttatattatatgtattaataaattttttaaattaaaatataaagaagagatattctttctgttatatttggttcttgttcgttatgtcaaagttatgaatgaggcaaaacttcagatttttatttgtctaaaacttttcctccaccaaaataaaatatctcattttactttttaataaaagaaatacattgatgaccaggtgcagtggctcacacctataatcccagcacttcccagagggcgaagaagacggatcaattgaggtcaggagttcaagaccagcctggccaacaaggtgaaaccccatctctaccaaaaatacaaaaattaactgggcatggtgctggacacctgtaattccaggtactcgagaggctgaggcaggagaaacgcttgagcccaggagataaaggttgcagcaagctgagatcatgccactgtactccagcctgggcaacaaagtgagactctgtctcaaaattaaaaaaaaaaaaaatacattgaaagaaatatgcattttgagatttatcaaatatatagaattgatgttttgaaattgaatatgcagatttcaaaggacagcatacacattaaaaaacagaatatattaggaaaatactgttgtatcagtaaaaaagaatattttggataggttcaacctgtcaatttatttcatggagactgaatttatataatgcatacaactatatatatgttcattagcatttaaaaactgaaattcatctaaacagtgaaaattaaaagcatattttactatacaattatacaatatgcgttttaacattttttggaaatgattgatttcaaattaagtcacaagttatatagttattttacaggtgaggcaacattttgctgtacgtttctgaattaaagtttacatttcttatagtatttttatagggctcaaatttgaacacgtgttctcataagttattgcatagacaggtagctggtaacagtagaaaagagacacattaagggatgcaggtaaagtcacataaaagtccgggcaagaaaccagcccttcagatgcctaggtcagcacattttctatttttaacctgctgcattctaacctgcaaatagaactttcttcactaatattgtctgtgctttatcaagtggaaaatatttttaagatcccttaaatgaccaagagctatttagaaatacagccagcagattacctttaaaatgattcaaaaattgttctgagagccaataaggcatatttggtattatcggaagtgcatgtgtgtttttcaactcttgttctactattattattagacctagtaattggaaatgaaatcattagcccatcttgtggttcggtgaaaatatttcctctgcaacttgtaaagatgaagaagaggcttaaattcacccaaactccaaagaataggttagctgtggaaggaattctatacacaagactaaagtgtggcacctttgttcacaatgacactagtaaactacaagatgaaggagaggacagaacttaacatataggaaaggcaagataaactttcttttttttttttttttttcagacagagtctcactctgttgcccaggctggagtgcagtggtgtgatctctgctcactgcaagctacgcctcctgggttcaccccattctcctgcctcagcctcccaagtagctgggactacaggcaggcgcccgccaccacattcggctaaatttttttgtatttttagtagagacagggtttcaccgtgttagccaggatggtctcgatctcctgacctcgtgatccacccgcctaggtctcccaaagtgctgggattacaggcgtgagccaccacgccaggccgataaactttaatttggttaaaaactttagaacaattaatacccaggtttggagcacactacaaaggtctaatgtcaagaaaaaaaaattatcttgcctgcaaaagaggacagtactctaggtagagaataagaaagaaagaaagaaagaaagaaagaaagaaagaaagaaagaaagaaagaaagaaagaaagaaagaaaagaaagaaagagaaaatacaaagaaaaaaaagcaatcagtgtatgtgcttatctgaaaggggagaaaacttcaaaaggagaattaaaacatgttatgagttcacatgaactggaaagcattatggctacatttgtttttttgtgagtaatgataccggtaaagattcataactgatgttgaaatttctagttttattttaaaagaactagccacatcatctaattaaaaatagatcttaaagaaagtgagttaaaaactccataacaatctgctcctaggttaagttaaaactaaaaaaggaaaaagaagtttcatagcacattgatctattttggaaaattgcaaatgaaatatctactacacgtaaaatagctatgtagaagcatttattatataaattaaatgattttaaaggtaatagaagtactatatattttttctagactcaaatagaattataaaagtagaaacattccagttgagactgactgaatgacactgaaacaaaaataccttcaaattgcacttttaataaccttatcctgaaaaatgcagaaaatcagtattaaaaagccaatacaggtgcattatccataactcactctggtgcaacatcagggctcacaaacagaaggactacgtgtcaggaagatgttatttgcagcatctagaaacacctaaagttattttcttgacagagtttccaggagtgacaggtaacctatttggccttcgaagaagaataaaattcaggctgaattcttcttcactagaaaactacttttataaagaatgtcattcaagtaattggagagaaggttttcaacaccctctccacttactgtacttcccctttccagggaagcagagttttgacctaggttttttgccagttctgtattagctgctcaacccaaacacgatacacactaaggttgcaaccacccacccacattttatgagtgtcattcagaacacactaattactgtgctaacaatggtaggacattactaaagtattctaaagttttggttgcttaaatataagaaattctacaacactgggacacaaacagttgaatttttaacaatgagatgaaagaaaggagagtgctgccccctgtgaagtggattccagtggctgcctcggtcagaatcatcatggtgatgatgacttcttatcatgacttctaacggcatttccctcccatcatgtgcacgttttggtgcactgtgttcactctgtgcaactactactttaaatacatgcaggccgggcactgtgctgtggctcacgcccagcactttgggaggtcaaggcaggcagatcacgaggtcaggagatcaagaccatcctggctaacatggtgaaaccccatctctactaaaaatacaaaaaattagccaggcatggtggcaggcgcctatagtcccagctactcgggaggctgaggcaggagaatggcatgaatctgggaggcggagattacagtgagccaagatcgcaccactgcactccagcctgggtgacagagcgagactccgtctcaataaataaattaattaattaaattaaataaataaatacatgcagagagaggaaatcactctaatgccattaatgcattggtgttgaatatctccaggacagcaacatagtatcctcgctagacaacttgacctcaaaggacaactttactgaccaggtgggcctccccaagatatcttcagtgtcagatgaccttgcattatgtttatagtgtcagtagagagtggagttaccttgctcttaatccctgcacctgtcaaagcatcttggatgacttttacatcaacgaagcaaccccatgggactatgcaacaatcaatttactataataatttgtacttttgtacatcaccttcttatttgctgctttttttctctattcataaaatgaattcacctgatataaaaataaattgtgtgggcaaagccaaagtaaataactagaaaaaatgcactaactaaattcatggtaatattatttgcctctggttaaaaatataaaatacataattgttaattttaagttatttatcccttttcaacatttaaaattaccttttaattatattaacatttttgggtttcttttagctgaggcttttataagatttaacataaaaaggctattcttaaataaattcaagtgtatattcaaaaggtataaatagctctataataaaaactggccaatagacattagaatcataatacatgattattacatacatacatgagaacaataatataaaaataaaggttttaagttaatttacagagggatttagactaccagttttaagaattcatcttactaaatataatgttaaattcttgtcattatattcttgcatctggtaaaactagacagttatgaaatttaagaaaacttattcatcttagatattcaaccatttagctacagacacaatgatcctaattataacagtgtttaaaataaaccaaggaacaaaaactacctagatcaaaaccatggacaccaatagattttcaagacccacagagaaatgcagtaagcaagtttagagatgaacaactaaaaaagtaaatgtggtttcattagcttaacattttaaaatagctttgtgaattaattttttcactgaaaactaataaacatcaaatgtattttgaacttgacatttttgataacaaaatcttctacccaatttagctcacagctcttctaaaaacattccgcaattaaaaagctttgtccatgtaacttctactagtccatattcaatgggtttccaatgcctgttaaaacgactggtagcctactagttgcatgttgtacttaccgagagtacagaacaaggtcacctgatagtagatgaggtacataatttacgagattgttttcctttttgttaacctaaaaggtccagaaactcctttcatcctctctgtcccatgcaacttcaggcaccagcttgcactctccctcccactcattggatcattccctgggaaggaaggacatacccacactcaagccaaaatgaatcttgcctccaagatgggctggcagctaggaactctggtcatggtcccatcgggctcacctgcctgactaaacctttttgttaccctccatctctgatctggatttcttaccttacacttgtcactaaactgaggttaccaccagtttctcaaattgttttgtgattacattcttgactttcggtaattatgttcttttatctcttgctttaactacctggactcttgaagttcattccttgacctcttgatctgacttcattaacctcaagctgacttacttgagtttctgacccatcatctgactctcctaataatttaatggtccctattaatgcttaccttagctatccagcttctattctcctccctttgccaccccctgcagtactgagattactagatttattctagtaaataaatatccatttatcccccagcacacctaagtaagttctagcaggaaaataactacctgcaaaatgttgaaagagaaatgcatgttgccatggatacagactatatttatgacctaacctttattccatgtagttccaaagcaaagaactagccaataaggaggcaggaacttaactaagaatgtgatccaagaaatcagaaactacatattacttttattagaagaaaattatataaagtgtttttgtttggtttttgttctttgtccagtaaaagatgccttgaatatgggtatatagcatataccaatttcatgtcataaggaaagaatttttcccagtcctgtgtgattacaattgagtgtatataataaagtagatgctgttgattaaaatgctctgcttaatacaaaccacatcagttaaataatactctgcatttcaattctacatttcagaaaaccattatatgtatgcatatgtgtacagatattttatttgcttaaaattttacaggtagcttcacagagttatttgaaatctttataaatatgtaggtattgtcatttccattgaaaatgataaaaatgggtgctcaaaaagatgggattaaggtatctgctttagttcacaaatcttgcaagtaggaatcagagttgacacccataccttctgatttcacttttttgtacttttagacagcactgtcttttagttaacaaaagcttattgctctagatatcatagaaattatttacagaggcttagattccagtgacgagggcactttcttaaatttttaacaaaatctttaacgaccattattaattttgttttactttatcaacaattgccagctggaccaataacactgattcagctaacatgtcaatacaaaagaaatccaaagtaacattagtgggaaaaagcacatgttggtttcatccagatgaaggtacttcccatgtattggcaaattttctctctgaaataatgtcattttattaaagcctgtaattttgcttctctcttaaaattttattgcatcataaaattacatttcaacaggatgttcaagatttattatgaaaattttgactcaatctgtctttgattgattgccactaatattttggttttccatgcagtttctatttcttacagcatgcttcctaatccttctattagatttgatatcttcaacttactacccacattgtagacaactatattacaaggattatctaatgtattctctatattgacaaaactatgcctgtaaattattctttacatcgtaatcaaaaatgtgtcaatctttgttaaagtatctatggtttccctatgctaccttaactgttcatgacagtaattacctaaatgatacttatccttgtcttcttaaccctaaaatgtatatacctttgttccactgacagtagatatatcttactgaccattctcataagaacatagtaaatgatggtatcaaaaaatgttttacagaaggcaagatagctgtattccaaaacatcagatagagacctaaaatgtcttttaaatatctccaaatttctctgaaaaaaaattgatgatgaattatttagtcagaaatttgtccaaaccacagaatataattctttggaacatatcaggaaagttgacacaaatagaaaaagaacagttagaccaatgcattgccaaaagttttctttacaaactttttccactgaatgtttgttttaatttaaaaatacacataatcaaaccaagtagtatagaaatgcccttaataaaaccattacattatgacttatgactacccatctgcaagtcactccccagaggcagacacattttattctttcagttatctgttttcaactctgatgatcgtgaccttaatacctttacgtacttcataaattaatttattcacaatccattgattttctgctataaaaaatatttagtttacttacaccatttactctttttcacttcaaaatacagttgtgtcacaatttttaattctcttattggttatttctataactttcaatagaataactaaactttcatttttccagaaattatgtagcatcttttaattcctcacttcacgcaatgagaatattagtactgcctaaacttcatttggcctattcattctcacaacccctattatctaaattttcacttctgttacctgcactttggttaaagttggaaacatttatgttgtgtctgtaaccatgagtatattttctatgtttcatgtataaactgatttcaaaatgtgaaatttaatacgtagagtctaatcattattcaaaacacaaccagataatatgttacataactacaccttgtttctggcagttttttgtttctcctgaggcttctaattttcttctttctcccttgcattttctgcttttactgcctcctaacattgttgagaattctcatgaatagtatctagagtcttcttcctcacactccacttctgttccaatctggactggatgttctttccagactcactgcacagctatactgtgcaacttttctcttctcttctcctggacaagatccactgttcaacgaatcttctgtatttctctttcatatttattcctccattttatttaagaacatccatacaacctccaaagaaatgcagaaaataaactttccaaatccttgcatgcttgtaacgtcttatccaacctgagatttctatacaatattgaatattggcttatgtatagaagtctgacttgtaatttttccttttcatagttctaataaaggcatttttctcttttaccatttattatttgaaatctgatgccaatctatcttgttcctacatagaggacctgattttcctctgggagtttttgggatctctcttttattccttctgttctgaaatgtagcaatgatatgtggagacatggaccttttcttttgtgatgctggtacttattaaccttttcaacctatagacctatacccttcggccctgtaacttcattgacttcactatcattattatgtagctaattcctccactacattttctgtttcttgaacatcttggattaatcatcaatgtcttagatttttgaaatatatttttacactctatttttgtctctgcttgttgttctgttttgtgaaaaatattcttgatatcaattttggctggcctttaaaaaaatttaatttctaagagccccttcttattttgattgttacattttcagagcagcctgttcttcttttatgaatattatatcattttcgatatttcagttttgctttccttaaatcttcttttttgtatcctgaggttcttgttttttctctgtgatcatctgtttgtttagtctttctcatgcctctcaggccagccttaaacttcagataatctgcgattatctgttcctattcaaggcagtaaaatgcagatgagaagctctgcacgtgtgtgtggctagagtcggcttggtaaggggtttactgcctgattgcggcccagccctctgtctgattgcagtccagctgcaattcaaatctaatccagttttcccaccttgggctttctccaaacccagggaagcctgctaagcccaagtgcaggtgtgaccaggaagtacaggaagaggcaggaagtgcagggccatgcaggaagaacaagtgtggccaggaaatgcaggggcagatgccctttgggagcaccctcaaacacaaagagctggaagtccagggttaagtgctgtagactccctttctttggtgggacaactctgtgtacattctaaaagattacccaggggtcctcagtggaatggagtctcccttactcttaaagtagtagcttgctcaaggaggcaccctttatttgttgttctcccttttctgtctcactctcctcattccctcacttcagactcctacaatttgccataaatggtctcagggactctatttctagaataacccaaaactaagacaataccatgcaaactgaagctcttaataaggttctttgtaacactatgtaacactatgtaaaaaccctatgtaagaacactatgtaaaaaaacactatgtaaaactgcaaaggaaaatggtaggctgatttctatgaatatatctagttatccttcattccagtcgatttctatggccattagtttaaaaattagtaggcatgaaattatgtgatgtgatatgagatgtacacatatacacaatggaatattattcacccttaaatttcttcatatttgtgacaaaaatggatgaacctggaggatattacgccaagtgaaaaaagccagacacagacagacaaatactatatgatgccacttatatgtggactctaaaatagtaaaactgatagaaacagagaacagaataggcaactcctcattccagggagcattgggaagtgttggtcaaatgatactgtttcaattacacaagatgaataagttctggagatctaatatataccaatgtgactataattaacaatactgttttgtatacttgaaatttgttatgagggtagatcttacctgttctcattgcaaaaaaagaaggaaggaaggaagggagggagggaagaagggaaactgtgagatgtcggatgtgtcaattagcttgattgtggtgattattccacaatgtatatgtatgctaaaacatcaaattatgcatcttaaacatataaagctatttgtcaattatacccccaatgaagctgaaaaaatgatgaagcaaatatacacattttttaaaagtctgcttttagtgacctttaaccaatttagtgaactgctaagcgaccttgagtaaaacaaaatgatatatgtacaaaacaaagccaaccataaagacaaaaaatgggacaggcgtgtttgggggacactcatcagttaagaacagctttccaccacttttggaggagagaaaataggacaatatcgaggtgttgaggaatggaacatgctgtgaaagccggaactagtggggaggcttcagcagatctaggagcccatttagctatcacacattctcaagaggctctgggctctggtactataaagatggagaaaacagtgagaagtgaaaataaggacgagcccccaaaagcctgcatacagaggggttggacccaccccaacctacagattgtaggcagtccaggtgaaaaacagaaggctcttccctaaaaaaaaaaaaaatggaatgaacaatctgggaaaacccacagcttctagtatggcttctacaaccccagaataaagcctctcttcattccagcccttaaggggcctgaattctaacacatctattcccccaaaaccagaactcactctaaattcccactcagggagagatatattgggaggagggacagaaaagaaactccatttacacaacaaatcactatcccatctgcgtaaactgaataatgcatccctttcccaaaatgttaccttatatgtgaaaagggactcagcaaatatgattaaatcaatgattttgagatgggaaattcccctgaattatgttgtaggcccaaggtaatcgtaatcatgagggtccatatcacagcgaggccaggaatgacagggtcagaaagaaggcattgtgacaatgacagcaccaagaggacaggtgacatgacatagggctgcaagcaggaatgctgtgggcctgtagaggctggaaagtcaaggaaacatacttttttcccctggaacctccagaaggagccaaggcttccaacaacttcattttagttttgtaagactaatttcagatttctcaccttcagacctgtaaattaacaaatttctgttctttccaggtacaaagcttgtggtaatttgttacaatagcaataggaaactaataccatttccctttcgtaaatgtgactcaaaagcaagaatcatcgagcagataagaaaagccaagacaaataactatgaaagataaacagaaaaaccaaccctgaaggaaagagatatttcagagaatagaacttaaaaagcagtctaattcataaacttggaaagaggaaaatttattatatttattaaatgaaaacaagatgctctgaaaaagaaataggaaaagtacaaacagatcttttcaagtttaaaaatatgattccagcacataagggaaagcaaatctaaaaaaacattgagtgaaaagacaaaatgaaaaaaaaaatttgcaaaaaaaaaaaaaaagtcatgcaggcaaatccaggaggttcaatatacaactgacagaagcccagaaaagacaataaacaacaacaaagctaggatagaaaaattatcaaagaaatcatccaggggaattttccagacatggaaaggaacctgtaccaagtcacatcaataatgaaactttagaagcccacatattttgttagatttatttctgggaaccttgtggttttgtgctattgtaaacggtattttttaaaaaatatgttgtatattgttactcatgtataaaaatacagttgattttgtatacagaattgattttatatctagttattttgcctaattgttaatagatttaggaactgtcaaactattatttagatgacctataataacaatagttctgtttcttgatttccaatcttaccttattttttctcatcttactatggagacagggacttctttaaaatatgagataaagtcatgataatggatatcatcacgatttctgttactatgagcaaatactattttcaagaacatatgtattaaaaacaggttaaaaaccaacaaacatcaaatttaaaaaatggggggggctatcttatggaggcagacaatgtgctgaaggcagtttccattaattcaactgactgtgcaagctatgacttctttcttgtaaaatgtgatgactatttactatcaaagacctttctaagttaggctcatggtctcttctaaagaaggtagcattgtctgctttctgagttccttgtctgctaagttccttgatttagagttagaacataactgacagaggcaatgaaccaccttgtaattgtgaggtgtgaagacgtgctctgaggctggggctagctcacacctctgaccagagtatggacacatgtggccagtgctcaacatcagttaaacgtctgaatgttttttattcaagcaataaaatcttttgattgttcaacctcgggtctttacctaataaaggagcaacacttattaattccaaaatgaactcaatttcaaatgagaaagcctataattatgataaaaacacaaaaatgggccaggtgtggtggctcatacctgtaatcccagcactttgggaggtcaaggagggcagatcacaaggtcaggagatccagaccatcctggctgacgcagtgaaaccctgtctctactaaaatacaaaaaattagccaggcatgctggcatgcgcttgtagtcccagctactcgggaggctgaggcaggagaatcacacttgaacctgggaggcggagtttgcagtgagccgagatagcgccactgcactccagcctgggcgacagagagagactctgtctcaaacaaataaacaaacacccaaacaaacccccacaaaaatggaatggaaagtcaaacgctctctggaacatggaggaatgctactttttttttatagctgatgaatttttcctttttcatcatttttatgagaacaggcacagccaagttttacacattaacttcagaggcaaagcagaaaacaggtgtgtgtgtgtgtgtgtgtatgcacatacacatacattcatgttgcatgttttccccttggccatcagacatagcttcaaacaaccatcttattattttatcccttaaaagttaatttattgccttggaaagagctaaagaggtttctgaagatgatctcagacaatcttttgtcaattaactatcctcaattataacatcatacccactggacatggataaaaagaacaagtgatggctctgtggtacagcagtgccccatgacacaaataccacattcatcctcataatgacaacatgccaatggtataagagaaatatctctaaatactgaatttagtttatgtaccagagaagtacctaaaaagtcaaaccacatcaatctcaagaatcactacaaggagaccacaaaattaaaagcattctctattctgaactgcattttgaggatttcaacataaactttggaggagaaattaaaactgtgtaggaatactactgttccctcactgcggaatcagtagcacaattcactccttggttgattgtggtagcttttagcaaagaaggaaatatgggacttttgactgtgttcctgcttttcatggacatggtagcctccacagggagaaattatatggaagtaaaataattttgtacttactgaaaaacattaaaggagtaataaagggggaaaattatactcgttttgactgaaactaaagtccacaagagcagtgcccacagggcatgcactactgaaaaacagaacctcccttctgcctgctgcctgctcccagaatggcctacatctccttcttcacggttgatctcaactgattacgtctctaatactgtactgagcacataattttatatgtatgcttctttgccttttgccccttaggattaagtgggtcttattcattttggcatcttcaacagctagcaatgtgcctaaaactaagaaggcccgtagtacatgttgggcaaatattctttcattttaatcatattgccagaatggttctcggaaatcattattatttggagatttaatgaccatctctgcatattttagaaatctgagggttaaaaaatatgatatggaaacaagcaaagcccagatctaaagcaatctctgcagcatagttcaatgtattgatttgtgttccctcgttcactgattaagcatcggcacttgggccaggtgctctagtaggttattgggattcaaaacagacaacatatagtccctcctctggaagacacaaacatgcacaggataatgacattacagtaagtataggcttatgttatacatatgtctttgtcactgtatgttaaaaattttgtgagagctcaaagagatgagaatgataaatacactggcaaagccaccatccactgaagaggaaacaaacaaaaccaaaacactaaaacaagttggtggcttctctgagagcacagcaagccgtgagcctccttccctgtgaccctactcaactcttagtttgactcctcaaggggcccttccttggcttttctgtggctctaattcatcagtgaatctgccttcattaatacagccacatgcatatgtttgctgaggtcacagtctgtactaggaaccttttaggcatagggtatacagaagtgaggaaaattagtaaggtctcttttgtttcagtctctgggtggaacaaacaaatagaataataaatctgcaatttaaatggaaaaaagtgttatgaagttcacaaacaaggtgctctgatagaacacagcaaaagaagatgctgggaaggtaacaattaggtcagatcatacaaggtattgcagctcatgctaagaagtttacatatatatatatatatatgaagtgtatatatatatacacacacacacttcatctatatacttcgtatatatatgatgtatatgtgtgtgtatacacacacatacattttttccccaagacagagtcttgctctgtcacccaggctggagtgcaatggcataatcttggctcactgtaacctccgcctcctgggttcaagtgattctcctgccccagcctcccaagtagctgggattacaggcatctgccaccatgcccagctaatgttttgtactttttttagtagagacagggcttcaccatgttgcccaggctggtctctaacttctgacctcatgatctgcctgccttccttggcctcccaaagtgttgggattacaggcgtgagccaccgtgcccagccagaagtttatattttactctaagtgcaagctatgaaaggattttaagcaggggagttttctaacccaatgtacattttgaaaaagatcatcatgtctgttgagaaaaataagagataaggcaagattatcagttataagattacatagaggcctggactagaggagtgggtggcagtgaataaagtgaatggattggagatcaatttgggggactgaatctatagaatttactgacaggttaagagaaaggaaaaaaatcaagaattatttccaagttctgccttgagcactgaatgtacggtacatagggaggttgggagggagaggcttcagttctggacctatgaagtttgaggtgtttgtgaacaagctaatagaagatgtcaagagcacagaacacagatgagagacgggaacttgaaggttattagcatatagttgttaaggccactgaaatgcaggtaatcacttaacagaaacatgaatacagaaaaaaaagtgggggtagactccagtgttcaacgtgaaacagaggagctagtggagaaaacagaaactaacgtggagaagtagaagtggaagaagcaggaggaaaactgggaagatacagataatttggtaagacagcatgaaagcgttatttgcagtgatgaatatctagctacctggtgaaaagcaatgaagactagctagtcagggtaataaaaaagagggaactaaaacagaattacagagtgaacagaattatactgtgagaaatccaacttcttccatgtaattcagtaaactcttacatatctacagaaaatatgtaaggagtaggtaaaatatatttcctgatacatcctatacaaaagtgtcttatttcaggttttcttctaaagagggaaagacaagtctatgaaacattctagaatatgaggtaggctatagacagtcatctataggacttttcccaacagttaatgttttgcaaatttaaaactatacatattcggaatttattccaactatagtttggatattagtttgtagtttcttttttttttttctttttttttttttttgagacggagttttgctcttgttgtccaggctggagtgcaagggcgccatctcagctcaccacaacctccgcctcctgggttcaagcaattctcctgcctcagcctcctgagtagctgggattacaggcatgtgccaccaccctggctaattttgtatttttagtagagacagggtttctccatgttggtcaggctggtcttgaactcctgacctcaggtgatccaccctcctcggcctcccaaagtgctgggattacaggtgtgagccatcgcgcccggcctagtttgtagtttcaaataaaaatcctatttgaagagcttgaaaagaatgttgtataattattaagtctgcacaattaaatggtacctaacctcccaagtaaatggaagaacgatttttatattctgagaaatagcagatttctaatataaaagcaggtgcagattatcttgagaaaattttctaatggattgagattatttatactgatttatatttagaacattaaaaattatcactttttactttaaagtgaacttgggtttatcttctaggtttgtaatgtccctaaactactcattcagttacttaactatttggctgaagataatatttatcattcaacagcaacagggcaaagacgatgttgaaatctgctttcataaatgacttttttccagatcaatagcagagtaaggggaactattttaatgcaaaacaagtcattgttttaaagttatgttgttttcctttttaaaaaaaaaacggtttgaattaactgcctatgcttcattaccctgcaatgtacttcaacacatttacactgcaagaagaatatgtaataaaagagaagctgcatcttcaaatctttcttgtcaaatttgaagagacaccaatcaaccaaacacctcactaatagtcatgagactgctgttttaattagctggtgatatttctgactaagactctcagatgatgaaactgtttttccttgtattgaaccagcttggcccagactagcctgtcctgcagtgacaggtatattgaatacaaatcagacagcacagctttaaatctgtgttgcagctctcatttccaattcgagaactgtactataatcataagcttctggtggatgaaaggaaatcagctctctgaatattagctaatgccacatttgcaagtcctgaagagatctgtgctgttaaaaaaaatagatcatttcacgtgaacctatatatatgaattgctttgtactgctcaactgatagaagcaatgcctgtgctgggattaaacccttttcatcataaaacctcatctggttcggagtccaagtccatcaaaccttttccctttaaagtcccgcctttggttccacatcaatttattcaaaccgcagctgggtggctgaaaacgaaaggacagcatcatttaaaccaaccatgttcctaacttgaaagaggggctataattaaaaaaatgggcataaaagaatggaaatgggataatattttttaatggtagttcaaaggctgacagatgtcagagcctttgaagatgtcagtacactgagtaagaagttgccataaaagagcttgccagagaggtgaagcagctttttaatggctaaaaaaacccttgcagacacatccttgtgtttttaatttgtcagagtttctgcagtattttctgattaatgacacatgattataacggcatagcaggcatatttttatacttggttaaatgaatagtttatttcacattcttttagagctagataagaatagggacactttcctaggaagtccaaaactattctgattgattgacatatttatgctaattttgtgggactggcccaattcggaattactatatgttgccagcttttgttctttaatagtctgtttgctaataacattacaattcacatgtggtagttaaaatgcaattcactacagtttcattcttttcatgtacatggaacaatatgtgcctgaataattaatttgtgcaccaagtcatgtcaaaccaaattaatgttttaagacattcctgagctcaatctacacaaccgcgggctgccatagggttcagaagagaaagggttgcttaggggaaaaaaatgcagctataactataatataacattaatgcttactcaaaaaaacgagctggaatactatgtgcaaaatgctgggggacactcttctaagatttgggggagggacttagagtatttccaaactatatgcccttctaaatagttctaacatgtcaatttgatttgttctgtgaaattgccctcacaatattcatgaatgttaaccacaagtctctagtgagtagtagcaagaaaaaaaaaacaggtttccccaccaatggatatgcctgtaacttataaccatgatgaggtgcaggggagacagagttcatggctttgaagtgagacacattcgggttcacatcctagcccttgcacttcagagctgcatagcttgggtctgtcttcccacctgtaaaaactgagacaatacataagtgcctcctcccagaaagcatgtgaaggtgtctagcacgtaatattgttcctttctcaaactacatgatatacagaaaattttaaattaggccattttctgattgaaaatgtttatatatcacaaaatcacattttaatgagaataaccattcttttaaaagtggatgttgacatttcccaccgcttcaggaccaatagattttaagtactgtctccatccttatgttgtaatcttatatgaccatgactggtcaaacctgcaagcatacacctgtttgtgtctgacatctaaccttcagcccagtgctacaagcacacccatggaagcagctcagcaaatgcggtgctagggctcaggcagggatgcaggagagagataatattctcacgcaagatcaggcaagagacctaggaagcagagaggtggagtaggcagtgcccccaacccagagagagcagatcttgcagcaggcaggagccctgcagcctgatcctgaagaagctgacctgcagtcctcttgccacccctcaggctttctctggaaacaggagcatcttggggtttaccttcctcatggagggggtgtttcctctttcaggtctctatgtgactatagttttgtatcactaacactggggacaatttcaaagcaggtaaagtttgccttaagcgtctttctacccccttgtttgcacttccctgttttttttcttgccttgctccaacccacctccagatgtccacgtcttccaaaaactcccccagggcatcccaccaggaggttatcttccggcaatatcactcttccttctccctttacagtctttccatacatcagaactcccatttcttgagtgtaatggatttcagcttgatgagagcaatttaattagaaataatttcacaatatggtacgtacaatagctattttcctgcccaattcaatgttgttcagatcttccctttgctatgaagactcccccgtttccttcaggcaatcagtcttctggcttggggtacagggcagatagcctttatcctacttatcatgctacatccacttgctaaattttctgctaagaatccttgcaggggaggcctttgtcttgtttttgtatacctcctcttagcgcagtgactgctacacaaaggtgttcaacaaatgaaggaacaaagagatcaatgaaagaagattcaatttcatctttaagatgatcttttttttttaccatatatcattattcatttaagttttaatactgttcaggaattatctattcaggtatccattttactgtatatatttatccattttgaattttggaatgcattcatgagttacttattcaaggcaaatgcattaaattaaaatcaagaaaagggcaagcaagagacagaatgttactcagcccaaacaaattctacttagagatacttcaagcaatgtaatggacagattccgggcacagtaaagtatgtggggtaggagcattcttaaaaccgagtgactcagtctaggaatctgggcattttagaggagcttccatgcagcttgtggttggaagctccttatctcccattagctgatccaagatatgttctcccgctgatcagctcctcaaactcttggctcttagataggcccaggcaaaacctattccttttttcctgtcagaattgagtttgtgcttcattgggtgatcctgccagttaatccctgcttccctaggtgaggcgtgaaggctttcttagtacctaattggcaaagttctctgtggacatgaaaccttactggtctcaggagcaaccataggactggagatgctggactggttgggtgttgtattgatcctccccatatcactaaacaagcccggtttactgctgcctgaaaatcatgcctgtgtctgtcagtaatggcccgagttgcttccttcaactggatctcgttttccacctctaaaatggactccctgatctcacagcccacaaccacttcagaattaggtgagaaacagccagtgttcatggactgctgttcatttggtgtagtagtccatttatgtataaccacaattcacaactcgagaaaataaactaatattgacagggttattcagaagcatttgcccattccaaattctcacaataatccacgagttaggtattattgttacttttttcctggctcatgaaataccactttctcatggttccctgcctctctctcttgacctaccttcccactttcttagtcttcttgtccagctctatttccttcaccttctctttaagcagtgtgtctcttcttctaattctctttccctccataggagatctcatcttcactgttggtatccattaccctccatgctcatgattctttaatcttattttcaatagagatggagagctgtcctttgaagtcagtcctatacttctgcttgcttaagtagcatcaacacataaacgtcctacagcatgtcaaaccataactcaaggtctgctctctctccctcactgccacatcaactttccccattgtcactgccttggctaaggccctcatcatctctcgcgagggtgactctaactagtcacccaggctccagtctcactgcctgctaattcttcatcttctgcttaaaattctgcagtgactttcgattgttgacagttatggtctctaaacttttttgagacactcctatcataaaatatacagtgcgcgtatatatataaatttgtaacactattaatatgttaaatacattatacaaatttgcacaaagtaagtatttttaaagacaaaattcaaacacacattaacagaagttctgggttttttctttctataccctagtgaaccccacttgggagaacactgctctaaataattactaagtgggataataagtgtaacaagtggaatattaaagtggaggaatggtagaggcattgcagatggcagcacagacagtataaaccacaaactggagatcactggccaagcggacccagtccgaacttctcaacatggtacgtgttcttcatatattaatcatgctactctttctgtttagaatgctttttccattctaatttgcagagaacatttcagtcattttttaaaactcaaagcatctgatgtctactctaatggaacctcttctgatgacctcctcagacctgatgcccccacatcccataacttccatctctacttttcttgggatcaaagcttcattatgactttgttgtactttgctgtaactctggcaggcctgaagggtaagtacgctagagtaggccgcagaatataaccttctatttccatactccctctgtcattctcagaaagatgctggcattgtcaccagttacatacctggtggacaggcaggtgtacagtcaatgtttctagacagtagaaatggaccaaggggatattaatctccttccataccaaagaatggtaaagaacattccttaaagggcctgattaaatcatcacaacaatccggtgatatcatcagcaaagggtgccttcataacaatgtgcgagcgaggggagcttgtccttctgaccagggttattgttactgtgtctcctataccacgcagcctttgatgtgtggtaagatgcgtcctctgtctacgttaaaggaagacattctttactcatatctgttggtatgaattatagtattctccatttatgacagatgcacaatgcctgtttccccatagactgtaagcttgagggagaaaccattccttttttatatacgtaggtccggcataggggcctggctcatagtaggagctcaatgaatgccactaaatgaatgaatggatatcacaggtgtggaaaatgatgattgggggtattaaggtaattagctaatatgaactcaggtttatagagccagtaaatgatagagactggccatgaaccagcatctctatcttaatattcaataagaaattggtaattgcatctgggcccatgctttaattattatctatatgctcagttcgcatctctggaatctcaacctgcatatccaactcgctgtctgacacacttccctctggatgtttaacatgcagctcacacttagcttggcaacaaaagacctcttgcttttgcttctgttccccggcaatcttcctcgtatttgacaccaccatctatacagctgctcaaaccaaaactctaggagttactcgtacttcttcttcccctcattccccacacccaacccatctgcaagtcctgctgcctcacatacgcatgccatattggcatctaggactgttcacaaacagagcgatctgtaaaaaacatgaatcaaatcatgtcaccttactgcttacagcctctgtcttcccatcacatttaaaatgcaattcaaactcttcaccagggcttaaaaagccctgtgtctgctactccctgccccctttctcatacctgctatgctcatgccagacaggtctcctttttcatttcaagaacacacaaaacttattttcctacagggtctctgcaccaattgttgcctcagtctggctggcttcttatcaatcagatcttaaatgagatatcttttctttggagaggcgttctctgatggccagctaacacaattgtcactgtatcatatctctcaattttaattctccacctacaagttattgctatgtgatactctccttgttaatttggtttttgtcttatgatctgtcttccccaatgcaactgtaatttcctttagagcagagtactggtctatcttgcactgggtacaggaatacccttacggccatataggccatgccctgtacaactctggggcaacattcacataaatcaggatgtgaaaggcacctcctaaaggtgtgcatgcccagccctagggcccggcacagggtaagcactccaaaattcttaatgaaatgaagttgaaaaaagttaatgtctgcctcatttttggccagcaaacttacatggaaataaatttgatttacatattatctgaagggtcataattataaaatgtccaagtcacagagttccatgtttttctatattaatttgaaacaatgagatctcaaaaagcaatcaaaacagttaacaataattatgatttttcttgagatttactctactactcttgttcctgaattgaataatgtttttacgaaacaccaacattatggcagtagatgatgattttttttttttattgtgtgccactagaaatggttagagaggtgacatcacaggagcgcatttccaaattttgccccaagtctgaaacatctatgtacagtccgggctttaacaggggagcctggaacacactgcagctcttgaactcatggcatttgtctaacgacagctttggcagtaattggtggataagcagtaattggtggataattgaagagcaaaagttttcaaccctcacactccacttctcttgttgtgcctgtcaatgtcactataactggagctatcattttagccaacaagtgaggataacatttacatttcaaaaaattagcttttcaggaaacatttggtgaacacatgcattttgtacattaaatgacatctttgaaaataacgaaataagtaaggtcccacttgaccctagggatctggggtttgttttcgtaataaatactgacttaaggagcaaacttaagatgaatgaatcaccactttaattttaacctttttaaagacctgcgactttcaggtctttccactggaaaatccccttgttttaagatggtgggcctggctgaactactggatctctgttcactgaaggctcttctgtatcacagagccacagttatccagtgaaacgacacacacactcctcgagactagtgcagcattacaactgtccctacaaacaagggaagagacctagatccaggtcacatcattcagcacacttcaatctctgaggacaccattaactcatattcaaatgtgactaatactttcagtattacttgactaatacttgacttcatacctaagcaaaacaaataaaaataaaccagaaaaataacacattttcaaaccctggaagtctaattgtgtattgtttctttgtgatttcttatgatttttcccaacctcccaataaacaaatatccaaaagcactcaagagatcaagacgtaatttaaaataattattaaaacaagtgaaaaagtataattttccttgaattttaatatttgtttcaactaaaaaacattatctcaagttgcacactaacctactgattcaatacttgggggctcaattcagcccatttttattatctaaaactttctacttaatgacaatatttataaaatattttctgtacacaaatattacaatagttcgaaaacagaccattattttcatacagtgctgtgttctcttctccaaataggcatttaaggtctccctgacaccaatttgtgacatttttgtcatgaaaaaagctcaggtgttaaatatctttcatatcatgcaagtaggcatgattccaattagtcctgaatgggagacaaaatgacagtttaataagcttcaatttgccagctctttgaacatttgatgatatcaccattttgcccatcatttcttgcactttggcttcaacctctctgtcacaaaaaattaccacaaatatacaaatgaagacatcagggatgtctcttacagaaccgattgagtcagaaatccaaaaatgacttttccaagacattaaggaagaagagttattcatccaatactttctcagagataatttctgccaatattcctagtaatttcttcgaggcctaggtgaaaaggagaaggaagagtaatatgctaaaaataactcaaggcatatttccttatgtcaatggaaatgacattctgcatgcagaataatgctttttctctggagtatttattttagaaaagaattcatcttaaaagtctttactttgagcaaaatagctctaggatgaagctaacactgcatcaacataaattgtttttgaggagtctagaagaaacacattttctaattatacccttgtatcggtatgaaaaaatctccaggtttgaacttcataatccttgacctcatttctaagtggcttttattggattctgtcatgcaataggatcctcattcaggttcctttaggaaaaaaatactaacaaacattgaactctgagagttaaaatttcattctataaaatgaatggatcatatgtaatattccaaattagtatgtgaatataacaaatatccacagatcataaaccattcacaaaaaaaccataccttaccactactaaatgcaaattcctacgctgtttttatcaagactggtaggcctcattgacctaaaaacttggtggattcttactctgggcactccttcttatttcagcaataatgtgaaaccaaaagtgaacccatttcaaaatgtactcactactcactgttctattctacaaattctgaaacttgttggaagaaactatattccgaagaaaatattaaggattgcatatctctttagagtttaatttacctcaaaagaaagacatagtcatggcttgtggtcttggagaaagagtgaaactaccggctaatacttgatttggatatatgtagtttgaattatgactatcagtattttaaatctattaaggtagtgacaatccaaaattagcaatataatggatttatgcagaataaataaaattcagagacaatgtgctcatacactagcaggcatatggggtagaggactttgctatgagttgggcaatttatttatgctttctgaatctttcttcattggtaaaatgaaaatacatatagtcatcttctgacccaggtaaaaagatcaaaacagagtttctagataggaaatgtcatcctcataaggtattaaagggttgcataagagaatgcaatgcaaaggacccagcagagagcttggcacatggaaagcacaccataaatacttgttgttgttgttgttgttgctgttgctactgctgctgttaaacacatacaaacataaaaactcagtgttgttggaggagctactacatactcaaactggatatcaagcagcattattcaagcattattatgactttgaagcaacattaaatatggcaaatcgctgaaagaaatgcaaactgctatgagaagctcagcaggggagcagagtaccagtgtctctctctcccacaccaggcaaagattcctatataatcctgttccttttttgccatgtccaagtctctccaaaaatctaaaatctttcttggaggaaactatgatagaaagagcactaaattcagattaagaagccctggtttgctagttctgtgaccttaggcaagagattgtccttgaatcataggtttcttatctgtaaatggaatacagttggatgtggtcatctctttagattactttatctgactatcctactgctagatacttacacacctgatataactaaaggcttcatgttggcagaacatatggtatacaatgacttgtggtcccttgcaaccctcccagttctcaccactgcagtgatcatattttactccctatttaaaatctcttccatatttaattacctcttcttcaagaacaattttaatatttctaaagaaatccattaaatataatgagaacaaaagatagatttttaaaacaatcattattagttgacacaaagttactaatgcaaatggaatactttatggtattatttagaaggtttgtctttaaaagaaatgctccctatctaaaagtggaccaaataccacagaatgtagtttccatggtaactgccacattttaaaaatatgcacaggactaaagatacactgtatcttctacaaatggatcattcttagagcaatcatttttcttgcctcatcttgtattttttgctttttaaacaatataattttctccatgatgagggcaaagttaaattgtttataatagtttaatcacaggtatatatacactagttttatgccttcaggatgaaaacaattacagaactttagaattataatagaaaaagaaagctggtgacctacacaaaatgtaagctttacttaaagcagcattttcctatattttctgctaactaaatacttaagaaatagtattattttacttattaatttgtatagtaatatataaataatgcaaatttattattaaattcacatgtaatactaaatagacacaacattattgcatactaatgaaacatgattttcacatcagtgcatccaagccaaaatatgctgagaatttttgccccctctatttggaaaattctgtatgacctatgcttttggtgtcagaaaaacagcatctcccccacacacttttttaaatggcctagttatgaaaaactctatcaatattttgaatatatacagaaagttcctgggctatcttaaatacggcacttagataatatgataaaacttcatctaaagaaaatagagaattgtaatgtgtggttttaccaggagtccaccaaaagtatcttattttctttttacaaaattaaagtgaaataataaaaacttttcccaccaaccttctaatgcctaacattaaactttgtacattgcagtaaagcccacttaatacttaaaacacactctgccctctctaatacaaataactcagtccatcaggggatgagtagcacagcttggtgtgtacacagctggaacaccaggccaccactctgatgtgaccatgtgtgtcactagggagaagaggggaacaaaaaacagggttacattaacagcaacagcttcattaggctgggggaaaaatagagtttacatagcttggtttttccaagcaatcagtccagtttgatccaaagaaacaaaaatatatactacctcaggaccaagcaaatggcattaatggataaatattagtgatgaaatactattttggttatgcaggtaggatatgaatcattttaatacaggtgtaagtatcttttactcttggagtgaattatcatttgattttataatttctttttatagtttttcataacaaattcagagacaagaaaatcagatataagaaagagataataacacttggaaattaatattaggcattaactcctaaataatttctaatctcagctatgtttctaatttctacttcctaaagacactttgtaagtattcctggcacagtgatgaaacaactgtcctagaatttgctaggctgtgacttaaaatatactttcttatgactcataatatctacaaaattatatttcttaaagcactttgttttttgatttgagaataataatattctcaataaattaaaatgaaattttagcacattaaaataaaatctagtaattacattttatgaaagtactaaagaatctaaagtttccccaccagattttatttccaatgttttaacatatggaaaatatcatcaattatattggtcaatgtcctttatattaagtctaatggcataaatttctctcagaactgagaactagaaaaaaaagaactgctatgatttttgtcattacataattagaattatacaattcacagcaaagtttccctctttgctgtggcttccaggcaagcgcagagctaaaatttccgcttaactgtaatattttttcttcagtatagattttctaatgtggtgaatataatttattgcttaattattttcagttattttaagtgtatgtttattataaaatgctgctttagatccttttgatagtagctggcatataaaaaaattaaaatgttttcactagaaaaatgctaccaaagaccaaaagccatgtatgtaggtataacaagaacattcagactatacatattgttaaatttacccttcgagtaatctttaaagaatgatagccaatgttcaagcccctggatgcaggcacacactcagtttataaatggagatttttatcttgggcccaaatttgcaaatgcatggaaaatcaggtaatgcaactgagatacaatttttaaaattaaaattgtcctatcaatatctttccaggaaaacttttttctaagtagaaaagaattattacaaattctacatttcggaatcagtgataagttcagctcttaatgtgaatcactatggcaaaatcaagataatctgtccatttattatgtaaaaattgttcatattagatttatgatgctcagtgtagggaattaagaaaggcatttgggtgccaatgttttgcaagagccactgtactatatgcaaatgctaaattcaatatatttttcagatatggctgatgaccttctgcaaggttgctgcatttaatttgcatgatactgatggtgatgcacaatggctgctggttaccctaggtgcctaaatgtctctactgcaacaggtcacagagtggtcctaagatggtgacgccacctctggggagaatcacaaaggttctatgcaacaatctctacggtagtcacacacaccactcactgtggcaacaaacgtaaaacatcaagcaatctctaaatggttcagggccctaaaaagacaagtaagggatcaaggaacctatgttctatttttcctctaattcaacaggataaactatagaaattctttcattatattatagttcaaaagcaaaataagaattacatgtagaacttccatgtcagaagaagctaagattatatttataaattttcttcatattaaaatatgattgaatcaatgagatcattctccaaaataatttcaataagagagacctggtaaatgagaaatattcgacaatgaggttatgaatttctacaagtcttgatttctaccagtctgaatgctttttcttaaacatatgaccttagatagataccagactgaacatcttgtatgatggtggtaaaatttaatgtgcacattagcaaatttaagtatcaaaatataatatatcctgccattgaaaatcaaagtactataacaaaaatataatatagacaaaataattacctaactgaaccaaataaaatgaggagactacttcattgttcttggtgcatttctatgtcttatcattgctctttaaaacagaaattattagaataacaacctataataattataaaacatattcaccaaaagggagtcccctagttggaacgattcaccttaaggttggtaactatactttataataatgattttctaatcagcatacaatgtactacatatttggaagaagtcaaaaatagattttaaggaaactgtactcatttaagaatctggtggaagggaagagcaaacaaagccatagatttcaaaatagatatttcactggtcctcttttggttaagtatttctaatagccctttttacaaaatggcctccattgctaaactagaatagccacacattaactgaaaatcaaatctctaactgaaaatcaaattaaaaaattatacaatctaatatttaatacgtttgttctgcatcaaactacaacacagtgatttgaaaaagatctattttgaaaattatatgcctactttgtttccttgaaatttgtgaatgaatttagaacttaaaaggtattatacattacattatttagaccacaaccatgaagagatagattttgaaaatttaagacttacctgaaggaaactttgaattaatatcctcagtaaataaccaaagataaatacaaattatgagtattttggtacacatgataagattttttaaagtacagctcattgctaaaactttaaaaaattgtattctctaagaacgactaagtacaacatacacaaaattattttccttttgagcaagaatgcatttagcctgtttccattgcttactggcattcccttgacagcaattccaattagtaaaacgttccaagaaagacacgaaatatgagaaatacaatcctaaattacagcatttgaggaggtcatatagtcctcatacttaatgtttcaataggaagaaattcaattaatagcctcattgtactatccctgtggctttattatacgtaatagaactaaaatttcccttttgttatgattggatgaaccgcaccctatatggcagacacgactcatgcaaaatcacaaaggttccctctaaatttggcctccacttgtatcggcttcccatagcagcccccaaataataggaagttatgcaaattagtgtattttattttatccattatacaattctactatgcaaacaaatcctacactgactcagaacccatatctcttaccatgggaaaacaatggtaaggtttaacatcatatttgaaagagaatatgaactagacaatattcctaataaattgaatggctaagagtcaaaacaccagcatatatttcataaaggctctaatgaggctggtggcaaaaatataatacacgatgatttaacaggaaccacctaagtattctcgtaccatgggcactacaatgactacctttttaggtagcaagccagcgtaaaacaagttgaaaataattgtactgtaaatgtataccattgacaacaaaacctgtgctgtgtatattcatattgcatcagttattctctgaatatagaagacaactcaaggtcaaatgaaaaataaccaataactcctattctttgccttaccacctcccgctgtccactcaaaaaaattaacatcttacttaattagtagtgtgtttatgtttagataatcacaagattgttgaaagacataatataacagaaggtttgttttgtttgaaaattatattatttgcggaggaagaataactacaggaagaagcttgtgtggtgtggttagcatggttagatttcaatgggaaaaggggtatttagacctagtatacaatatgtttttattagaaaagaacattatctttttattgttatcaattgctcttaaatttttctttaatgcaatttcacagcaatctcaagaggatacactaaaggcccttgattatatatactctacagaatgtattgtatcacaaagatacacatccaataagatttcttttttcatctgaaatttataaagataattttccatgctgacagtgcacatttcatccacaagtttgaggagtcaaatgctaccacagctgggggttattctgccaaatggcttccaacagggactacagagatgtgggctaggaggcatgtgtgtgtgcaggaaaaagcaacagacctgatgggaaatagcccttctctggagtcatttttatcaattaccatctgagtgatctaatcaaatatagtctaatgaaaacagcaacactaggaaggaaaagcaaatattaaaacagctgcttgattacctacagagattaaaacaaaaagcaaggagtgaggctgatatatttcatagggatttgctaaggctgaagggaggggtaaggggcagataccttaaaaaaatccatcatgaaaggaactgagacaagatcataaaaaagggggccaagttatagcgcgccatgggatttttaatctggctacctgtggtttctgtagttaaggctttattcatcccaaaacgggggggggggggggtgggggggagaaaaacaaaaaaaaaatcacatttatatgtcagttttgcaaatgatcaaacagcgtgcatcaataagaataataagaaaacattaaacgctgatgactttttaaaaacagatacccgttttatcaaatattattgataattacctgtgcatctcgtttcttgaactcctgaatttgattttcgtgctccatattggcagcgcgaagctgtttttccaggttttcaatttcccgttcatggtctcggactaggctatccttctctgcgttatgctgctgtaataggtgcgtcttctcctgttcatgctccagcttcagctctactatctgattggacaatgaggaggacagttcatcaacagaacatccttgtcgtcatgacaactcatgtacagcttaatttttctctaatttgtccaagttgaaaatttttatttttacatcattattacctcaccctcgaaatactctcatttgttggggtggtggttatgcaaacctcctaatattcaaaatagttgggcatattcagtaaatccttcttcaatctgttgacacaaatgtctgaacattgaaaaaaattatctcgaatgctagtcacttcctccccaagaattcgggtattactgatcagcaatggttataaatggttaatagtacgctttgctttttgcttaaatatacacatgtaaaaagcagcaattaaatcggtcagctttcttcatgatttacaaataaaagatcggagctaaatatgcatctggattcttgtatatacagttgtcttttaaaaaataaaatgataaatttcaaagctctattatctcgttgtcagctacggtataccaacataaacagatgttatgtgttccagaagggcacctgctgtgctgcaagcttgcgccatgatttcataaagagcattctattctcaggatcctttcccagtccactccacactggagactgtgaccttggccagtcttagcctctccccgctagactgaatggcagcccgagaccaaggcctggttgccgcagctttgatactaatcctcccagactgtgcacaatggcaccctacctggcctgcaaactatagccagccaggctgtctttgaagcaggtgatgaataggggacggcaggaagccagcttccccagtgaactccaggccacacagctgctaagaacagtcacttggatttttcttcagttttggtggatttcagggggaaaaactgctgttatctagaatatgttgtgttattttcggcgtgagaatccatcttcaaaaaagctaacagtaggagcctgctccaaatcgatcttgtttcgtgcaatgaatcaccagactaccttatcttaaagctatagcattcatttctccaggcatgcacactgcactaaatttcagaagttttctttttaaatttgaaattcttatcccttatgacaagtcaagaatcaaaacacaaatgaaatttgctttaaaacataggtttcaaaatgttttcttattgtgattaaagagtagcgggtaccattccttctgaaactattccaaacagcggaaaaagtgggactcctccctaattcattttatgaggccagcatcatcctgataccaaaacctggcagagacacgacaagaaaagaaaatttcaggccattttccctgatgaacatcgatgcaaaaattctcaataaaatactggcaaaccgaatccagcagcacatcaaaaagcttatccaccatgatcaagtcggcttcatccctgggatgcaaggctggttcaacatacgcaaatcaataaacgtaatacatcacataaacagaaccaatcacaaaaaacacatgattaactcaatagatgcagaaaaggcctttgataaaattcaacatcccttcatgctaaaaactctcaataaactaggtattgatggaatgtatctcaaaatattaagagctatttatgacaaacccacagccaatatcatactgaatgggcaaaagctggaagcattccctttgaaaaccggcacaagactctcaccactcctattcaacatagtattggaagttctggtcagggcaatcacgcaagagaaacaaataaagggtattcaaatagaaagagagaaagtcaaattgtctctgtttgcagatgacatgattgtatatttggaaaaccccatcgtctcagccccaaatctccttaagctgataagcaacttcagcaaagtctcaggacacaaaatcaatatgcaaaaatcacaagcattcctgtacaccaataatagacaaacagagagccaaatcatgagtgaactcccattcacaattactacaaagagaataaaatacctaggaatccaacttacaagggatgtgaaagacctcttcaaggagaactacaaaccactgctcaaggaaatcagacaggacacaaacaaatggaaaaacattccatgctcatggataagaagaattaatatcgtgaaaatggccatgctgcccgaagtaatttatagattcaatgctatccccatcaagctaccattgactttcttcacagaattagaaaaaactactttaaattttatatggaaccaaaaaagagtctgtataaccaagataatcctaagcaaaaagaacaaagctggaggcatcatgctacctgacttcaaactatactatgaggctacagtaaccagaacagcaaggaactggtaccaaaacagatatataggccaatggaacagaacagaggcatcagaaataatgccacacatctacaatcatctgatctttgacaaacctgacaaaaacgagcaatggagaaaggattctctattaaataaatggtgttgggaaaactggctagccatatgcagaaaaatgaaactggatcccttccttacactttatacaaaaattaactcaagatggattaaagacttaaacgtaagacctaaacccataaaaatcctagaagaaaacctaggcaataccactcaggacagaggcatgggcaaagacttcatgactaaaacaccaaaagcaatggcaacaaaagccaaaattgacaaatgggatctaattaaactaaagagcttctgcacagcaaaagaaactatcatcagagtgaacagacaacatacagaatgggagaaaatttttgcaatctatctatctgagaaagggttaatatccagaatctacaaagaacttagacaaatttacaagaaaaaaaacaaccccatcaaatagtggatgaaggatatgaacagacacttctcaaaaaaagccatttatgcagacaacaaacatatggaaaaaagctcatcatcactggtcattagagaaatgcaaatcaaaaccacaatgagataacatctcatgccagttagaatggtgatcataaaaagtcaggaaacaacagatgctagagaggatgtggagaaacaggaacacttttacactattggtgggagtgtaaattagttcaaccactgtggaagacagtgtggcaattcctcaagaatctagaaacagaaataccatttgacccacaatcccattactgggtatatacccaaaggattttaaatcattctactataaagacacatgcatggctgggtacggtggctcatgcctgtaatcccagcactttgggaggctgaggcaggtggatcacgaggtcaggaggtcaagaccatcttggctaacatggtgaaaccccatctctactaaaaataaaaaaacaaaaacaaaaacaaaattagccaggtgtagtggtggatgcctgtagtcctagctacttgggaggctgacgcgggagaatggcatgaacccggggggcggagcttgcagtgagccaagatagtgccactgcactccagcctgggcaacagggccagactccgtctcaaaaaaaaaaaagaagacacatgcacacttatgtttattgcagcacccttcacaatagcaaagacttgaaactcactcaaatgcccaccaatgatagactagataaagaaaatgtggcacatttacaccatactatgcagccataaaaaatgatgagttcatgtcctttgcacagacatggatgaagttggaaaccatcattctcagcaagttaacataggaacagaaaaccaaacaccccatgttctcactcataagtgggagctgaacaatgagaacacttggacacagggaggggaacatcacacacaggggcctgtcgggggggtaggggactaggggagggatagcattaggagaaatacctaatgtaggtgacgggttgatgggtgcagcaaaccaccatgtcacgtgtatacctatgtaacaaatctgcaggttctgcacatggatcccagaacttaaagtataataataataataataaagagttagaaaatcaacaatgtatttctaaccataaatgtattgttatttagaagaagaaaagtatgcaaactcttgaacatatacacttataacaataatgtataaataataaggcaaaatgtattttgcatctcagaattgtgatgtgttatagtgaatttatatttatttaaaatttaggggttttccccatattattctactattggcaatattcagaaaaaatagtataaacattttctcctaatacatactataccgagtaagaaagttttctttatttaaaataaatgtgtatgctttgttctgtgtctcacagaactatgttaatcccaacaaaagagagatttcatattgtattgctgttatgacattttgctcaggaagctgagtgaatgaatgactgagatggaatatttttagttcttggacatgttatttctactcagcgttataccaacaaggatcattataataaaattataaacttaaatcaaaatcatttaagcatgtaacacactgaagggaaatgggaggtagaaagttctattgagatcttcttgaaagcctcagaaatattgggagaagggatgtgacttaaaattggttaaaagcaaaatattttacaatattctagaatgagaaaagtaaccaaatgagctataattggggcaaaagaattgcagaattttctcccaacagaaaacacatgactagaactagctgtgagatcgttagtaatgatacctccttgttctgtactctagtagtaatgtactttcacagtaactttctaaacagagacatttgaagtttcttatagactcatcaatgatcatgcccatgttcaaatttcactttattcatttttaaaaatcaggaaaaaaaggaaatagcggttatcacatttcaagcataaacataaatagtcataaatgattgttagtttgatattttgccagggcctattgctcatgattctacttaatgaacaaatctcaaggttgccaaagccttttaaatatcattcacttttacctctcctgcttgaacagagaataaggaggataattttcaatttaaaatgcaatagctcaggcttgtctgctaagtccaacactacatggctaacttctggatgtcatgagccctttctggtcttttcctaggcttccgcaccatcagcatcttctagcaagggtgtcttctccagataaatggtagggtccagaggagaaaccctaatgttgggggaatatcttgacgatggtattcataactacaaagaatgtcatcaaggtagatatgtaaataaaaagttttactggtgcctagccccatccatgtaaataaatgttaaaagaatcatctggactttccatttgtcctttacttgtggacacatctcaaaggtaaacacaaagtagcacatcttcttcatgttggactagtagatacttcggttgaccaacaataatgtctaacggagttaatgatgaccaggaggtggtaaattatggacattgtagaggacataaaagcagacagaacccacaaaatgaatattaaatggttaataagccttctaagttaaggggtgtggggcatctggacccataatacatgctacaagggagaactggatgcaccatgatcaaggaccctgcttaattaaggctggctaaggagttccctgtaataaaagagggaaggcttcaagttccataatccaaaagcattgagctatgagacagataacaatactgggtatgtgcccaccctaaacatattaaagaagactggcatgtcttccaggaacactggtagtgtcagccctcatgtgcaagcacctggtggcatatgatagtcctttgagaagctagggttgacggcttggtggttggggttcattgtctagaaaatactgggttgactcataggaaattgtcatttttgaggtcaaaacaggagatgaaaaagggaccggggcagtggctcacgcctgtaatcccaacactttgggaggctgagccgggcggatcatctgaggtcaggagttcaagaccagcctgaccaacaaggagaaacccatctctaccacaaatacaaaattagcctggtgtggtggtgtatgcacgcaatcccagctactcaggaggctgaagcagaagaatcgcttgaacccgggaggtggaggttgcggtgagccaagatcacgccattgcactccagcctgggcaacaagagtaaaactctgtctcaaaaaaaaaaagaaaaagggtcctgctccacccaccatgctactccacaacacatgcagaacttgaaattcaagagtaaagttttgaagttctgaagttcctaaaagcatcggcctccatttcagaacagacgaaatccttctacagcttgatgatgacgtcttcattccaattgaactttcatgtaagtgcctaagggcaagagcacattctaggtcccaagaaagaccaagatggagccactggacatacaagtccctagggatcttgggatatatattttaagtcctggtaactgttttacagtgaaattagtgctagcaaatatggcctgaaccactttcaataatcatttaaagaaatagaaaaggagatggaaaaagtcatttcttctcaatatacaatatgtggaagactaatataccccaataacataacttaatgtcaggaatgccagtgctagaaacataaatcatagaaggatgtaccacaacacattgaaaaggggaaatgatggtataaaatactaaccaaaataatcttgaaggtaatcaaattacaaactttatattctacatagccctggtgtaaaaacgggttatagctagagaaagtagggagagtggttctccatattctctggctagaaaaggaggaagagagggagtcacagttagatgccctggggttatatttgtcctacaactcaatgataattgctctcccttaagtgaatagaaatatgaaagtttaagaatttggaaggacttagaggctagctaatacaatgttaatcttaatctaaaaaccttccctataaaaccctgatagttggtcattcagctgctgctggaatgattttaccaacaggagaataaccatattccaagagaaaccaatgcctcatactgaacatacttggcactggaaattctgggtaaagataatagggaaaactgaaaattgtgaaaagaacaaaaacaaacattaaatacagaacatgagaacattcactggcagtgaacaaacaaggaaagaagaataataacttggccacaaatttcaaaacaaggtagccaaggaaagaaagagaagattctgacatggtttggtgagacatactcttttgtccctataccctagaagtagaactggtaagttgaaattatgctgaggattattttccagtatcccagttttagagaaaaatgaactgaagatgtatcattcacttttcccccttctgcctgggtggaagaataggaggacaatttcaatggagtaaaaatggctactagagagagatgaatcaagttaggaaagtaggaaacttggactgattctctctgatagaatataggaaggagttagagttcacagaaaaaagaaaacactctctaatacacagaaaaaccccagtgtaagacattaataaattgttaaaagacagagccagtatcagtttctctgacagaagttgttcagaactgcaactaagctctttttctccatccctatcacgatctcataaaaaagtaaaggcaatgaaatacctgtgccttcatactgaaattcagaggaggactgacaggctgaaaagtagtcaaagagaattcatgaatattatatcagtccatttaacagatttggacacaggtgcccacgttaagcccaagcaagatgagggagaaaagtatctgaaaactagagaaacattaattacattaggaaaaaggtgaacttagtgacaaagaagaggaaaagaagaaagtaaggaagaggcccatcattaaaaaccaaaaacaattgtaagagaacttaataagaacatgagtgtaatgaaagaataatgcaaggataacaagataaaacaacagaattaaccaaggacccaaataactccatcacaaaattgattctaaatcagaaacaatgagttgaataaacatggtgaaaaatcaaatcattgacatagataaagggtttgaggtaatcataataaaggtccaggaaaaagacaaagagaagctaaagtaggaaacgtgaaaagaaaatccatgtaaacacagaccgtggtatccgaaaatttccctaaaatgaatgaagagataaatgtgtatatcaaaaagacacactgtagaccaagaaagatagattccaattgaggaaaagaaacgtgaaagaaactcaaggactgtagtccccaaaccactcttgaaacaaaaaaacacttggggataaatttcaagcaagagatgaccagagaagctgtttaagaccaatgtttgcaccaaaaggcaatggatgatgtgtacaaagtgtcaggggaagaaaggatgatcaaaaaattttatgcccagctaaggtatccttcacaaataagagaacacatagtgatgctcaagcatgcaaaaatacagtgaatacaactataagcccttcttggaaaagctacttgatgaaatctcagtagtcaataatagatcaaaataagaactcaggtatgaagttgtgcaaaaatcctggtggtgagcacataattgatttaaataaaaagctaagtttatataactgtgagaattatggttatggaacaaaatataaatgttataaacttcaacaatgtataaataatactatggttgacaaaatagactggtataagtaggtggaaggaaatatgggcagtttaatttttctctaataaggagttaactaatgccctcaaaattgaaccacaaaatttaaaaattactctaacttcaatgtatttttaatttctaacattctaaaaataatctcttatgtggttaaaaaaatgtttttctaaattttagaaatctttccatttccactgggcacagtggctcacccctgttatctcaacactttgggaggccgaggtgagatgatcacttgagcccaggagttcaagatcagcctaggcaatgtatcaagaccctatctctataaaaaataaataaaaaagaaaaaatgagagaaatctttccgtttcccttgtttcttcaaataatttcacatataatttaatattttaattaaaagtggcaaatgtagcatggtcctgtttctagaaaattgtttttgtctatatatctacttatccttctatttatcaatctctcatagaaatttctggaataatgctcacctaagattaacagcagtcgtttccggaaggtaagatttgggtaaaatttttgttttcttctttgtgtgcaggaccatgtcaaatgccagtagctcccttcggggggaatatttacttctggtggcagtacaagactcttaaacaagggatgtggtctctcttaaaacaaacgggttctgggtctgcgaaccaactcagatcgggaaacttggtagaggactatgattttccaccctaagtggaaaactgtttcagtttcactcatcagtcttggacattttcttgatgttgtacaagccaagtagtattcccactggctctctatcttatctctcagaacacagctcattatcaccacagatccctgcagggtaagacacctgaagggcctgtctagccttactatccagtagagtaatcgtgtctaccttccatctatccaagtgccccatgtagtgcctgccattctggaacccaactttcctgttgaaaggaggcagctcagttccatagcagcatctcctactgtcggccccggaatacagaggaaaccaccatggaggtggctcagtgctatcagtgcccctcccaccagtgcaccttagcaccctagtaaaggccatatcctctaggccctcccatgcactggcttctctggcctaaagcaacaaaaccactctcatattctcacttttctgatactttgacccttcctccatagtaagccaaggcagttctgccatggctgaagtagcatggaagtaagtggcagaaaaactactgcctggtaaaaatcacaaacaattatcaacatgccacattttttaaaaataaagatgaaggacagttcaaacattgtaaactgtatccaaaattatattgatcatcaaattaatagttcaaggggcacattgctttaaaggattggccattaatagacagatttttctacagggcttgccaggtaacactttcctctcacgttctactcaagggctctctgtggaaaacctttgcttctaggttgtaaaatttagcactagttttattaggttggtgcaaaagtaattgtggaagtaattgttgtgtttgccattactttcaatggcaaaacccacaactacttttgcaccaacctaatatataggtcattagactcatgatgttaagatgcatactaagaaacaggcaacaggtacatcaggccctggtatttttcatgcaatgagatatatatttaacatcatcaggttatgtctctgaaaaatttgcatctgcaaaattgcacacttgaaatgtcaaaataagttactaaattttttagagctgcagaaattttacgctaatggggcagtctaccgcaaaggtagtagtttcacagactgattttatatcctcactaaaagatgttggaatctttctttttagtcacagttatatgatataaaatgtgctattggatacttcactatatgagaaaagctcccttaaagataaaataaggacatatacaatcttctctgagtccttggagtcagagtaaagatacattttagcacagaaaatactacaatctggtcttactttctgaacactttaatagaaataggcacaaaaaaattgtaaaaagcaggcagtgtgtcaagaacagaaatagaatgtgtcatttggggatggccatgtggctcccagattagatgtttgctacatccatgaaatctgtcaatcaacagttcagtttacgcatggaagttctccttatttaaaagtttaatgttgctgtgataaccgctgttagagatggtaccagggcctgccagcatacactgcttctttattccttttcctctccagccaaccatcaacagccaggactactgcctgctgaagctcccgaagctcatgatacagggagagcagaaggctggaaacacagctgtgattagcaagctgatagatgaagcaaggctggaagcaggcgctatctcctgtggttatcttcccatttaacacttcaaaacacttctccagcacctgtaggtgatgagtgacaattatcctgagtttttaaaactttttgaaaaatgagctattactttctgtggttttatctgccagatctcagttgaaactcaggaagaagccagatagtcaaatgcttcaaaagggtttttttttcatggttcaataatggacaactcaagccacacaaattgagaaaattaactaaatttaattaagattaattaactaattaactaaattaatgaactccatatagatggagttcaaaatttttagaaaaaaacatgtcttaactgcatattttaattcattttactttatgtgtttctctacaacacattcagttctcaatgagatgtctgtgtcttaatctagtatgttactgcttttgaatgaacatgaaatataaaaatcatgtaagtttgccagctacagttcgtaatttagaaggacaaataggtcaacctggttataaactcttccaatatatagcactgtgtctttactttctttttattttccttatcttgcctaccacaatgcttcgtaaattattcatcattttgaatgaaacaaggtggcattcgaaaaacagaattacaagtaggtggaagacagctgcttcatcttccccatcaccaaattggctggtccacctgcaaagaccctgccttacctatggcttgaacgcatggctggccttgcagctacctaaggcgagtcccttcatctgtacactggattccatcctttcttgccaaattaagcatgctgctcttgaaattatcccatcactctctgcatcatcaatattttcttctctagtggatcagtctcatcaataagcaaacatgtttttagcttatctcattttaaaaaaactttcctttgaccacacacgtccctctagataccactcatttctctgctcccttttctttcaaaattcctcaaaacggctgctcacaacgcattgtctgtccacccacataattcagacattggttcccacattctactgaaaccagtcttgttgaggtggctaaagacctcgccatgcagcagtcagttctcagtccccatctaacttcccttcttggcaacacctgaaacaagtggttactcacttcctccttcctgaaacactgcacacggcttatgggaaatcccaccttcttagaccttccttttacctcactggttgttccttctcagtctcttttgctgcttcctccacctcttcctcatatgtaagtgttggcagcccctagactcagtcctggaagttcctttctcttctctctactcatgtatcagtgtctgtcaccaccatccacctggttgctcagttgggaaacttttaagtcacattttagcccactctttaccttacattctatttcacaaccattgacaagtcctgcctgcaaaatagatcccaaatctgactactccctgtctcccccaccactcccaccctagtcccagcccggtaacctctaaccagcccactgcaatcatctcctaactaggtcccctgcatcctctcctgcctccatcgtaatcaaagctccacacagcaactggagagatctttcaaaaatgcaaactaggccgggtgcagtagctcacgcctgtaatcccagcactttgggaggctgaggtgggtggatcatgaggtcaggagttcgagaccagcctggtcaacatagtgaaaccctgtctctgctaaaaatacaataaaaaattagccaggcgtggtggtgggtgcctgtagtctcagttacttgggaggctgaggcaggaaaatcgcttgaacccaggaggcggaggctgcagtgagctgagatcacaccactgcactccagcctgggtgacagagtgagactcaaactcaaaaaaaaaaaaaaaaaaaaagagaaaagcaaaccagatcttgctcaaatgctccagtggcttctcaacacactcagaataaaatccaatctcccaccatggtccataggatgtgacaaaatctaccctgtactgtactttggctcctaccactctcttccaagttcactccattccagctacaaactaacccatctcatggctgttgcaaccatccacctggaatgttctttccttacctcaggtttttgtatggtttcctccttcacttcatccaggtcttaatttgaatatcatttcagtagagtccttcactaacaatcttatctacaataacaccttgtataaaataataaccatttataaagtagccctttcactcacaaacactttagcttgctctatttttcttcacaacagttatcattacctcaccctaccttaaattatgttttgaaaaagagtgtgtgtgtgtgtgtgtgtgtgtgtgtgtgtgtgtgtgtgtatgtgtggtaggagtagtggtggtgggtagtggtagtgtttttctcttccatcacaagggtaaagactctatattttgttcactgttatatcccaagcacttggaagagtgtttagcacatagtaattcaataaacatgtgtgaaataatgaatgattgagaaggcattagttccactttatatttttaatgtacttaaagaaggaataatgagttagtccatatcactatccaggaaaacagcttctttttttttttttgaaatgggtgggtggggtcttgctctgtcacccaggctagatggagtgcagtggtgctatcaaagctcactgtaaccttgaactcccaggctcaaacaaccctcgcaccttagcctctaaaatagcttggaacacaggtgcaagccaccatgccagtctaattttttttttttaatagagatgggggcctcactacgttgcccaggctggtctctcactcctagctccaagcaatcctccctcctgggcctcctgagttactggaaatacaggcataagccactgcacccagcccatctttgctcttttaatattcactctagctaaaggtgccacttgttttaacctagatgagaacagctccaggccaaaagaaaaaaaaagaggaagagaaggctcttcaattgcctttcactaaatatcagcaccctttctatgactctaggctccgaccactggacctggacacaggggcccaggctctatagcctcacagcctggggctctgagtctggcagcctaatggctgggaatctggtactttgccattgcctgcaggaccaatctgtgacttgtggtgtagctgcattccctgaatttggtgcttattcaaagaagtaagttgaaaggaagcatcattagatcaaggattgcatttgtcttgatcaccactgaggaccacaggggctgatatgtagctggggttcaaaaatgtattaggaattggaagaggaaggtcaagcaaaaaaagactttcaaaaagagtatgataaggtaagcaagaataaaagagagtaagagcagcatactggatgtaccataaatcatacatatctagaaatcaataagtcatatggtaatccatttggaagggattttagggagccccacaaatccatggtcatttaccacattacctcaataccgaagagaaagtttacgaagtctttctacttggatcagtcttgctatcacccaaataattttaaacaattcccacttttatttgctctcctgtccatgtaattcctccagtctcagcaaatgattttgccgcctatctgacaaagaaaaacctcagtaataagaatgtcttcatctgccttttgcagatccacaaacttctacacacctggccttcccttcttttctcacgaggcacaggagacagacctggccatcatccaaggccagcagctccccacgtgatgtggggagctgcccagtatctccaccttcttgggaacatacactagtgagtgtcttcccctttcctccctctcttcctttccaccatctccttttccagtgtagactaaatagtctcatttaaaagaaacctggctgggcgcggtggctcacgcctgtaatcctagcactttgagaggccaaggcaggtggattgcctgagctcaggagttcaagaccagtctgggcaacacgatgaaaccctgtctctactaaaatacaagaaaaaattagccaggcgtggtggcgtgtgcctgtagtcccagctacttgggaggctgaggcaggagaattgcttgaacctgggaggtggaggttgcagtgagccgagattgcgccactgcactccagcctgagtgacagagcaagactctgtctcaaaaaaaaaaaaaaattaaaattaaaataaaagaagcctaagcttgaaggttataccacctagctaagtaatgactagaatatttgcaaaggacaaggattgggaatcacgtgctatctgctttttaaatatcccaactgaccttcacttaaaatttcctacttgcttatcttgcagaatttgttttgtctttgctactgtgtttgctaacaaaatattttaagttttaaataatggcagcttgtaagaagttggcccttcagtgttttttgttttttgttttttttgtaatcattgacaataagcacttattctttctggagaagctggccacttgtttatctgctgaactacatttctccttcaaggctttgtagtggaaagcaaagatataaaacacaagattaaagaatgatctcatggagttgccaaagaaatctctatagtccaggaagtcctagcatgcctggttggttgtttgtttccaacttgaatgaggtttgtgaaaagacaattagaattgtctttttgttccaatgggttatacaggaaagaaacaggaaatcttgatgaaagcttgggctttacaggatatttgtgtgagcatttagcccatgtgtttgatgtttttctttccacatctgcacactttatgcctggattttggctaagatactttaaaatactacttcgctgttttcacttcattacagttcctggcacggtgctttctgtaagagaggggctcaaaaattaaaactggagaaggaaactgaggcccagaggcacaagtccattcattccctctgaatgtcagtcagttccctcgttataaaatgtgaggattagaccggataagtgcttttaaaacttttccaccaaagtactctcagcagcagtgaaaatgaatagcacccccctgggggatctgagggcatagcctgaagcagcctctgcaagctggaagtttctttgaaatgtcctattttgtcttcttcatgagaactttgcattttacaaaacaggaaagtctatgtttgttttaataggaatgttacctcaatagtaaaactacgttgctttcccacaatcgaactgagtggatgcaacactccaggaagcatgtacgcagcctcaggaacccctggcacttgctcacactcccccggggatcaccttacctgagttggagaagcaagggcccagatgctcggcgtctaaatcccctcctgatgtgaaatgctatcatcataacactgacaattttaccttttagagaaaagtaaaacaaaataatagaaaaatattcacacttccatttgaatggcaactgagaaagtaggcaagagtcctgatacagggaaatccagccagacaggtacctaaatgaatgagtcagcggtggaatcagagaagtcggtctgtcaagaggggctgggaatctaatcaggcagatgaacagaaagtcccagaatcttggttttggaagagaccactgcagtaagacagcccccggaaggcacagtatccctccagaatactccaaaaacacaccgcaacccactcacactggaaacttactttctcacaagaaaaactgttgcacatttgaaggaggagttctttagaaaagaactaccttgaaacaattcaaaatattcctcatggtaccatgtatgtatgggttcaatttctgccccctggaactccgcgggagtgcatttagagtgggggtcaagggcaggcctcaggttcaggttccgaatccaccacctatgaactctgtgggaccctgggccatttactcaaatggatgtacttcagtttctacaactagaagatgaaaacaataaacagtgtagctacctcacaagatttctgtgagtcaggtgcagtggctcacgcctgtaatcccagcactttgggaggcagaggcaggtggatcacctgacatcaggagttcgagaccaacctagccaacatggtgaaaccctgtctctactaaaaatacaaaaattagccaggagtggtggcgtaccacgtgtaatcccagctacttgggaggctgaggcagaagaatcacttgaacgtgggtggcagaggttgcagtgagccgagattgcaccactggcactccagcctgggtgacagaccaggactctgtctaaaaacaaacaaacaaaatatatatatatatatatatatatatatatatatatatatataattataatatataatatgcattatacatatattttatatatatatattactgtgaagatggggagtggctgaatatgtgtaaagcaagcagagtagtgcctggtccagggtagatcctaataactgtgggcttttaggatttttatcacacagaccaagcccagtactccctgaaattcagaccttaaatttacaaacagagagatatgcaatcctccctttaaatattcccctctgacatagttccagacctttctacactctgaaaactcttctctgaacatgttcgagtttgtcagtggcctgcttaaaatgtggtgaccaaaatcgacctattccttatgtgacctgaaatgtaaacaatagctgggaccatatctgccagccctcttgtcccctgtgtcccaggcaccacactccccttatctctgaggctttctgtcttccttctacttttgcaactgattttctaaaccaaaccatggcattttatattcaacctcaataaatgtaatcttcttaattccagccagcttaaagctgcagaaaactcattttttttaatcctacatattaactattcctcagaactctaagcattgggaaactttaaactttttttttttaatcccttatcatcctcgactgactgagagacacagaaatctcactttaggttaacactaatcattcagagatggccctttgaactatcacttaaccacataaaggtaccaatattcaaaccatatttccccatactgccttcatgtaggcaccgtcagacggctccacgaaagccagatatattacatctactcctatttccttatctaccagcctggctgccctgttcaaagaaggaaatgagcttagtttaatcggcttcattcttagtgtactcatgctggcttgtagagctcactactgtatgcctatcgtttgtcatgataaacttccacaggaaaaaatcctaacaatttggagtggtcaggggaaacactgttacagttaacagaatattctgctgaaaaaaaaaagctaactaaaaaagtttgtatattgtcacatcaataaatattctcctaaaatgtactagctcatactcctgccttcatctttccttagtgaactaccacctgggatcttcattctcagcattgattctaatgtatagacctctagatatagaaagaataaaaacaggtgaaatctgcacccacctgaggtacgcttgtgtgtgtttttacattcctgttatatactacatttgtatcatctcttttcatgaaaaaaagaaagaaaaatggatgcaatggtgtatggcttccattaatagtatcaattctttaaagaatttatcggtatcccttattgtgttagtattatttttgatcaatacaaagacaaaactttgatagattttaaaatctatcattctgagaaaagcctttgaagtttacatgcttccagacaaatttatatattttttttacattaaaaaagtgaaactgtcacaatgtggataatagggggtatagaaaaaaagaattcaccatgattccatcctctaaaaaataactaggatttttgagattaaggataattgggtcagagggtgtaagcgtttttcatgactcttggtagaatctgccaaaatcctttccaaaaagcctgtaatgccactagcatgtataaaagtaccaatttcactaaacttttaccgactttagatggcacatcatggttaattctaatttgcatttttattaacaccaagagtaacgatgtttctacatggctgttcacttaattcatttcttatctctctctttcctttgccaggtcacttattgggacattaatgattttcttatggtttatgctaattactatatttaatctgctaattatttttatatattatacatttattaattttataaggagagttactctttgcctaagatatctgcttcaattatttcttcaattacttttttaactcaaaatactttttatttagtcaaatgcatttcaattttccttggcgtttttttcttattgtgtctgactttcaaagtcagtggtgtgccaaaacaattacaaaataaatgcagatcaggtgctgacatcatttggccacacttggttataaatttgtgacccatgtgattatcatcaaaatgagaatataattttaaaactcccacagagaactctgcaacatcttacactcatcctgtagtatcataacctctgactagcatttgtgttacataaagagctttaaatttggttttcccttctcccctgttccttcctcagtttacttagaggaactgacatttttcttatttttcttagtgcttctaatattgtttttaatacaaaattacctcaattatactttgtaactatagcataataaaaagtaacattcattgcccttccttaatatttttatttacatttgattattacctctgtttccctcttaccaccccttcctccccaattccagcctccaattcttcatctagttttctaaacctagtttctgaaaccagtttccaagcaacttcccccatcactaaagttgtggaaaacatcctccatggcacttcagataacagtgtatttcaggggaaatacctatttttaatttagcatgtgtcagaacgactttcagttgccatcccatattaatcggaaattaactacttcatttttatataaaaccatttttttaaaaaaaagaatctgatagaataactccattgcaccggcttttgcagttagaaagtctgaagttatccatactttggcactgttgaaaatgatctgtcagctctatcgtctaccttttcttctcttttaggcttttcatttgttggtcattttttacattgcatataaattgtctgaatttattttctatttcattaatccaaatttattacccacttaaaatgttacagaatataatatagaccaggcacggtggctcaagcctgtaatcccagcactttgggaggctaaggcaggaggactgctcaagccctggagttcaaggttgcagtgagccatgatcatgccactgcactcctgcctgggagacagagcaagaccccatctctaagaaaaaatatatataatataaatgctccaaaatattattccattttaatgtttcttagcattcataattttaatgttttacttatccaagtaatgcataacatatgatcattatgaaatttgaagtaaaaaagttttatttagagcatacaatgaaagtctcagttcatcataaccctaacccataataccaggccaattccatagtcatgtataatcttacagaattttttcactgaatttacatatctaactttgagacacatatgttttaattttacttcaatgggatcataatatacaaagtgttctaaaaagcgctttattcccctcaccaatatgtcttagaaatctgcatatgttggcaccttcagatttatattaatctttttaataagtatatagtattccacagtaggtatttagcattatttatttatttatttttgagacagagtctcgctctgtcacccaggctggagtgcagtggtgcgattttggctcactgcagactccacctcccaggttcacaccattctcctgcctcagcctctcgagtagctgggaccacaggcgcccaccaccatgcccggctaattttttgcatttttagtagagacggggtttcgccatgttagccaggatggtctcgatctcctaacctcgtgatccgcctgcctcggcctcccaaagtgctgggattacaggcatgagccaccgtgcccggccagcataatttatttaatcattcattttattcataacttttttcagtattacaaataatcctcccgaaacatatgtgaacatgcatttttttgcacatgtataagtatttctataggataggttctaagaaataaaattttgggattaaaatctatatgaattagtttttttggaacaatagaacatatatatcctacatatgaatatgtatatatagagtgtacatattcacatgtgcatatgtgtctgcatacatgcacacatgatttttaaaaataaaatggtaaagatcatcttctaataaaaagtaacaggtccttgccccatcccactcctgtactggtggcaactcttttaaaacatgtctgtgctcctttctgtggtgattacttccctacctctacaaaatatgctacatagctctttcttaatttaccaaagctagacattccttataggccttctactaggacaaatggggatttagctcatttacactcccttgctgctctctcccactcctgtcaccattttactagttactccactcctctcacttcctccagtggtcaaccctgtaattaggaatatactaaagcctctgtgttttgtttcatgatacgggcagctgctcaaatccacacttcatgataatacctcagtactctcacccttcccctcccagcccctccatccctttcttccacttccatacctacaccgtcttaacctttactgttacaatagcaaggctggtgatatggtttggctgtgtccccacccaaatctcaccttgaattgtaataatccccacgtgtgaagggcgggaccaggtggagataattaaatcatgggggcagcttccccccgtactatactcatggtagtaaataagtctcacaagatccgacggttttataaatgggagttcccctgcacaagctctcttgcctgccaccacataaaaggtgattttgcttctccttctgccatgattgtgaggccccctcagccatgtggaactgtgagtccattaaacctctttcctttataaattacccagtcttgggtatgtctttattagcagcgtgagaacagactaatacagttggtaacatctatgtcctgttctgtaaccctaagctagtttttaaagctgaaaacaataaatgtcatctaattattatgtctatgtatatactgttcactgatgaatattttgtctgctaagactacatttccttttctactggtccagcatcataacgcctgtgctgcttgatgaagaatgtgcctttaaaatccagttccagcattttctacgtttttacattttctaagtttgcaatcgtagtcagcatggtaaattgttttacgctaaccccatttgatggtcttctctgtgatactccttccaggcggaggattacaccagggaggccatgtttgctttggccaataaaatgtgagtaaacttacttctgagtcaattttagaagacagcaaatgctcaaaatatttccttttccatttcccatagcaatgttccagatagttcattctaaaaacgactcaagatgacatgacatgggtcagagctgcagtcaatcctcaaaggacacgtgacataagtatgaaataagccttttttgttctaagccactgaggtttaggatcatgtttaccaaagcaaaaccaagctaaaaattaatggtaatcttaagtattctgggaataagcagaaatatatttttaaaagaagaaaataaaactttgtattactaagtaagaggcagagcactgacgacaaaatctcaactccttacacaaaccggtcctaacctccctctttcccttcatctcctacagcaggaacctttctccccatactctggctaacctggtcttcatcatcatttattttccttgaacacttccagcttgctctcttctcaggatttttgaacgtgcagttccctcagactggaatactattcctccagagctcatggctggctccttcctagtttttagaactcagcacaaatgtcagggaaaccctgatcagttattcaaggctataatctccttcccaccctccacctggcaaaggctataaaggtaccatcttttcttcttcataagtcactcttcaggccgggtgtggtggctcacacctgtaatcacagcattttgggaggctgaggtgggcagatcacctgaaatcaggagttcaaaaccagcctggccaacatggtgaaaccctgtctctactaaaattacaaaatttagccggacgtggtggcgtgtgcctgtaatcccagctacttgggaggctgaggcagaagaatcgcttgaacccgagaggtggcggttgcagtgaaccaagatggcgccattgcactccagcctgggtgagagagtgagactccttctcaaataataataataataataataataactcactcttcaaaattatttcactttttaatttgtagactgatgactcatcgaaaagcaagctccatgagagaggaggcatgttctctctgttgctgttctccctcatgccagggacagcacctggcacatagtaagtactcaaccctatttctcaaataaatggaggtttaactagtgctctgacaggatagaagaatgactgatattgttaggatacttgttcccacccaaatctcatgttgaaatgtaatccccagtgttggaggtgcggccttgtgggaggtgtttggatcatgggggcggatccgtcatgaatggcttgggccatccccttggtgataagtgagctctcactctgagtttgagtgacctggtcatttaaaagtgtacggcacctcctcgcttctctctctctctctctcactggttcacttgctggttcctgcttttgccatgtaaggtgcctgcttctgcttccttctgccatgattgggagcttcttgaggcctctccagaaacagaggccactatgctttctgcacaacctgcagaactgtgagccaatcaaatctcttttcttataaactacccagtctcatcaattataatcgatgtttcaatcaaacattcagataaaacaaacagtcagaataaacttcagtggagtgttaaaattctgtttatagattttattgaaacaaacattattttaaatatattggtaacaacagctcttagtaatattttcattatgcagatattttgtgatagtgatttttaaaagataaatcatatatgtattttaaaaatttaatggcagcatcaaaatgaaagaccaacctgttgttcataccgctgtctgatgtcctccagttgccataaaaactcctttgattgtttctcacgaagagatttggatctagttagatctgcctccactttttccatctataaaatttaaaaatcaaatattaattttttaaacaaacaattgtgttccatgtttttgtaatttgtccatttgtttaaatgacagattttaagcacctcaccaataataatgatgaatttaaatgtattaaaataatgagacatttatcaattcattttaatatattttaattatttaaggagggaaattaaaattggtatataattgactaaattctaaaattacaacaataatgcagtgaaaatataatttaaggcattctaatatttattgaacaaaatttaattaagcccttggtatgtgctgaatgagataaaatatttccaaatcatatctctaataagagacatatcttgaatatataaagaactcttatagcccaataataaatggataattaaactcaattttaaagtgggcaaagagcctgaatagatatttctccaaaaagatatacaaaaggccaaaaagcatttgaaaagatgctcaacatcactgtctttaagcaactacaaattaaaacaagaatgacatatcacttcatgccccaaagaatagcaataataaaaaaggacaaatagtaacaagtattggtaaagacgtagagaagtcagaaccttcaacactgctgctgggaatataaaatggtatagacatgctggaatacagtctgtctgacaattcctcaaaacattaaatagagttacatgtgtcccagtagttccactccaaggtaagaaatgagaacatacatccacaaaaaactttgtctacaaatgtttatagtagcattattcataacatccaaaaagaggaaaccacccaaatatccatcagttgataaatgaataaacaaaacgtggtatattcttacagtagaatattattcaatcataaaaaggaaagaagtattaatacatgtactctgggaggctgaggcaggaggatcgcttgagcccaggagtcggagaccagtgtaggcaacatagtgagactgtgtctctacaaaaaagaaaaaaaattagccgagcgtggtggcatgggcctacagtctcagctattcgagaggctaaggcagcaggatcgcttaagccccagaggttgtagctgcagtgagccatgactgcaccactgcattccagcctgggaaaaagagtaagatcctgtctcaaaacaaaaattaattataaatagaaaaaaaactaacacatgttataacatggatgagccttgacagcattaagctaagtgtcacaacagaccacatactgtaggattccatttatattaaatttccagaataggcaaatccatagaaacagaaaacagattagtggttgcctagggtgagatggtgatctgggacggtaactgttaaagggtatggtgtttctttgggggaagatgaacattttctaaaattgattgtgatgatgtttgcataacatcctgaatacattttttaaaaccactgaattgtacacatacgagtgaattgttggtatgtgaattttatctcaacaaagctgttattaaaaaagaaagcggaaaaaggaaaagtcaaagattccaccacacccatgaggcctcacataatccaatcccagtgacctctcacagctcatctctactgctctatcccactaccaccaccacagtccacctacctgctgcccaggcctataatgtgtcagaagtgctctcaccttgtgggcaggaggttctgcctgatattcacacagtttctttctcaaagtattgaggctttgtttagcatcacctttgtactgagaccttctagaccactcaattttaaattgtacattgcaattccccagccactaagtccacctagtccccctatccctgcttagctacccttttgttccacaggatatatcaccttcagattcactatataatctacatcttcattagggctgtttgtaatgtctctcctgcagtgtaatgtcaccccatgttcactgtcgtcagtgaaatagtatcaacgatttatcacagtgcctggcacatacagggaatcaataaatactaatcaaatgaaaacaaagattgcacagtgtacccaacttggttcaagacttgctgaatttacaatttccaacgtttagttccaaattctttaaaacacacacaaaataaataaaagcatgttggatctaactttttctatcactttgtccatgttatgatcagatgcaatgagaaagagatgttcttacagtcatgaaaaagctctccatgtcaacaacatgaaaatggtgccttttattcaaagcaatgcagtattttacttgtctttaaacccctgcacatttgggtataacttaagacaatattttttgtctgaggcaattaccagctaacgtggcaaccattctaccactggctactttatattacttattattctgcttcactggtatatggaactacttgtactttgttcagcttgtacacaatgccttctttcaggttaccttttggtaagcactaagattagttaagacacgaatattggaggaaatgaactatgaaaaatgcttctttcacagtttttcacaatatatttgaaaaaaacatttcaatgcatttattcagacatgattagactttaaggttctaggaacaaagatgttcagtgaaaggcaacgagtttcactgcatgagaacaaaatgcatattaccacccactactgtgtctaacaccacattccagtttctggttcttacattgaagtttgaatgccctctagattatagcatgctatttagcacccaagtatttctttgtaaataccaaggattgcaatcccaaaaatattaagtcatcagtgtaaaattcaattagagttctaagattactgattcatagataattagtattgtggtcaagaataaatttaaggaatgattaaaggaagcacagtcaagcacactttggttttttgtttctaactcaagactttggtttcaagactctctttctttcagtgcttttcatattggacctcaagtgagattctccttaatctgtcctcggcaatccagactccagtacccttgatattttccaagcaagccatggctgttcttgactctagggccttttgcccatcatactatcagtaggtcttttcatttttttttttcatccagtcagtcttttcaaagttgactcaggttttccttcttctctaaggtgttctttaatcccactaactgaataaatgccttccttctctctatgctctaggacttaacatctttattcttctagcacattgtgtatttctctataaaatggaaatgtttcaaatatgtaagctttgtttagtaatgcagataatgagcccacaaataaaagaactatggcaagtctttcttttgtatatttattaaatagctgccatggtatgcgaagtaaagatgtattaaattcttaaggatgaggaggagggacatcagcaagatggtagaataaaagttccacagctccagtctatctcatagaaatccaactagcaacaattcacagacaagaaaaccttcgtgaatattccagaacataggagtgaggctgacacatgctcttggattacagaactaacaaaagtcacattacaaaaataatagaaatggtttcacgttgactgtatcatctctcccacaaaccaccatagtgccacacagagaggattcccctgggcccatggtttctacagtgggaaagaggtgaacatccagctttcccagcattccaagatgtttggcaggaggcccacttctgcctcgccttaaaaggaacattgggagtattagcagggctagaacatctgagatcagctataaacaatgaagggaaaatggagctcacagcaacctctgcattctggccagtggaggcacccaaccagagagaacaacaaatagcatcactgagcaggaagcacagttgacagatctgccaagctcaagtccctagccagatttgccacccagcctcagagcttggcatacttccccaggctcagaggcaagcccagatccctgcatatctgcagagcagagcatgtagtccaatacaatcttagcagtgattgcccctgtctagtgttggagcccagcctgaggtgcaggcagggagccaagcccaaaactacacataattgtgggcatagcatctagctttgcccatctgagtggctggctgagcagcaaccccagagaccttgacagcattggagtctgaccttcagccctgtccaactacagatttcaaacatgagtaccaccatgccagggaacccagcctgcaaccctgcctaatcagaggttatcacagagcccagccagcagctgtgcttgattatgcagcctagccaatggtctcactggactgtgaagcacaaccaggagccacacctgacttcatataacaggcagcagcccctcgtaactaaagaacccaatagcaaaatctgcttgctcatggtcactatcagctggtccatccagaatcttaggctagactaaatattgaaagtgtccatccccaccaaaggacatctacaaaggccaaaagaggaagccaattcatcaaacgtacagacatgaaggtaagtacacaaagattacaaaaaaaatcaaggaaatatacgccacaaaaagaaactaagagagaaagctccaacaatgaaccctaaaaatatgaggatctataaaatgactgacaattcagaatattccttctaagaagatcacggatgtattagtttgttcttgcattgctataaagccctgagagtggaatttataaaggaaaagaggtttaattggctcacagttcaacaggctgtacaggaagcatgatgctaccgtctgttcagcttctagaggggcctcaggaaacttacaatcatggcagaaggcaaagggggaacaggtgcatcacatggctagagtaggagcaagagagagtgagggcgaaggtgccacacacgtttaacaaccggatctcatgagaacaccctcacttccacgagaacagcaccaaggggatgatgctaaatcattcaggagaacccgcccccatgattcaatcacctcccgccaggcccagactccaaaactgggaattacaatctgaaatgaaatttggtttgggacacagatctacaccgtatcaatagaattataagaaaatatggatagaaaagtaaataaaacttggaaaacaatatgcagacaaaagaattagtttgacaaaggaacggaaattatttttaaaaatagaaatcctagagataaagaatacaataactaaactgaaaaattttattaaaagcttgaacatcagactcaaacaaatagaagaaagaatcagtgagttcaaagacaggacatttaaaattattgagtcacaggagcaaaaagtaaaaagaataaagaaggcttatgaaaattatgggacaccatcaagagacctaactttcacataataggagatccaaaggagaagagagagagaaatgccccccaaaaaagcatatttaagaaaataatggctgaaagcttcccaaatctagaaaaacatgtcaatatccagggacagaagattcagaggttacaatcgaattcaacccaaagacagttcacgaagacacatcataatcaattatcaaaaatcaaaaacaaagaaagaattctgaaaaccaaaagacagaagatacatatcacatacaagggagttgtaacatggctatcagcagatttctcagcagaaaccctgcatgccaggagacagtgggaagatatatactcaaagtactgaaggaaaaaagctgtcaatcaagaatactctacctggcaaagttatccttcagaaataagagagaagtaaaatcttcccgcacctccatcttcccccgaaaatgagggaggtcatcaccatgagtcttgccttacaggaattatgaaaaggagttatttaagctgagaaacagtcactttcatatgctaataacataaaacatatgaaagtaaaaaactcaatggtataagtaatacatagtcatactcagaagactttagtgctgtaagtatggtgtgtaaagcaattttatctctagtatgatgcttaaaaaacaaaacttttaaaagcaactataactgcaataaactgttaagggaggccaggtgtggtgactcatgtctgtaatcccagcactttgggaggctgaggtgggcagaccacttgagctcaggagttcaagaccagcctgggcaacatagtaagaccccatctctactaaaaatacaaaagttacatgggcacagttgtgtgtgcctgtagtccccgctactcgggaggctgaggcacgagaactgcttgaacctgggaggcggaggttgcaatgagctgagattacaccactgcactacagcctgggtgacagaccaagactctgtctcaaaaaaaaaaattgttaaaggatacaaattataaaaagctgtaaattgtgaaatcaaaaacataaaattaagggagaataaaagtgtacagtttttatatgcaataaagttattatcatcttgaagtagcctgttataagtagaagatgttttatgtaagttgcatggtaaccacaaagtaaaaacctatagtagttgcacaaaacataaaaagaaaggattcaaagcatatcactacagaaaatcatcaaactgcaaagaaagatagcaagtgaggaagaaaaaaagaacaaagaatctacaaaacaaccagaaaataaattacaaaatggaagtactgaatccttacctatcaataattactttgaatataaatgaactaaattctccaatcaaaagacataaagtaactggataaataaacaaaactcaactacatgtttcctacaagagactcatgtcatgtttatggacacaaatagactaaaagcgaagggatagaaaagatatttcatgcaaatagaaatgaaaagagagcaagggtagatatatttaaattggataaaatagagtacattagtccattctcacactgctatcaagacatacatgagactgggcaatttatgaaggaaagacatttaattgactcacagttcagcatggctgcggaggcctcaggaaatttacaatcatggtagatggcaaaggggaagaaagacacctccttcacagggcaacaggacagagtgagtacaagcaagggaaatgccagatgtttataaaaccatcagctctcatgagactcacccactatcaagagaactgcatgggggaaaccacctccatgatccaattacctctacctggtcccacacttcatacgtggggattatggggattacaatttgaggtgagatttggatggggacacagagccaaaccatatcatagaatttaagtcaaaactgtaaaatgagaaacagaaggtcatcatatagtgataaggggctccactcatcaaacggatataacaattacaaacatatacatacccaatataacagcacctaaatatataaagcaaatattcatagatatgaaggaagagatagactgtaatacaataacaggagagaacttcagtactacactctcaacagtagacagatcatccacatagaacatcaataaggaaacatcagacttaaactacactttagagcaaatgtacctaaaagacattatgctcagcattccatccagcagcaagagaatacacttatgtctcaagtacaacatgaaacattctgcagaactatgttaggctacaaaacaagtcttaacaaatttaagaggatttaaataatataaagtgtctttttcaatcacaatggtatgaaattaaaaatcaattaacaggagaaaccttggaaaattcacaaatatgtgaaaataacataatcctgaacaaccagtaagtcaaaaaaatcaaaagaaaaattaaaaaaaaacttgagacaaacaaaaacgggacacaggatgccaaaacttatgggatatagcaaaaggagtcctacaagggaaattaatggcatttttttaaaaaaagaaagacaaacctcaaatcaacaacctaatattatacctcagaactaaaaaaaaggaaaaatgaactaagcctaaagttaggagaaggaaggaagtcataaagatcagagcagaaaaaaatgaaatagagactagaaaaacaataaaaaagatcaatgaaactacgagttggtttttcaaaaaaataaaatttactaaacattagcttgactaagaataaaagagaagactcaaataaataatatcagaaatgaaagggcagactttaaaatcgataatatagaaacacaaaaacaagggagaattacgaaccactatacatcaacaaattgtatagctgaggaaacagatgaattcctacacatatagaacctaccacgactgagtcatgaagaaatagaacatctgaacagaccagcaatgactaaggagactgaatcattagcaagaaacttctcaacaaagagaagctcaggacatgatgaaaaagagaagcttctcaacaaagagaagcttcagctcactgctgaattctaccaaacattagaagaactaatatcaatcctgctcaaactcttcccaaaaaactgaagtagagggaatatttccaaactcatatcataaggccaatgttaccctgataccaaaaacacacaaggacacaaggaaagaacattacaggccaatatccctaatgaacatagatgcaaaaatcttcaataaaatactagcaataaaaaaacaaaacccagaattcaacaacacattaaaatgatcagctaaccacgatcaagaggaatttatccctgggatgcaaaagtgtttcaacatatgcaaatcaataaatgttagacaacgcattaataaaatgaagaataaaaaccacatgattatctcaatagatgcagaaaaatcacttgccaaaattcaacatcatttcataataaaaactcttaacaaattaagtatagaaaaaaagtctctccgtctacctctccccctccccctccccctctccccacggtctccctctccctctctttccacggtctccctctgatgccgagccgaagctgtactgtactgccaccgtctcggctcactgcaacctccctgcctgattctcctgcctcagcctgccgagtgcctgcgattgcaggcgcacgtcaccacgcctgactggttttcgtatttttttggtggagatggggtttcgctgtgttggccgggctggtctccagctcctcaccgcgagtgatccgccagcctcggcctcccgaggtgccaggattgcagacagagtctcgttcactcagtgctcaatggtgcccaggctggagtgcagtggcatgatctcggctcgctgcaacctctacctcccagctgcctgccttggcctcccaaagtgccgagattgcagcctctgcccggccgccaccccgtctgggaagtgaggagcgtctctgcctggctgcccagtctggaaagtgaggagcatctctgcccggccgccatcccatctaggaagtgaggagcgcctcttcccggccgccatcccatctaggaagtgaggagcgtctctgcccggctgcccatcgtctgagatgtggggagcgcctctgccccaccgccccgtctgggaggtgaggagcgtctctgcccggccgccccgtctgagaagtgaggagaccctctgcctggcaaccgccccgtctgagaagtgaggagcccctctgcccggccagccgccccgtccgggagggaggtggggggggtcagccccccacccggccagccgccccgtccgggagggaggtgggggggtcagccccccgcccggccagccgccctgtccgggaggtgaggggcgcctctgcccggccgcccctactgggaagtgaggagccccccgcccggccagccgcccagtctgggaggggggtgggggcgtcagccccccagcccagccagccgccccgtctgggaggggggtggggggggtcagccccccgcccggccagccgccccgtccgggaggtgaggggcgcctctgcccggccgcccctactgggaagtgaggagcccctctgcccggccaccaccccatctgggaggtgtgcccagcggctcattgagaacgggccatgatgacagtggcagttttgtggaatagaaaggggggaaaggtggggaaaagattgagaaatcggatggttgccgtgtctgtgtagaaagaagtagacatgggagacttttcattttgttctgtactaagaaaaattattctgccttgggatcctgttgatctgtgaccttacccccaaccctgtgctctctgaaacatgtgctgtgtccactcagggttaaatggattaagggcggggcaagatgtgctttgttaaacagatgcttgaaggcagcatgctccctaagagtcatcaccactccctaatctcaagtacccagggacacaaacactgcgaaagcccgcagggtcctctgcctaggaaaaccagagacctttgttcacttgtttatctgctgaccttccctccactattgtcctatgaccctgccaaatccccctctgggagaaacacccaagaatgatcaataaaaaaaaaaaaaaaaaagaaagaaaaaaaaataccataacataataatcaacatgtatgacaagcccacaggtaaaatcctactcaatggtgaaaagctgaaagctcttcttctaagatttggaattagacaaggatgtccacacttattttcaacatactagtagaagtcctagccagagtaatttggcaagataatggggaaaaaaggcatcctagtaggaaaggaagaagtagaattgtctctgtatgctgatgacataaactatatacagaaaaccctaaggattccacacacacacacaaaaactgaattgataaatgaattcagcagagttgaataaaatcaacattcaaaaatcatctgtgtttctatacaatagtaacaaacgattcaaaaaagatttttttttttgagacaaagtcttgctctgttgcccaggctggagtgcaatggcaagatctcggctcactgcaacctccgcctcccaggttcaagcaattctcctgcctcagcctcctgagtagctgggattacaggtgctcgccaccatgcccaactaattgttgtattttttgtagagatggggtttgaccatgttggtcaggctggtctggaactcctgacctcagatgattcacctgcctcagcctcccaaagtgttgggattatagatgtgagctagcactcccagcccaaaaaagaaatttttaagaatctcatttataatagcaataaaaataaaataattagtattcatttattcaaagaggcaaaagatgtatacattgaaaactataaaacaccaatgaaaaaaattaaggaaaacacgggtagaaacatatcctgtgttctcggatcagaagaattaatagtgttaaaatgcccatactacccaaagcaatctacagattcaagcaattcctatcaaaatgccaatgtcatttctcacagaaatagaaaaaccaatccgaaaattggtatggaatcatagaagactccaaatagccaaagcaatcttgaacaataagtaacaacaacaaagctggaggcatcacactacctgacatcaaaatataataaaaaactacattaatcaaaacagcatggtataggcacaagagctgatacattagccagaggaacaggatagagttcagaaataaacatccatttatagacaattgatttcaataaaggtgccaaaatcacacaataggagaaaggatggtctcttcaataaatggtactgagaaaagtggctattcacatacagaaaaaaatgaaattgggtttttatcatacaccatatacaaaaatatactcaaaatggattaaagacttaaatataaaagttgaagctctaaaactagtagaaaatacagggagaaagcttcctgacatcagtcttagcaaagatttcttggatatgacaataaaagcacaggcaacgaaggcaaacacagacaaatggaattacatcaaactaaaatgtttctgcacaggaaactaaacaatcaacaaagtaaaaaaacaacctacagaatgaaagaaaatatctgcaaaccatacatattataagggattgatattcaaaatatataaagaacacaaataactcaatagcaagaaaaataaactgattaaaaaacaggcaaaggacctaaccagatatttctcaaaataagacataaaaatgccccacaagctgatggaacaaaatgctcaacatcactaattagggaaatgccagttcaaactacaatgagatatcacttcacaactgttagaacagtttttatcaaaaagatgaaagtgaacaagtgctgctgaggatgtggagaaaagggaacccttgtacactgctggtgaggatgtaaattagtataaccactacagaaaatgtatagaatttcctcaaaaaactaaaaatagaactaccattttttcatccagcagtcccactactcagcataaatcaaaggaattgaaatcaaaatttcaaagagatatatacactcccatgttcattgcagcattattcacaatagacaagatatggaatcaacctatgtatccattgaaggataaagggataaagaaaatgtggcatgtatatatcttggaatactattcagcctttaaaaataaggaaattctgtcatttgtgataacatggataaacctggaggacattgtgttaagttaaataagccaagcacagaaagacaaaatggcatgatctcacttacaggtagaatctaaaaaagttgaactcagaagtagagagtacaatggtagttaggaaaggctgggcgagagtaggaaaagggaattgggagatactgttcaaagggtacaaagtttcacttagacaagaagaatactttctagtgatcaactgcagagcatagcgactatagttaataatatatatttcaaaattggtaagagagtatatttcaaatagtcaccacaaaaaaccagtaaatgaggttatggctatgttaattagcttgttttaatcatctacattgtgtgcatgtgtgcattttgatatatgtatcaaaacatcacattgtatctcataaatatatacaattatgatttgtcaattaaaaatataaaaaattaaaattaaaattatttggggtcaaaaaaatctcttaaggatgaaatggtaagcaaaagtgacacaggaactaaacagaaggtaaatcaaggatggtaggcctgatatattcagcatttttaagacaaatctacatataaaattggtttttgtttcttttactttgggcaagttgaaatattaaaaataaataataaacattaaaatatttaaaatgttaaacatttaagtacttaaaatagaagaattttatgtactcaaagttggtaaaaatagattatcttctatctaaataatttaaaacacattaaaaggcttttgtatcaaaagattttaaaaaattcaaagtaaataacaactgatattataacaaaacaaaatgcatgttattttagatgatactgaccgaaaatgccagaccccattccattctcttttcacaatataacaaaaattcaaaaatcatcttacaaaacactttgtagaaaaacacagcgttctcagttgccatagatacacaacattctgcttcatcatgcaatattctgtattccattcaacttcaagtaaaaagaaatacataaaggaaacgtctttattgtgtaactcaggcttcaagagaacctaagattaaaacctagtggccaaaaaaggtacagaaaagggcttgagtacatttctgtggctgtttagtgttcaaagataataaagtgtgttaggtttttttttgttttgttttgttgttttttttttggagacagtgtcttgctctgtggcccaggctggagtacagtggcacaatctcaactcactgcaacctctgactcccagttaaagcgattcttctgcctcaagtcttccaagtagctgggattacagacaagtgtgagccaccacacctggcttgaagtgtattagattttcctgatatggtgcttcaaaaattacttgttggtatacgtaagagaaagcccacgtatccatagctttaacaaggggtccccaacccccagggccatggactggtactggtccttggcctgttaggaaccctgcatccagcaggaggtgagtggcagggtgagtgagcattaccacctaagctccacctcctgtcagatcagtgttggcattaggaagattctcacaggagcgtgaaccctattgtgaactgtgcatgcgagggatctaggttgtacactccttaagagaatctaatgcctgatgatctcaggtggaacagtttcatccccaaaccatccttcaggtccatggaaaagctgtcttccagaaaactagtacctagtaccaaaaaggttgggtactgctggtttaaatagtataggtgcttatttttttttcccttatgttacaaaaagttcagaagtagtctgctacattggcagctcaaagatgtcagggcaactgcaattcagccttctcctagcagttgcaaaatggtttctgtagctttgcatatctggaaaaggaagggtaaagggtgaagggtaaagactgaagggcaaagggtaagtatcaggtgagttgaatccccttttagggggctttcctgcaagttcctgccgatagcaaattaattatcctatttgcatctcaacttacttgaactacattaaatgtccagctccatctacaaagtaagagtatagttttaaaactgtgtctcatgttgccctaagtaaaatcaaggttctattactaataaagtaggaatgtatattggatgagcatctggcagtctccatcagatacagtcataataaatcattactctttctccagtaaagtactattgtgttattatactctaagtaatttgacatatacaattcatattatacaattatgcaattatatataagtacacaattcaaaatatattttgttgtatttaatacatatttaaggtgtaagaaataattcttcaaatattttcatatgtagctagacagatacatagatatgaatagataggcttaaggtgtaagaaataatccttcaaatattttcatatgtagctagatagatacatagatatgaatagataggcaggctggcagatagacataaatggcagaaagataaacatttatttctgtgcctggctaaagaacaaattggaactagtgttctcaacaagaaaaatcaatgaccatgttaactgatgatatctgtagtgcatttgtgaaagacaatcatcagttgatataagaaagacaacatgtcttatatgtatgttagtgtgggtgaagaaaggtatgaaataggagaggtaggaaatgtagaaatatttctagacatttaactacattactaacaccataaaagtttacctaaacaaaacaacaagcctaacatatctatttgtctgaaaaggattttatttctccttcacttatgaagcttagttgcccgataagaaattctgggttggaaattcttttctttaagaatgttgaatattggccgccaatctcttctggcttgtagggtttctgctgagaggtctactgttagtctgatgagtttctctttgtaggtgacctggcctttctctcaggctgcccttaacattttttcccttcatttctaccttggaaaatctcatgattatgtgtcttggggttgatcttctcatggagtatcttactggggttctctgaatttcctgaatttgaatgttggcctatcttgttgtgttgggtaagttctcccggatgatatcctgaagtatgttttccaacttgattccattctccctgtctttttcaggtacaccaatcagtcataggtttggtctttttacataatctgatagttctcagaggtgttgttcatttattttcattcttttatctctaatcttttctgcctgtcttatttcagcaagatctaaattattttccctggtctacttaacttttgagacttgtcgttgcattgtgaagttctatgcagccataaaaagcaatgagatcatgtctttgcagggacatggatggagctggaagccattatcctcagcaaactaacacaggaacagaaaaccaaacactgcatgttctcacttgtaaataggagctgaacaaagagaacacatagacacagggaggggagagcatcaggataaatagctaatgcatgtgggtcttaataccttaagtgatgggttgaaaggtgcagtaaacccccatggcacatgtttacctatgtcacacctgcatgtcctacacatgtatcccagaattaaaatcaaatcaaattacattttttagaaatccattaatgaattaactattcttccctgctcaaagcactgccccttacttcattattctactacttttagataatcagctttcatatatcttaagaatcatatttctttattaataaaagaaaagcaataaagttaaatgggttattattacagttattttcatgaacatcataattgttgcagaatatcactaacattttggaaacacagttaaagaaattaaaactctattttttttttgtttttgtgttttggagaaagggtcttgctctgtcgctcaggctagagtgcagtgcggtggagtgaccatggctcactataacttcaaatggctgggctcaagtgatcatcttacctcaacctctggagtaactggtaccatagttacatgccattttgtccagataattttttaattttttgtcaagatagggggtctccttctgtttcccagactgactcctgggctcaagtgatcatctcacctcaaaagttctgggattataggtatgagtcaccacgcctggccaaaacactttcttacatattaaaataataaattccttttggacaagtattaacattctaaaaaacattttattgaaatataataaatctaaagaaaagggaacatggatgattttctcaaattgaatacctccatgtaactagcactcaggtcaataaattgtatctcagaagtcattacctctccatccaagaataacttgcattcactaattttgtttggttctgtttctaacataaatggattcatataataaaaactgtttgtgatctttgtggctgatttcgttcaactttacatctgtgaaattcaaacatgttattaggtagatttgtagactcttcattcacattgctgtatagtactccgttgtgtgactagaccacagtttacttatccatgttacttctgatggatttgggcattttccagtttttttactattataaatcatgctgctattaatattctagtacatgtctttttgtcaagtacatacatatttcagtagggcacatatgtaggtgcagaatagctgagaataaggcacgcatatatttagttttcttagatattgtcaaatagttttccaaaatggttgtacccatttatattcatattagtagtatacatcagtttcattgttccaccattcttgtaaacactttttattttctgtttcatttaaggcattccattggatgtgtaatagtatagcattgtggttttatttttgcattcccctgatgactaaagaaactaagcccctttttatttattttttttgagatgaagtctcgctcttgtcccccaggctggagtgtaatggtgcgatctcggctcactgcaacctctgcctcccaggttcaagtgattctcctccctcagcctcccgagtagctgggattacaggtgcctgccatcatacccggctaatttttgtatttttagtagagatggggtttcaccatgttggccaggctggtctcaaactcctgacctcaggtgatctgcctgcctcggcctcccaaagtgttgggattacaggcatgagccaccatgcccagccctaagcccctttttatatgttaattggccactatgaaatcaacttttgtgaaatatctgttcaagtattttacccatttgtccatttgaagtcagcccttattgattcacagttctttatctattctggatatgagtcttttgttcaacacatgaatttcaattatcttccccaacctggagtgccctttcacctttgtactggtctcttttgatgaatagaagttcttaatttcaatgaagcccaattttaaaatattttgttttttatgcctttttgtttcctatttagaaaatctttatctattcccaactatcaaaaatgttcctacatcttcgtttgaaaatttaatcgttttacccttcatttgtatatttacaatccttttggagttaatttcataaatggggtaaaataaggggcaagattctttttccccccatatgactatctacttgatactgcaccatttattgaattggtcatttttttccccattgcactgctctagctccttttgacatgaatcagactgatcatataggtgtgggtgtttttggtctctttcttctgttccactggtcatcttgtgccaatatcacactctattaattaccatggtttaacagtatcctcaatatctgataacataagttctccaattgcattcttcttcaagattgccttcactttgcatttcatgtacatcttgaaatcagcttcagagtccccctctgttcccctaaaatggcactgttaagattttgattttttaaaattttttttatttttaagattttgatttttataattatggtgattctatagatttaagaactgccatttttataacatggagacttcaaatccatacacatgatatatccctcagcttattcaggtcttctttagtttctctcaacaacactttctagtttcagaacagagaccttgtgcatcttttgttagatttattcttgggtaagtgatgctttttgatattactataaatggcatcttcttcaagttttattttgtatttgtgctggtaggtacgaataaaatgtatttgtaaaatgtatttgtatatttgtatacaaaatttacttgtatatttatttatatttagtgacctaagttcattaccaataacattttaacaagcaaacattttaagaaactcatagtcacacaaagatgtcacaatgcagatatgtgcataactcattgggctaccttagatgactctcctccgtgctctcttaatgacctgtgaactccactagttacaccttctattataatcatacacctttatgcattggtctatcacacaagccacaaacatgcctataaataagctgtgtattcccagaatctacaacagtagctagtagagagcaggtattcataaattttttatgaataaatgaaagaaaaaatcccgtctgttgaatcctttgactggccagtaagtcaataaaacagtccctgtattaaaaaataacaatgttactattttcacaaatcagccaagtggagacataatgacatgttttctagcctgatattctcagtagatgattattttgcttattttctttctgcaaaagagattagtcactgatgaatattagtaggaaaaagcttcacttactatccaattaagcacttaaagatacaagttttcttttaagtgttttgtttattttttgtttttcaaagccaaatacttatacatattctttggaagctgtcatttagaattcattaattatcattatagcatctatttaaacgtttaaaggtattctaaaattttatctctgctacctaatcttaaagacaatatttaatagagacatttctacattatcatcaataattaaccaagagaaaatgcttctatttatattgggtctcttattatcataaaagtagtcttaaaaggctgatttaaaattacatgagctaatacaagcctaaaaggacaatgagacaaaggtccaagtcataatgaatggtttgtatgatgactggttttgttctttaagtctatttcttatccaatgacacataatgacacaaacatatccagatagtgttcttgcttccttgtaagttgagaattcctttcattaattcaataacaataataggatgatacactaaaacttaaaaatctctaagaatgcaaggaactgactagccagtttcaattgtgctacaaaccaggataaacctcactcgtcaacaccagcgcttttcagaactttgttttcatgacaaaccagtgggttttccaggtataaagttagcatcatatatctaatgactgttaaaaagaaaaggagtagaatttaaagccagatatttagcagcaaatagcatttaataaggatgtattttcaagaggagaaaaataaattaggaaagtcaagtggctagcggaagccccaggaggaactagttagctgacgttcatattgctggtatacaagatttaaaagatttactttaatagaattgctgccaatacttcagagaacatagctgtctttttcagtcatttatgtgtttcacagagaataggtaaatatagaacgctgtttctttgaaaaatatgattttatatatatatatatacatacatagaaataattctaacgataatgcattttcacaattaaaatatgtacattttacacagttagttgctgagagctaaactgataataaatttcaccatttcagtataaattagattatttaagcaatattaaatgagataaatgttcttcaaagcgaaagaaagagtgtgcagcaattttttaaaaagtttaagtctgttacattttgtctcatgggctttatttttgaaacagcaattctctttctaaaacaaactcaaagcttttattttttaattcaaaatcccactgtctgcaatctgcagcagtttccaaatggaaaaagatgccctacagctctgctggcttttaaacaaaatatttctgtaagaagagaaaagcggttcaaaacaagaacagaaaaggaagacttaaaaatatagactatggaaaaatctaaacacattatgattatccaaataatgactgctgattgatttcttttagaatttgagttatatcagattcacatttttttaatcaactgataatctgtaatcaaagacacaatttaccatgtttgacatatatattttaatattttaacatctgttcaaatttgccatgtaagaattacttgatttgcgaataagcctagctataaggattatgttctaaatggggtcccttgttactacactcacaccaaaggtgctttctttatttcagaaacccaactgcacttggcaaaactacatataattgaaaccagtgaagaatatttcttcaacagaagacaaccaaaataatttcctgttcatgggttgctgttactattagttttcgaggagtccgaatctagcacactagacagacagatcaggcctggtgagggctgctcagaaagatgggacataggaatcaggtatgtggggggaatttgaggggatcctagaggcatgcgccaaattgggttcttcgctggatcatttaaccagtccacagcaatgtaataccaagaagacagaaacacatgaactcttagataaagaagaaggagactcaagtaggtctggcagaattgaagaagtaagatcgaatacagacgatgagccaggcattcaacaaaacagtcagagatgatatgaggagtggaccaattaaaagggtagttctggaaccaattccacaaataggatctttcattcctggctatccttatctggtaacatcctcattttgtctggatagggttcttaaggtttctgagattatattatctccggggctttcaattctcccacagaaatacaatattctttttttaacttaaaaaaattaatcatttctccattctctccaatttttggacatgtattttctaatttttcctcattaataaataacatcacaatacacatccatcagcacacatctcacacactgtattttttaaaaaatagccttagaagtagaatcaacaggtaaatggagacacagtgttaaaatgatccttcaaaaaggttatacaactttacatgcccagcagaaatgcatgtcactacctgttttcttaggccttcatgaatttctatctatgtgttaggtggaaaatagcttattgctgttttaattttttttaaactttactagtgaaaataaagatttcttactgtcaatttctaccaaaaattacattggaattttgaaagaaattgcattgaatttgtaggtcaattatcggagaattaccatcttgacaaaattgagctttctaatccataaacaaagaatagctctccacttacttagatctttttaacatttctcttaggaatattttgtttttaatgcttaagtcttcaatttattttatttgtttacttgtaaatattttattcttttcgacgttattatgaattaaatggctttcttaatttcattttcaaatatttcactgctagtatataaaagtgtgatttttacatattttatcctgcaagcttgtttaaatcatgtattagttctagtatatctttaatagattttgtgggattttcactatacaggatcataatatctgatacatttgtacttctttctttccattctggatacattactagtagtagtagtagtagtagtagtagtagtagtagtagtattttgccttgatgcactggctagaagttccaatacaatgttgaataaaagtggcaaaagcagacatctttgccttgttcttaggaggaaaagaattaaatcttccaacattaattttattagctgtggagttttcatagatgtcctttattaggttgagtaaatttgcttcgagtcctaatttgccaagaatttttaaaatcataaatggtgcttgaatttttcaaatgctttttcagcctttatcaagacaatcacgtgattttttcccttattctattaatatgatatgtaacattaattgatttcctaatgttaaaacaatcttggattcctgcgacaaatcccgcttggtcgtggtgtataattgtctgtatatgttgctagattccgttttccaaaatctcatgaagggcttttgtgactatgttcatgacaggtatcaatccatagtttactagtgaaatatttgtccagctttgatatcagagtaatactggcctcacagaattaactgagaagtattccttcttcctcaatattctgaaagagttttcaaagaattaaaattatttcttctttaaatagttgatgtaattcgccagtgaagccatttgtcttagacttttctttgtgagaatatttttaattggcaattaaatttcttattatatttcaattcagattttctattcttgggatagttttgatcatttgtatctctctagaaatttgtccatttatctatgttgtacaaattgttggtatacaaagtttttagtaatatcactttataatcctttcattttctagaaaatcaatagtggtatcctatcctttgactcctaactttggcaatttctaactcctcgtttttatggtttgtcaatcatgctaaagtttgtcaattttgttgatcttttcaaagaaccagtacttggcttcattaattttccatatttttatgtatttcaatcttagctttctgctctaatcttcccccgcccccccctttcttccacttgcttagaagcttgctttgcttttctttttctggtttcatcaggtgaagtttaggttactgatttgagaattttatttttggatataggtgtttaaagctataagtctttctctaagcactgcttttagctgcattccataaatcttgatatgccatatttttgtttccattcagcttaaaatattttctaatttcccttgtaataccttctttgacccattagttatttaaaagtgggttatttactttccaaatatgtgaggatttcccagattttcttttgttgtttacttctaatttattattgttgaggtcaaagaacacactttgtatttccatccttttaaatttgagacttgtcttgtatccaagcatatggctatcctggagaatgttccatgagtgcctgcagtcattgggtggggtgatttaaatcatcacccaagtctcagacttacccataagtggcataagtacaaacagatccaaaggagcacagcaaagactgtgaaacaactgaagctggaatccacccacagaagatgagacaagactttctcactgaaaagaactgggaattctaacaggactcagagaataaaaaacactcagtatatactcttctgcttgcatattctttcattcagcaggattttgagatccatccatgctgttgtatcaataattcattccttttcactgctgagtaatatttcattgtacataccacatttcatttatcctttcaccttctgaggaatattttggttgcccaagttttgagcttttatgaacaaatctgctgtcagtatttgtgcaatagtctttgtctagacatgtctttatttctctttggtaaatacataggaatggaatgactgacatatatggtcattgtgtatttaacattttaagaaaattggcagttttctaatgtggctatactattttatgtacccatcagcagtgtataagagcttcaattgcaccacaactttgtcagcacttggtattgtcagccagtctttatcatcttagtcattctaatgaacgtgtagtagcatctcattttggtttttaatttgcatttccttgatgaatgatgatgatattgagcatcttttcatgtggttattagtcatttgtatatcttcttttgtgaagtgcctgttcaaatcttttgcctgtttttaattggattgtctttttattattgagttctaagatttcttttacattttagatgcaagttcttcgaaatacatgtattgtaagccttgtcttccattttctggtttgccttgtttttgtttttttaatgatgtctttcaaagagcaaaagtttttagttttggtgaagtccaatgtagcaatcttaactgaaatttaatttctagtttaattgcattgtggtaagaaatatgtgttctcagacatgttaagttttagaaatatactgagggttcccttacagtctactaagtcttttaactgttttatgagaacagagatttaatatgtagtgtcaaatggtagaaagttgaaatacagattaagatggcagacaggaggcaggactagcttgcagctcctctccgatggccagagaagtgtatggagactcacatcgtgaactttggctccaagaactactacaggaacatagcaggaaagctgagagaatccacagaccctttgaaagaactggatcacatcactgctgcaggctccctgagacaacaaaacactgagagtctgcttgctttctcaatgggaggctcgtgatctggggcaagttctcaaccctgattgccagttgcctggaaatagactcggtgctgttggaaggacacagtgggagtcagacaggccttcaggactgagggctgtgtgggagcagggtgaggccttgactgctggctttcccctacttccctggtgacctgtatggctcactagaggcagccataatccccctggaaatataactccactcgactgggaaccacactcccatcccccgcagcagtaacagccagccccacacaaggagaggctgagctcagacatgcctattgctgcccccacctagtggtctttctctgcctaccctggtatcagaagacaaaaatcgtaatcttttgtgagctctatggccctgtccactgtctgagaaaactgaatacttaagccggtgtccctagggcaagtttgcatcctccctataggaccatagctgacgcactcttgaagtgccacctcccggctggaggccaaacaacacaaaaccagcgcactaaacaaaaacacaaccaagaaccctcacagagtccacttcactcccctgctatttccaccagagcaggtcctggtatccatggctacaagacgtaaagacagatcatatcacaggactctttgcagacactccccagtaccaacccacagcctggtagctccactgggtggctagacccagaaaaacaagaacaatcactatagctccgctcttaggaagcctcattcctaggggaagggggagcctcattccaaatcaccacatcaagggagcaccccataggacaaaagaatctgaacagcagcaaaccccagatcttccctctgacatagtctacccaaataagaaggaaccagaaaaaaaattctggtaatatgacaaaacaagattctttaactcctccaagagatcataccacctcaccagcaatggatccaagccaagatgaaatctctgaattgccagaaaaagaattcagaaggtcaattattaagcgaatcaaggaggcatcagagaaaggtgaggttcaacataaagaaatcaaaaacatgatacagaatacaaaagaagagttcttcagtgaaatagacagcatatataaaaaacaatcataatgtctggaaatcaaggacacactcagagaaatgcaaaatgcactggaaaatctcagtaatagaattgaacaagcagaagaaagaacctcagagctcaaagacaaggctttcaaattaacccaatccatcaaagatgaagaaaaaagatttttaagaaatgaacaaagcctcctagaagtttgggactaagttaaacatccaaacctaagaataattggtgttcctgaggaagatgagaaagctaaaagtttggaaaacatatttgagggaataatttaggaaaacttccccagccttgctaaaggcctagacatgcaaatacaagaagcacaaagaacacatgggaaattcatcacaaaaagatcatcgcctaggcacatagtcatcacgttatctaaagtcaagacaaaggaaagaatcttaagggctgtgagccaaaagtatcaggtagcctagaaaggtaaacctatcaaattaacagcagacttcttggcagaaaccctaaaagctggcaaggagtggggtcttatttttagtttccttaaacaaaacaattattagccaagaattttgtatccagcgaaagtaagctttataaatgaagaaaagacatagtcttttccagaaaacaaatgcggagagaattcgccaatacaaagccaccactaaatgaactgctaaaaggtgttctaaatcttcaaacaaatcctctaaatacaccaaagcataaatctcacaggacctatataacaataacataattaaaaaacagtaggtattcaggcaacaaatggcacgatgaatagaataatacctcacatctcaatactaacattgaatgtaaatggcctaaatgcaccacctaaaagatacagaatggcagaatcgataagaattcaccaaccaaatttctgctgtcatcagtagactcacctaacacataaggactcacataaacttacagtaaaggggtagaaaaagatattccatgtaaataaacaccaaaagcgagcaggagtagctattcttatatcagacaaaacaaactttaaagcaactgcagttaaagaagacaaacagggacattatataatggtaaaaggactagtccaacaggaaaatatcacaattctaaatatgaatgcacctaacactggagctcccaaatgtataaaacaattactactagacctaagaaatgagacaggtggcaatgcaataatagtgggggagtttaatactccactgacagcactacacaggtcatcaagacagaaagtcaacaagaacaatgaacttaaactataccctacaacaaatggacttaacagatatttacagaacattctacccaacaactgcagaatatacattctattcagaaggacatggaacattccccaagatagaccataacaggccacaaaacgagtctcagtaaatttaagaaaatcgaaattatatcaaatactggtgggaatgtaaagtagtacaaccactatggaaaacactgtagagattccttaaagaactaaaagtagatctaccatttgattcagcaatcccacttctaggtgtctacccagaggaaaagaagtcattatatgaaaaagatacttgcacatgcatgtttatagcagcacaatttgtaattgcaaaaatatggaaccagcccaaatgcccgtaagtcaacgagtggataaagaaattatgatatatatacatacatacatacacacacacacacacacacacacaccatggaatactacttggtcataagaaggaacaaaataatggcattcacatcaacctggatgttactggagaccattattctaaatcaatggaaaaccaaacatcgtatgttcttactcataagtgggagctaaggtatgaagacacaaacacataagaatgatacaataaactctggggactcagggggaagactttgggtgggggaggtgagggttaaaagactatacattgaatacagtatacaccgctagggtgatgggtgcaccaaaatctcagtaatcaccactaaagaaattattcatgtaaccaagcaccacctgtgccccaaaaacctattgaaataaaaaaataaaaaatttaaaaatatatacataaaaataaaaatgttaaacttgatcagctattccactcctaggtacagtagtccctccttatatgttctaagaccctcagtggatgtctgaactttggatagtaacaaaccctatatgcactatggtttttgctatatagctgcattgtatagggcaggtagggtatacagcatggatatgctggataaaaggatgagtcatgccttgggtaggacagagcaggacggcatgagatttcatcatgttactaagaacagtgcacaatgtaaaccttatgaattctttatttctggaattttccatttaatatttttggactgtggttgatggaaggtaactgaaaccatggaaagtgaaactttggataaggtgggactactgtacttattggaataaaatggaaacatatatctacaaaagtaaacgtaaaaaaataaaacgctaaaaaagaaaaagtcaaaatatagctgtcatataatttgttagttacaccccatttggattttacccattgacctgtcagagatggagaaaaatatatgaaaacatcccatgactatctatgtccatttctccatgtgttcctaacatcttttcatatttcgattgagtactcttgcctttagcatgcaaaaatatatccctttgtccagtttattgacttgtattgatttaatttgtatgatagtgttacaatcctactttcctttttttctgaatataagtgatatattttcatcatccatttattctaacttttgtgttaactttattttagttattagttttataaatagtatatttatggatttcagtcttctaatcaataccattttactagaaaaatttaacctattaatgtttattattacaattatatactctatcttattttggacattttgttgtatttctgcttctgttcctttggcagcctctcctctcaagctttgctttttaacttttcaagacttttatgagaatgtacaacttgttaattttattaatgctcatatttaaacattacaaaattatttttacctacatttccctaattttaagaatcttatgagtctcacatatttatgacaaagagttttagtatattttgcttctccaactcttgctattcatctacttttgatccttgttaatgtaatctagggatacaaattcaagttgttaatacatttgtattttctgttttatataccttccttttcaaaaaatcaattaatattagaattctattcttaagtagatttgtaacaattatttaaatttgtttctacttctttggggttccaggtttctctactcatcctttcatatgatggtttccttatgtgtgggaagtcttatgcttcatttctggattggttcatgtattcatacaaattttttccagaaaaatgtggtatatattatatgagctcttatatataagaacatgctttcctattgtttttgtaagcaaaaaactccttggttgtgtataaaatggaatcaccacttttttttactgcatgcatattacatacatgtatattacacgcattacattatatgtaacatgaatggtgcagtttcagcctaccataccatagctgtggatccaggcatttctgtactcctgggggttggggaaggtccctgctgccctagctggctcagaagtgcttgctcctgctgtctggtttctccttgctgtccgtgcccactccaatgttggagcaaagttagggctgagcctgggtgctgtcgcatgccagccccctgctgcctcagccacctctggactttggctgccaatgagcataggagggaagccaagtgggtgctgatggcagctcaatgctggcctgcaggcaacccttgacacctacagcctgggcaccatgaacagcagcagggggcagacagactcctgctcataaggggatgggtccctagtgaggcctcaccttcaggccagggagggcctgaaggctgggaggcctggctgcaagtcccacagactggagtgggaactcgtggtgccttttctgggcctccccatggccacccatggaccaatcagtgtgcacttcctcccctctgaggcacataaaagccccaggctcagccagagaagagcagatgtggggacaaccagctgcagaggggagctaccaactccagggcctcctctctcctaagagctgcagatgtcaggacaaccagctgcagagaggagcaactcatcccagggcctactctctgctgagggctgcagagacatcgggaccaccagctgcagataggagcaacccactccatggcctcctctctactgagagctggggagatgagaggaggacctgcctacagagaggagtaacccactctagggcctcctctctgctgagagctgcagagatgatgggactacctgtctgcagagacgggtttaccactccagggtctcctctctgctaggagctgaacactcactgggacaccctggctgcagaaaggagctacccactatgtgtctctgagctgttctattgctcaatgaagctcctctttgtcttgcttaccctccacttgtctgcatacctcatttttcctagtcgcaggacaagaactcaggacctgtcgaatggcagggctaaaagagctgcaacaaaaacagggctgaaacatgctccttgctcgccttgttgaaggcaaagagaaggagagaagagctacagccccagacctgggcgctcccgagccagggctatgacttcctctttgggttcgtgtggttcttggctcctccttgggttcctgtggttcctggcatctccaagcttccaggtgccaccacattccccagtgacagttgtggaagctgcttgcagtatacctggtccagccacagcctcacagagagctgacacccatgctggcacctggagctgcccacccactgcagcaggtggcatacctgactgcacagcggccagaccccatgcttgctcacataccccttgctgctccatgcctaactcacccttggcaggtgttggatacaggcagtagcctgagccaagagcagcgtatcaggctgagtgggtggaatgagcccagtgggccttagcaaaactcaggcaaaggtgccactagccacagaggtttctggccaaaaaagtgacaccctagggatcccgtaacacagggctcaatcctcagtcagattcaaacatgaaaccttccttaggcacatttctcccacccagtgtgtgcttgggactcctaaggaagataactatagtgtaaaataataagtgagtattgaaacattctttataatcaggaaaaactgaaaaaaactaaatatgcttgagtaggggagctgataaaatatactatattcatatgataaaataaatttagtgttaaaaagattgtactaaaacagcatggttagcacacagatacataatattagatataaaagggcaaacagaaatagtacttaaaatctgttcatatttatataatttttaaaaaaacaaaaaaacatttatgcctgtaacatattaatgcataaataatatatacatacatattatctatgggcattatgtatgcatataaaataaactgaaataatgcagccatctccagtatccatgggtgattggttccagaaccccctccagataccaaaatccacagacagtcaagttcctcatataaaatggtctagtacttccatacaacctgggcacatcctcctgtgtactttatcattgctagattacttctaatacctaatacaacatctacatgtcacttctatcacatggattcaacacagtcctctgcacatggcaaattcaagttttactttttggagcattgtcaaatttttccaaatattttcgatccatggttggttgaatctgtggaggcagaacccacagatacaaaaacacatggatacagagggctgactgtatacactcaattaattataatggatttctccagggaagaaagaataatgtgattagacatgaaaacaaagtaaactaaaacttcacctgaattttttagtttatataaaccacgttaacaattattgcatctttgcgatgggtacccaggtgtttgtaataattccctttattcttttacaaattttgtattttctttaaaaactaaaaaaaaaaaaactacccatcttatataagaattggagacagcctttgttcttcacaactgccagttgaaaataatttgctgtagctgatcaataagacactatttatagaacatgaagaaacacagacatggttaactggagcccctgctctaaagaaactgatcagtcatgggatttttctcttaggattatctatccttccaaagcaaggtacatgcttgccattactacatttatacaggggacttttaaatgatcattctggcattgcttgaaggatgaatcaagtggtaacatctctttctcattctgaatctctgacccgattgtatggctaattttgatacagctcttttaaaaagtgaaatgtttctgtcatatttaagatgagaatgtaccttcctactgagagagtgactttcaaaagggatggtgtggcagcctccttacctgctctttcatttcagcatagactttctctgagttcagttccacctgccgcttaaactcttccagagcggcatctgcctgctgggcctgcaacctctgaacttcagtcacacgagttagctgctcctctttttccctagaaaggttcagagaagcttcagagttaaaatataaaagagctaggcctgaatgaaagaacaatatttaaccccctctaaaataaaatccagattttaatttttttgatccaaatcctacaaaacttccctttagaaatttgacaataaactaatttgtctcaagagaaaaagggtataaacatatattgtgtattctgatgaaggcaaaactgctttcaaagatttctctaaaaacaaaactgagtaaaaccatgtgtctccatcaagtgatgaatgaataaacaaaatgtggaatagctatccaatgggatattagtcattcttaaaaaggaatgaagttctgatacctgctacaacatggatgaaccttaaaaacattcagctaagtgaaagaagccagtcacaaaaagttacatattgtatgattccatttatatgaaatttccagaataggtaaatccatggagacagaaagtaccttagtagttgctagggtctgagaggctggggaaatagggagtgattgccaagggatatgaaatgaggaaaatatgaaaatgttctggaattagatagtggtgatggttgcacatccttgtgaatatactaatatccaccaaactatacacttcaaaggagtgaattttatggtatgtgaattatatctcatgttttttttttaaaacaatgtacaaatagaaagatgtatgtctaccagaagttaatctgcagtgaagtcaatgcaacagagaaacatgatggcctaaaattattttactgccttctagcagattgcctaaaagaactgataaccatctcatttcttcataccttaggcggaaactatatagctgaaagggtccaacaaaacaaaaggaatctttgcatgttgatagaagaaaaaattaaagccttcagtttataaatgcatgccatttaacaatagttaactttgaattctaactaggcgctgggtattgtgcaatggaattttatatggtttggctctgtgtccccacccacatctaatcttgtagctcccataattcccacgtgttgtgggagggacccagtgggagataactgaatcatgggggcaggtctttcccatgctgttctcatgatagtgagtctaatgagatctgatggttttaacaagaggagttcccctgcacaagctctctttttgcctgccgccatccatgtaagatgtgacttgctcctccttgccttccgccatgattgtgaggcctccccagccacgtggaactgtaagtccattaaacctcttttgaaaattgccaagtctccagtatgtctttatcagcagtgtgaaaatggactaatacagaagtttatgtcttctctcatttattctcacagtaaaccagtataagagtgttattacatccttacttacacagaacaggaaactagggcttagagaatacttccaaggttacacacctagagtaacaacaggtcaagccaggattccagtcctgaaagtgtgcttctagagttcctgttgttggctgctatgccacactgctttcctgatcttccagatgccacaggtaagattaacttagctcaccttccctaaatgggaaagcttacacaagtgaaaaatatgttcttactattagctgtaacactgaaggatgctgggcgggggtgggtaatttaactcactcaaaccaaattttagagaaatatcataaaggggagaaaagacatttctaaaacaagatgatgcaatcttttaagacttgggcaaaaagtaatacgagtttttccaggttactcatctgagtttaaaatccactctaagacacaaaaatttctaggcttttcaataagaacgtacatatcatatatcaaaataccaaactttctccctctcccccaccaaattgaaaacctctttcaaagcttaagtggtcaaaagactgataagaaaaaaagtgtcacctaatttctacttcagcaagactctcttgtccctttacaatgaggttatcaacaatatagatatatagatatcgatatagatatagatatagataggggtgtgtgtgtgtgtgtgtgtgtgtgtgtgttctctcctcgcacccatatcccatccccacccctgtatttgggatccgcaaacaggcacatttttgttgacaggctgaaagagcatatcgtgcatgtttatttgtcattttaaacaccaccttgtgtctatttatcttttcatatcccatgtatccatctacctgaaggtgacaataatcattgcaatcccatgataaacaaaacagtttttccactaaatccctgttcctttatgtgtctgttttacagatgtagccaccatttttatgacctacagagtttaatactgccccaaggtgtgtgatgccctgcatgacagttaagccattccaggtcatgaggcatgccacatgtggctctcagtaactgcattttgcagcaatggggtacaggattctggaagtttttaaaagctattcttcaacttgtctactttaatgaactgggacctgggtatcttgttgttcaccatgtttcttacatgttgttaaagcaaaatggtcttaatgttaactggctgttaagttctaaggtcctaacattagtgaggcttttttgccacctaatgtgaatattagctcaaagataatggtgattaataactgaatatcatactgaaggctgattttgggggcaccactatatgaaagactgagcactctgatggctataaagaattttaaattgttctggtgcattttcactctttctatattattctgttcaagaacaggaggctttaagttgtatgtaggatttccctgctacaaacattgaataatttgtttgaatataaaaatatctaaatactaaaacagcacatgggaacaacataaagtcatataaattgttattgggtaccatggtctagacctggcttggcaaatagatgctctctggtgtggtggtcccaattgactggaaggggctgcctggaatgtactatttaaaggattctgagagcaagctcagagggaaagggtgctgtggttgatgaaagggtgctgtggcactgtttacaaggcactggggttaggcagtgcaatgaccgtttagagattatagtgactagtttatgttcctctttaatttttgaggcccttctaaaagcacttgggaagaccattttataattaagattaacatttatcaaaggattacctttggtcagtttgtatataaatacaaaagaaagtatattgaacatgatttgaaaactttaaaagtttatatatcacttactttttaattatggaacattaaatagccaaaagaaagataacacattttataaaaatatatgacctatagctgaaatagcaactttgtcctatctatgttgaaagtcagttttttatattatttgtgcaataattcacatgaactatttaaacacttttcatttaataggatgaatctttttccctataacatgtcattcttacctactaagcttagttcatttactttataactaatttatgaccacataaatcaaagtcataaactttagctatccgtcagataattagaggccattttaaaatatgaaaaccttgcacaataaggcacattgttttcaattgatcatttctaccctgatttacaaatagcaaatattgttttatactcaattataagcacagggaaatatgtaaaatctggtttccagtcccgccatactgtctgaactaatctaatagtaacactaaatatcaaaagtggcctcattcaatgtaattcaatgttcttgtccagtaaaaccataatgaatacattgagctccactaatatttagaaaccttctgcccccttttttttttttttttttctttgagacagggtattgctctgtcgcccaggctggagtgcagtggcacaatcagggctcactgcagccttgaactcctggactcaggtgatcctcccacctcagcctctgggtagctgggaatataggtgcaagccaccacccctggctaatttttttcttttttgtagaaatggggttttgtcaagttgcccaggctggtctcaaactcctggactcaagcgatccaccccggtctcctaaagagctgggattacaggcataagccgctgcacctggcccctctgtcttaatataaattaaatctgtcaattcaaataaagaggtgataatcattttagggaaagatccattttaatttctacatggtaatgaagcagaaatgaaaatgctgaagctttgaaacaggcaaaggtctgctcctagcacaggaacagcgctcctttttaccatgatcccaatagtgcatcctgaaagaaggaggaaaaaaggactgaagattttttttttcccagtggaactagttgtggggccaagtagaaacgcatcactcaaatgccttaaagctgggcctccatgaagataaaaaggtggaaagaaaatttgctttttagctctgatttattcataaagtgcagtaaattttcctcatctgagtatataaaggataaagaaaaaagaagctgcattgttaaacaaccacaagccagctcagattaaaggatgttctgaagtacatgattattccaaaaagggcaataaaatgtagggaactaatggatgacagtttagtatttttgagctttacaagctaacatgtatatgtacaggtgaaccttaatttgaaaatcttccttttgcacatttctgttccagtacatttgataaagatggctgcaacccaacatgtatgtataaggcttcacattacagtatacttcatttcctgccagcttggcatctcccctggaaactccaagaaaaacaacacaaaacaagaaacttcaaacaagtctgaaaaacagctagaagagtccccatgccctttccagctgggctggaaaacaagactcacaagcggcaatatcacctatattcatggctgctggttgttacttaaactgattaaattgaatgactcaaaaatatttaaaataacaactttcataagcatgacagatgaataaactgctttggcctcttcttcacttgacttctaaaactagtagtctctgctaaattctagtttaaaaatggtaaaccctgtagacagctaaacatttgatacttcaacagtcagaaagaaatgcccagtaaaatgaaaattagtattggtcttaatattgaatatatggtaatacttcccaaattgatctacagattcaacataatcaatgcatgcagggccacaagccaaggaactggggcagtgtctagaagatggaaaaggcaaggaatggattattctcataagctcaatgaaactatgatgatccaaaacactaaatcagaaattattctctcgctactaagggaaaagcttgaaacaggtacgataatagcataaagaagttctacagaactctattctgacaaagaccttttattgtcaacaatgtaggcttacccagagagcttgcccacagggtcaaacaccagtcttaaaaaaccatgcctgttggttgaagcatgttagttataaataggaatgaagaatcttcttaaacaattcaaaaacctcttaagaagatatggatgtcagctaggacgtctataaatctatgacgccaactggatttgaatcataattcaaaagaactagttctggcatcaactttgtagcctttattctcagtaagttagttttgttctgggagcagaaacaagggtgctggcagcaaattctaagatctgctcattcaaatactatagaaaacataaaagaagtgtaaaacatggttcctatcttgcaaaaactataatctgactaagggaaaagatgaaaatataaggagaaaaataaaatgatgcaatatcgtacacattaaatcttgtgacaaattttaagtgctaaaagaatacaaagaacgtaacaatgaagtaagaggctatataagaaacaattctcagaggatcaaatttatgtgtaagataggaaataaaggtatataagtaaaattaatgaaagttttaaacagtttaaagtttatgtaataattttatgctaaactaacttctgcctgtaatatgggtccataaataaaacaaactctagctcagcaaatacaaaagcaagtaatacttctatggtaaactaacaaaatattgagaaaattatccttaaagataaagcagtcatggtttatggtgaagaaaaattcctttaaaatctttaaattctttaaacttcaaaataaatcccacatatgatgctattttcgtttatgtccctatatttaacaaatgattaaaacttccatttataaattgtacaccatatatgcagagtttacatacaaactcactaatgtatttcattacagatgtagtattatatcagtatataataaggaaattacgttattcttgtaaaatgacaaaacctaaatattctggaataggtgaggaccacttcttgttattaggagaggaagaaagacagtatgaagtcactcaagcagaatgataagtaaaccaaagccagatcaaaggaataaagaaaaaaggctgaaatgtgaatctgaaatatttatttccttcaaaaacattatccatgccttgtcccagggcagttcaatatttcaaagtaactggaaaatattctcacttacattcatcactatgcacaaatagatcaaatttcaagcaggcaaattttctatttatcaaatataaatgtaatatttatcatgtgacagaagcttttctgctcattatagatgatttctaagtgatatgaaatgaaaagtcgcaatagatatgtcccactacttttagagaattgtattgctacaaaatataacatttatagtgtagccataatttttaaatctttggaaatgatgaagcagagtgaacatttgaatgtctaccctgctcatcacagttagggcagttcacatattatttgacgttatttctattagaaaagttactacattttttagatgaaaacactgaaacttagaatagttaagtgatttgctcaagttcacataaaagtgccagaacaagcgatgaaaacaacccatctgactggaagtccaaaatagtttcgctacatgtaacattatttctttaaatctgtacatacattttttattaacttaccatttcatattaattagctgaatttataataagtacttatcgtaatttatccttacatagcaatatttgtatatcaaatatctagagtatttgaaagctaaaatgttcattagcatttacttaacatctatcacatgccaagatctgtgctcagtattagaactgcaaaaatgattaagacattatatcagttttttgtttttttgtgtgtgtggatttttttttttttttttgagacaatgtcttgatctgtcaccccagctagagtgcagtggtgcgatctcggctaactacaacctctgcctcctgggttcaagtgattctcttgcctcagcctcccaagtagctgggattacaggcatgcagtaccacgcctgactagttttttttgtatttttagtaaacatggggttttgccatgttggccaggctgatctaggaaaacattgtaaaggacttctcattttgttaagatcattatgaaaaatatttaagattaacgtattacatgtacattgcataatacataccacatgcatatcacatacaagcatattacatgtacattacatgcatacacatcacacatgtatcacatgcatgtgtaatgcatgcatattacacacaggtatactgtatttgcattacttgcatgtatattgcatgtatgttacttaaatgaatattgtgtgcatgtatattacacacaagtatacacatatattgcatgcacgaatattacatgtgtgccgcatgcactgcacacatattgcaagcatatatgacatgtataacactgcatattgcatgcatgtgtattgtatgcatattacacgcatacaggaatatcacataaatgtgtattgcatgcatacactacacgaatgcttattacatgtaaatcacatagatgcatattacatgcatgcgcatcacatgtatattacctgcatacatattacaagcatatcatctatatatagcatgcatgcaaattacatgtgcattatgtgtaaattacatgcatgcttaacacatgcatattacatgcatatcacatgcgctacaggcatgcatatcacaggtatattaaatgtatgtataacatgcatatcacacgcatgttacacacatatcacatgtgtattgcgaacatgcacgccacatgcatattgcatgcatgccacatcacatgtgtattgcaaacatgcatgccacctgcatattacatgtatgcatagcacatgcatatcgcatgtatattgcatttatgtattttgcatgtgtatagcaaacatgcatattacatttgtattacatgcatatatgctgcatgcatgtcatgcatgcatataccatgcatatatgcatgtatattacatgcatgttgcacacatattacatgcatgtatgtagcatggatgtcatactgcatgtgtatctcatatgtaaaacatattgcatgcatattacatgcatgtgcactatgtgcctatattacatgcacacatcatgcatatatattacatgcatgcacacatcatgcatgtatattacatgcatgcacacatcatgcatgtatattacatgcatgcacacatgcatgtatattacatgcatgcacactacatgcatattatatgcatgcatattaaatacatgtataacacatgaatattacatgaaagttacctacatcttacatgcaaattgcgtgcattttatatattacctgtatattgcaggcatatggaatggaagcatattacatgcatgcacgcatgtatattacatacatgcatattacacgcatatcacacacatgcatattacatgcatacacatgacatgtgcctttatcacatgcatgtgttaatacatgcacattacaggtatgttacatgttacatgcatgcataaaatgtatattgcacatgtgtatggcgcatgtatattgcatgcatgcacattacatgcatatgtcatgtatatctgcatgctgcatcgcattacatgcatatcacatctgtgtgcattgcatgtatgttgcatgtatgcagttattgcacccatattatattacatacctattacatgttggccaggctgattttaaaaaactttgtaaagggcttcttattttggaagataattattggaaatttttaagaggcttgtattacatgtctattacatacatgcatgtcacatgtcttacatgtatattacatggtacattgcatgttccttgcgtgtatgagatttatattgcatgtgcacatgatacatgtacattacatgtacagcacatgtacagcacatgcatatcacattgcacgtatgtatatcacatgtatattacatacgtgcaaaacatgcacatcaaatgcgtactgcacacatgtacagcacatgcacataacaaatatgcacgttacatgtgttttacaagtcttaaaaatatattacatgtatatgtatttcaggaacacatgtatatcgcatgtatgtacattgcatgtatatagcatgtatattgcacccatgcagcatgctgcatgcatgttacatggatgccgcatgcatgcatatcacacacatgtatcatgcatgtatgacatgaatgtcatacatatcacacatgcacattacatgtgtatcacctaaatgtatgttgcatgtatgttacatgtgtgttgtatgtatatggcatgtatattacatgcatgcatattgtgtgcatattatatgtatatcccatgcatattgcgttatattgcatgcatgtcacatgcatgtatgttacatgcatattacatgcgtgtatattacatgcatattacatgcatgcataaatatattgcaggtatattgctctaacaacactaatcaaaagaaagctggagtcgtgatattaataccagacaaagcctattccagggcaaagaattttgccaacactaaagaaagtaaatttacagtacttaaagagccatatcaacaggaaacaaatgctgaaaataaaagaagcaaagacttattgaaatgcaggggtgaataaacacatgcacaattacatttcgagatttcaatatccctctctatcaataattgataggacaagtagacagacaagaataaagagctaggataactaggatttgaagaacactatcaagcagctaggcctaatggacacttatggactattccacccaatcaaagaagaatacacattcatttcaagagtacatggaacattatcaacatagactattctggaacataaaacaagtctccataaatttaaaaggattcacatcatgcaatgcatattttgtgatcattgtgaaattaaaaatcaataaaagaaagatatctgggaaatccccaaatatttggaaactaaataatgtttttctacacagcccatggaccaaagaaaaaataaaatgagaaattagaaagcattttggattaatgaaactgaaaacaaatatcaaaattagagagatgctgctaacaatgtacttgaaggaaactttatagaattaaacatttgtattagaaaataatatacaggtttcaaaacaatggcattagctttcactttaaagaacagtaaaacacaaaataagtagaagaaaggaaataataaaaatcaaaacagagatcaataaaatgggaacagaagaacattaggcaaaaatcagtgaatcccaaagctggttctttgagaagatcaataaaattgataaacctctagctaggctggtcagaaaaaaagaaacaatacaaattatcaatattacaaatgagagtggttatgtcactacagattttatatgtgttaaaaggacaagaaaccagtatcataaaagaagagaaaaaataatttttgttttgttttttgttttttgagacggagtctcactcttgcccaggctggagcacagtggtgtgatctcagctcactgcaacctccacctccttggttcaagtgattctcatgcctcagcctcccgagtagctgggattacaggcacctgccaccacacccagctaatttttgtatttttagtagagacggggtttcaccatgttggccaggctgatctcgaactcctgacctcaggtgatctgcccgccttggcctccgaaagtcttggaattacaggcgtaagccactgctcccagcctgagaaaaaatttgaatccttacttcttcccagtatatacaaaattactaaaaagtgatcaaagtcctaatgtaaaacctaaaactataaaactttcagaagaaaacctttgtgaccttgggttagaaaaagatttcctagatatgacaccaacagcacaatttataaaagaacaaatactgtaaacacagtagacttcatcaaaattaaaaacacctgctttttgaaagaaaccattaaaagaatgaacaggcaagtcacagactgggagaaaatatgcaaaaacatctatctaataaaagactggtaagcagaatatatcatgaaatctcaaaacttaattataagaaaacagtcaacccaatttaaaaatggactaaagatttgaacactttccaaggtagataggcatatggccaataaggacatgaaaacctttttaacatcattagtcactaggaaaatgcaagtgaaaaccacaataagatactactacacacttgtgagcgtggtgaaaatttaaaacactgatgatatcaagttttgggaaagatgtggagggactggaaaaacgatacatactgtctgcttccatttatctaaaattctggaaattgaaatataaggacaggaaatcagtggttgcctggatatggggaggtggaaaggggtagaccagaaggatggcatgagagcaggagagaacaagagaacgtttggggtgatacatatgttcacacgtatatcttttttgaattggtagtttcatgagtatgtacatagttcaaaatatatgaaactgtatactttaaatatgtgaaatttattgtatgacaattctaactaaataagtgtgttaaaatggcccttaaatgtaataaaatgtttaatctcacttacaagagtactgcaaattaaaaccgtgtcattatttctcacctaccagatttacaaaaatgtttaaattgtaacaacattctacttgggagtctaaaaggcttcgctgttttcttacttctttttttttttaagacagggtctcactttgtcacccaagctggagtgcagtggtgagatcacaactcactgcagcctcagcctccccagctcaagcaatcctcccacttcaaccccccaagtggctgggactacaggcacacaccaccacgccagttaatttttttgcattttttgtagagacagggttttgccatttgtccaagctggtctcaaaatcctgagctcaagcaatctgcccgccttggcctcccaaagtgctgggattacaggtgtgagcgactgtgcccagcccaaaaggcatcctccttatttgcagccaagagaaacttaagtcagtgtaacctttatggaggaaaatttgccactacataacaatactatatacatgtcattttgacccagtattcccactcctaaaaagttaccctgaatctatatcccaaacaatacaaaaattcatatccattaggttattcatgacagcatcacatgcaactgcaaatattgggaacaacctgtatacccatatgtagaacagtggttgcataaacacactggcatactacactgatgtaaaaagaacgagtgacttccaggttataataaatgaaaaaagcaatgtgtacaaaagtatccatgcctttcgtgtaaggaggaagagaaaacaatgagatatgcatgtatctgcttatttgtgcaggaacaaacacagaaatgatcaactagagactagtaagatcatatatccacagaagtggcttggaatggcaaagacaacacagaaggaatgaaggtagggtgacacctctctgaatatacctaatagtccaggtctggcgtttggaatcatattaatgttttatttactaaaaaaaaaaaaatgaaataaggacaggagagggaaattctgaaatgaactacaaacagaaacaaataaacatacttgtatttcaaatgattaataatcacactgaagggggaataaataaccaaatcaactttagaatacaatctttggatcatgtgctcttgggctgaagacgaaaagaacacaaaagaactcttagactctagttacaggtttctttcttcacagagatatggtctatcaattgaaaaaccgtttcctgctattctaggtttgagcaaataagtaaatatataatggaagtcaggtttctcacagtcagagggtaataaaacatataagaagaataaaataaactgttgaatttgactagaaatggaattagtgtgagttcatactttctatatatttagagagatatagaaatatagatgtataagtatgggatatgtgtatgatataaaaacacacatatgtaaatatataaacaacatacacaaatatatacacacacagggatgtatatgtatgtgtctatatattcatttgtttcctaattccacctgctgaaaggggctaaaagcaatttctttggaaaggacaaaaacatacttttagataatttctcagtgtcaaataagaaatcatactgaaaatcatgaactatactggaactgaaccacaaaaaatacactacatataaaaatgtgtgtgatacaacttagcatttcttaaaacaatttaaaactttaaatgcataagatagaataggaaaagcaactgaaagccttttttggaatattctgttttacttaaggtacactcaggaggagtcctaatttgggactaaacatagccttgaaatgacatggcaaaagcataacatgtggaaaagaaaggtgattatctccagggaaggagagagaaaaaacccatacctatcgtaattttttctttaaacaaaaagaatctgaaatgaatatcccaagaagttaccatttgttaaatgcgtacacgtgtgctggatgtgttacgcaatcctcccgacttccctaatttgacctataaagtaagctcttcagcgctttcaacgagaactgctgccctttcttcacacacactaatcaccatggactcggacaagcaagtgtgaacacagtgttcagccccctgcctctctccccagggagggcctattgtcagaatgtccccctcccctgcctttacaggctctagtgggcggctctagctgtgacctggtgagcacatttaatctaatgagaaaggattcccaaccttcacctggccacacacccaaaccacaacttcatctataggattcttctatcttcctgaatgtgttctaaatttgagaggggaagagcatgttatttattggccttgactgtctcccaaatcaaaaacgttacccttttttttaggttctacacaaatttacaataactagtttatagttgtttatagtagtttataactacagaaaaaacctgaaatgtattgttcctaataaagcagcaatgtcattaattttattttcatgaataatcttccttaaaatttctaaggaccctatagaagtatgccatctgcatactaattcagactttgttagtaagaatttgtgataattttgacaggggtgagatattaaagttcacctgtatttgttcttaaaaagatctttttaaaaaaatacatattgtaataacattatataggccatatttaatctattttttaaagtaaacttataactttttctttttttttttttttttttgagacagagagtctcactctgttgcccaggctggagtgcagtggtgcaatctcagctcactgcaacctccacctcccaggttcaagcgattttcgtgcctcagcctcccaagtagctgggattacaggcatgcacccccatgcccagctaatttttgtatttttagtagaaacagggtttcaccatgttggccaggctgtctcaaactcccgacctcaggtgatccgcccgcctagggctcccaaagtgctggaattacaggagtgagccaccaggcccggccactttttaaacaaatgtttaaaatgccttttaactcatggtaaccaaataaaaacagctgtatattataaagacatgagatctcagcgaaggtgtctcttgagatggaactggaataaacgagactctgctatgcatggttgcgtttcttacagcatctgtgcttctctttgtgcatctgccccgctttcctcttggcatcaacacaactactcgacactttagcttgcgtatggcccgtagtggctgcctagtcaaccttcctcatagaaacgttccaggttttcagcttctgcattgagtcagtctcgcagttttccagttccgaattcccaagcttcagggaagaagagcaatgcagtatagcacagtggttaagaatagaggctttaaagtcaaacacacacaatttcaaatcctggcacctccaccagctgtgtgacttaagctctttgtacctcagaacaaaatgatgcggctgcctttggatcaggtgtccactctagacccaatgaatgtggcagagaagggaagatggtcctatggcagagaacatggtgggcagcagtcagagctgtgggcagggcagattccccaatgtggggttaagtgaggaataagtggctgagtacagtggctcatgcctataatcccgacactttgggaagccgaggtgggaggatcccttgaagccaggaatttgagaccagcctgggcaacaacgtgagaccctgtctttaaaaataaaaataaaaaggccaggtgcggtggctcacacctgtaatcccagcactttgggaggctgaggcaggcgaatcacttgaagtcaggagttcaagaccagcctggacaacacggtaaaaccctgtctctactaaaaataccaaaactagccagacatggtggcaggcacctgtaatcccagctactcagggggctgaggcaggagaatcacttgaacacgggaggtggagtttgtggtgagcagagatactgccatcacactccagcctgggggacaagagtaagactttgtctcaaaaaaatttttttaaataaaaaataaaataattagccaggcatggtggtgcatacctgtagtctcagccacctgggaggctgaggcaggaggatcacttgagcccagaggttgaggctgcagtgggctatgatcatgccactacactccagcctgggtgacagagcaagatcctatctctaaaagaaaataagtaatgacatatctagtatatgttgccatctttgaatgatttggatccaatcatttaaaaagcacaaaaggaaaatactttggtgacataaaggtaaacattggcattctatcaggaaaagagcaatgaagtaggactcggtgtgccccggagcaaggcccagctcggtcacgtgccaactttgcaatattggtcaaattgcttgaacaatcggtgaaatctctatgaacctcagtttcttcctttcaaaatgcagataataacaaacagccacataggattctttggaggataaatatattaaaaccattttgttaacttgaaaacactcaaggaagtattattgtcctttattagcatattttactccccataagggttacatttatttcacacttcattgctaatgcaaattttgactgcagtaaaactcaagaagctaaatatataaactgctaaaaaatgggttttgcaaactcaattcctaaggaaagcatccaagaaatgtaaaaatatgttccaaattaaacctgttgtgtgaaaatgtgtcaaaaatgtctctgtcagtagaggcctcttgaccatcatattctactgacactcatttaaagcagtatgtttttgtgagaagtgctgagttctctaaagacatatctacaaagaaatacttcacagaatgaaaatttccctctcaactggaagcaaggtaaccacacattgctctcttctcttcgagctttacattgtgcttcttggagggttaagccagcatgttcactggagcaaaggaatgtttacaataaactggaaaccttgcctgctctggatctaaaatggttgcagatgctcaagcagagaggagaaaagagaacagctgctccccacccccaccattgatacttaagagagctatttttaagaagaaaattatattcagaggttttaggcattttgtttatttttaattttatttatttatttattttttgctttttgagacaaggtctcactctgtcaccctgggtggagtgcagtggcaatcagttcactataacctcaaactcctgcaatcctcccacctcagcctcccaagaagctgggactacaggtccacacctctacgcgggtctatttttattaaaaaaatttttggtaaagatagagtctcactatgttgcccaggcgtgtcttgaactcctggcctcaagcaatcctcccatctcagcttcccaaagctctgagatgacaggtgtgaggccactgtgtctggccttaggctctttctaaatggtagggataacttttctcagtatcacacaaattattatatcaatacaaaactgaataccttaaatgtgcctaccagaaaagaatgtaaattcttgttattgccttctagtaatttagctattattttcaacttaaaacataacgattccagttacaagaaaagcaaactattatattcccagtaaatttagaaaattattaaaatgaaacatctttaatatataataaacatatagtcacatcatagccacaacctgcaaaatgaatgagtacccaatatgggtaagataaaccttgcatgatgaattggaacatcctctggtaaaaaatagtttgaaactattaataatagtttcaaacgctatcaccattctaaactacacgatttcgtcataataaagcaagctaaggaacaattaacttaccaagtaaagaacttaaaatgtttctaattataatcacataacaccccattaaaaaagaaaaagccaaatcaaagaatcagacatcaaaaggccattaggtctctcgatacagaccatttccagacctagtttactccacataaaactccattggggcgttttcatttttcactaagaatagagatatatggttcaaattactgtttcttcaaagtccctcgacatttgtgtattctacaactaaaatgaataaattttatatcaagtaataaaaaacttgaggattcaggctttaacagtaaccagttttaaaagaccattgttaaaattcatgacatcaaacttcagggactatgatttaggaaggaataaaggaaattcaatgaggaaataaacacaagtttttgaaggatagaaatgtttgacatttatttatctattgtttattataatctgacaaaatctttcttccagaaaattaggtctgtttgctgtacctctaacctcatgcttggacattaatatggcatcagactcatgcccttggaacatgttattccttctggttggaaaattctctctcctccaccagtttattttctgtcccttccttcaaaacttagcttattggcaagaaatattcagggaagtaagcttttctccaatgtcactttgatcatatactctgttaccaattcttcaaccattgaccatttgggggaatttaaggtctccctcaaaatgtaccaccaggctctgcgctttctgttccagctggctcatcttctcagcttttttttctttttttgagggggacagagtctcactctgtcacccaggctagagtgcagtggcacgatctccactcactgcaacctctgcctcccaggttcaagtgattctcctgcttcagcctcccaagtagctgggattacaggtgccggccaccacacccagataatttttatgtttttagtagtgacgcttctattaaagaaatgtctttagtagaacatggagaggggtttctccatgttgaccaggctggtcttgaactcctgacctcaggtgatccacccgtctcagcctcccaaagtgctgggattacaggcgtgagccaccacgcccggccatcttcttaggtttcttcacatacacccttgcactctccatctctacatattagttcatgatcttctaacttcctgggtaattttactatatggaagaataaatctatagggtatacaagccactgtgttcaggatataacttgggaacaccattaggaagagatctactattaaaattagtaccagattaacagttaacttatggaaatttattacttatgaaacttattttctgagtctctatgaagaaaccagcatattcgatagctaatagccaacatatctatgagaagtcaccaacatggaagatgtttttcctatatttcagagcactatttaattttgctttcttcctttaaaatttaacacacaggcttaagtccaaagtgaacctaattgaggttgaagaagtattgtttcggtatggctgatcttttctcagtcgtggtttttgatttttttgtttgtttgtttttgaaatggagtcttgttctgtcacccaggctggaaggcagtggcacagtctcagctcattgcagcctccaccacccaggttcaagtgattctcctgcctcagcctcccaactagctgggattacaggcatgcgccaccatgcccagctaatttttgtatttttagtagagacggggtttcgccatattgtccaggctggtctcgaactcctgacctcaagtgatccatctaccttggccttcaatcatgttttggttgtaaaacttcatttatcattgtgattggcactattttttggatttgcaaatatataaaaaaatttaaaataaatacataaatgagctgctacaggaaaagatggcaatactgacatagtaaaaatggccagcaagtataacaacctaacgatttattgtaactttctgggtataagataatggtgtttttatttactatatatttttaaatatttttctttttaatttttgtaggtacataataggtatatatatttatggagtatatggaatattttaatacaggcctaatatgtgtaataatcacatcagaggaaatggggtatccatcacctcaagcatttatcctttgtgttacaaacaacccaattatatgctattttttatgataataactatacatggatggatatggaaggtaaaaattcgtcagagtgcttttggtactgattagcagagaaaaatgtgctttatgatagctggcataagacatacaggcaaaatatccccgaagtagagaagggcaacttgcccaacttaactgcttatcctaactagatagaaacaccatttaagaacacacaattctcttagttataattctatgattatcagacaacatttcaactgatggtttgaattcttgaacagactagcccactagaaaaacatatttttatcaagtgcctggaaaccctttaaataattttcaatggcttttctccttttgtgggcgatagctgcagttccaattagggtaaaagggaaatgtgtgtgccaactgccagagtattattttggagaccaatactgaaagccaagtatacaaacagtaagctgtcccagcaattccactcctgggtatatacacaaataattgaaaataggtactcaagcgagtaattatacataaatattcatagcagcactattcacaatagccaaaaggtagcaacaacccaaatggccatcaatagttgagtaggtaaactaactatggtatatacacacaatggaatataattcagccatcaaaaggaatgaagtgacaatatttgctgcactgtagatgaacctagaaaacattacactaagtgaaagtagctccggacacaaaaggtcacatattgtatgattccatttctatgacatatccaggaaagataaatccctagagacagaaagcagaatggtggttaggaggatctgacagaaggcggggaatgggaatccactgcctaataagtataggattttatttgtgatgatgaaagtgatctggaactaaatagaggtagtcattgcacaacaacgtgaatgtactaaatgtcactgaattgcttactctaaaatgtcaattttatgttatgtaaattttacctcaatttaaaaataaatgactgtagctgtaactgtggagcaggagtccaaattcaaatgcctacaggggccaactaacaaaaatgaggacagtgaaccaaagaccgcacgcccgccatgtaattatattcctttaatgttgtttaatttttgccttttagtcttttatatagttgggatatgtgtcccctccaaatatcatgttgaaatgtgaccttccaatgttggaggtagagcctagtgggaggtgttggcttatgggagtgactccctcatgaatgtcttggtgtcagtcccttggtgatgagtgggttctcactctattggttcatgccagagatagttgtttaaaagagtgtggcaacccttcctctccctcctgctccgtctcttgctctgtgacatacctactccccctccaccttctaaccatgagtaaaagcttcctgaggtcctacaagaagcagatgttggcaccaagcttcttgtacagtctgtagaactataaacctcttttctttataaatcacccagcttcaggtattcctttatatcaatgcaaaatgaaataaaggaatcagagaaaatggagactaacagtcttttctccgcttttcctgaccagtctaacagagacctgtttaatttgttcacttattttattaaattggttttgttatctctctacattgtgtttctgatttcactgatctctgctcttagttttactatatttttcacacttactttgttgctttttatctagtgttttgaggttaaggcttagcttatttcagtctagataccaatttaagatactctacaacatttgatgagtaatgctatcattatctttcagttttaaatatttgacaattttattgtgattttctttttaaccataacttatttaaaaatacaattttacatttccaaacctaaatccaagggttttttttaaactggctgcttattattgatttctaatttgattgcacagagaacataaaatgttgtctctatgacagtgatactttaaaggcagttgtgacttctaatataaccaatcagttccacttgttgccttgacaaggcaggggtcagtggtgccagatctcacatagttcaaaagaaactagaaatctaaaatttatgtgaaatcttctgattttataatgttggcaactaattgaaaattttcgaaacgttgcacaggccaaactaaatatatatgcagatgactcaacctgcagcccaggaatttataacatctgctggaaagcctgaacctgaacagaagaccgacaaaacagacaagaaaaaaagcacaaaagcagcaaagataagagtaagctacaggagaatattatgaaagaaaggaatggcttatatgacacaatcctggaactctgcctaacacaaattttaaagtagaattttaaaattggaacatacataaaaatattaaaatatcatatattaataagtgccataaagaaaattaagcaaatagcccaaggccaagatacacatttgtatagcattgctgtaaggatggcacagaatgatagttactgaagctatactttcgaactggattgtctcatgaaataatctagagtaagacaagagtaggatgaacatgcaaaaaagaccaagagggatgacgaaaaccaaaagaatgtgtgccacagaaaatgaagaagaaaatgtcctgaggaagaaagactgaacaaaatccagattggaggtcactggtatccctaggaggagaagttttggtaacatcagggaataacccaaactgcattggcttgaaggtagatgatgagaaatctgaggcaatgagtaaaataactccttaaagaaacctgaatataaaagcaaagaaagagagagaagccgcagttgaaggggttggagtgagattaagaaaaaagttttaagatggatacttactcatgtctaagtgttgaaaggaccaatgtagttaagagataccaagagggccctgaattagacttcaaaatggaggaagatgcaataattgtaagaggaagcaaagaactggtggaaggattggtacaaagaaaacaccctataaattaacaaaatacaagaaggcaagagtttaaaagaagaacattaatgaaaccagaaacaatattttggcctggagtcacaagaatagaagtagtatcacttttacatctaactagtggtggatgacaggagaggtagaggaggaccacttgtcagtctaaaagtgatggctaaggttttactatacactccatgaacaaatggtgccaggaataattttttaagggataaaagcttcagaagaagttgtctatggtctactatattaataaagcatatattcaatggtgtgaaaaatcaaagaaccgttcatgacaacagagaaaatgatgatgtttctggagtaaaagaaaaaccatttgggagatcatgagtcagtctttgattcacttattaattttgtagaaagctaaccgtgttccactgctcaggaggtcatacagctctgcatgcctcactccatcctcttgaagatgaggcataagaccacaaagcaagctgagatcaagggcttttgttttttttttttttaagaaatcaagtttcaaagtaatggaaaggtcagtgtgcatttagagtttaggcctacaaactaatctgtgattgaatctacagcaaatcacgataatttattccaaaagtgatgatgctgacttatcctaaacttatccattatgcaactgtaaagagaattgaagtaatagatcacatttcaaaaagaatcctatcaaaaaatctcagtaagaatagctctaggtttcatagataaaatgatatctggctaacatctctccaatagtctcccccaagtgctcactaaaatacctagaaagagaaagggggaaaaaaaataaaacatcgcaagaacagtaataactcagataaacagaaaacacagtgaaagaacctgggcagaatctccaacaactataaagtacatggaaatagactaattaaaaatatatctatacagatctacctgaaagcaaatgtaaattagcttcaggaaacagaacctaagaaaaattatataggaagacacattctacctccctcaagtcaaagattctgtgttgaaaaaaatcaaaatatttactatgtgtgattcttctatgataatgctttttccttccatggtggtacgtttttctaacatctactagtgtttcacacacaatcattcagagccagcaactcccaaaatgcatcggattaaagtaaagtacaaatgatgttggtgtactatatgtagggagccatcatctccacagctaaaggaatatacttggacacaaaaagagggaaaacaatctgagttcaaaacatactgagaactatacgattcattatttcattcaaaaaatcaaagacttataatataagttataaaaagatatatcactagtaaagcagagtttctacaggtaaaataatcctagaaactgggaacttcactggcagctgaccaatgtttttatccacctgaaaatcttcaagagaatatgaccattatacaagttgacatggagaagacacaagacaatccatacccaaaatacacagtagactaatatcagaaagtccctagaaaagtgtacaaacagtgagagctcaacaagtgtttgttaaataaacgaaacaccaagactttacaaaatctcccttattcattattgagtaatgagaaaaaaataccagttggagactaaaagctattgtagaaccaggggaaaagaacaacatcctataaacacagaataaaaatataccatcaaaataatctaatatccagaagaaaatatcagaaaagtatgaggaatcgtaaagaagaccgtctctatgaaatacaaggtaaaatcttaagaattagctaagacaaaaagagaacagaataatatttaaaaggggatatgattaagatgaaaaatagaaaagaagcaaaaatgcagagcacaataaaaattcataatggaagtggcaaagagcaaaaatgcaaatcagtgatgttgtaaaccatcccatatactcagaggacaaaaacaacacatgaaaatatgagaaagaaactagaaatatgaaagaatgataaaagagctacaaaagtgaaaatggaaaataaatgctaaaaaaaggaaaacaatattagaaataaactaagcttaaactttttaagggaaaatttaaaatgttgatgtcttactgtatcctagcacaaacagaaaaaaagagaattacatctgattcagatttctggtttcaaaatggcggcatagaagctggcttcactctcccacacagaaaaccaaaaacaaacagacagcactgagattatcaccagcaatatcacagaactcaaatatgagaatgaggcagttcccaggaccacagggaagtaaaaaacaactctgagcagagagtaggagaaccacacttccatgtatacaatgtccctcccctccaatctgcccaggcatacagaaaatttcccctcgacccagagtttccacactagaaaaagatcaaggtggacaaccagcttctccaacatattgggttccctggcagaggacctgtctctgccttaagccacaggaaacattgtgagttcctgaagggagaaatattcctgaggatagccagagacaaagggagaggtgagtctatcattctcagtcctggaaactctgttctgtaacttggccaaaaaagacaccaaatcagagtgactgttcaacagcccaggtcccctaggcacaaactcctaacccgccttcccacactactaggatatcccatttaggactttccatattcaggacaggtggcactctgattgtttactagaaccaagcaaaacctgggcttaaggtgccatctagtgacaaaaaggaggcagtgatctagcgagataagaaagaaagaaatcaacaaatcaattataatgaatcactaaagcaaacatatccaataaaaaacaaaacaagtcaggcaaggaaaactgaataaataactaatccttcaatgcaaagacacagatgaacatcctcaagaaacaacagcaaacaacgaaccatgaactcctcaaagagacagagcaaggaaccagcaactgactagtatgaaatgatatgtgaactctctgaccaagaattcaatatagcatttttaagaaaactcagtgatctccaacataacacagaaaagcaattcataaattatcagagaaatctaacaaagaaattaaaataattgttaaaagatcaaacaaatcttagagttgaaaaatacatttgctgaactgaaaaattcatttgagactctcaatagcagaatggttcaagcattgaaagaacctgtgagcttgacaactggctacttgaaaacacacattgagaggagaaaaaagaaaaaagaatgagaaaaaaagatctcctacaagatacagaaaattatcttagaagacaaaatctaagaattattggtgtccaagagggagttgagaaacagtgagaggtagaaagcttattcacagaaataataaaagaaaactttccaaaacttaagaaagagataaatgtccaggtacaagaaggtaagaaagcaccaaacagggccagacgtggtggctcacgcctgtaatcccagcactttgggacgctgaggcgggcagatcaccaggtcaggagatcgagaccaccctggctgacacatggtgaaaccctgtctctactaaaaatacaaaaaaattaaaaaaaaagccaggtgtggtggtgggcacctgtagtcccagctacttgggaggctgaggcagaagaatggcatgaacccaggagtcagagcttgcagtgaaccaagattgcaccattgcactgcagcctgggagacagagtgagactccatctcaaaaaaaaaaaaaaaaagaaagaaagaaaaaagaaaacaccaaacagatttgacccaaataagactatcccaaggcctataaacattgggcactcaaaggccaagacaaagagagaatcctaaaaggagcaagagaaaagaagcaaataatttaaagaagctccaattcatttggcaacagacctctcagggaaaaccatacagcccaggagggagcaggatgacagtttcaaagttcagaaagaaaaaaaaaactgtcatacaaaaatgctatatacagcaaaactatccttcaaatatgaaggggaaataaagtctttccctgacaaacaaaagctgagagaattcaccaacaccagaaccatcttacaacaaatgctaaacagagtttttccattagaaagaaaaaaatactaacgggcaaaaagaaaacatttgaaggtaagaaacccactggtaaaattaagtatatgaacaaacccagaatagtctaatactgttaactgtgctgtgcaattcactcataactctagtatgaagccaaaaagacaaacctataaaaaacaatactacctacaggaacctgttaagagacgggcaatataaagatgtgtaattgagacaacataaagtctaaatgtggagagataaagtatgtaagttttttcattttttgttttttcctatactttgagatctaagataaattttcatctctttaaaataacttgttatcgctataaaatgctttttgtgagcctcatagtaaccacaatgcaaaaacctataatagatttactaaaaataaaaagcaattaattaaaacataccaccaaagaaaatcatgtaaccataaaggaagaaagggaaagagaagttaccaaacaaccagaacacaaacaacaaaataataatatttaagtccttactgatcaataataacattgaatgttaatgaactcaattctccaataaaaaggcatagagtgtagggcagagcaagatggctaaatagaagcttaagtgattcttcccctcaacagaaacaccaaattttaacaactatgtataaaaagaaccatcacaggaaccaaaactcaggtgagcaatcacagtatctacttttaatttcatatggctgaaagatacatcaaagagggcaggaaaaacagttttgaattgctgatgccactcctcccccatccaccagccagatagcatctgtgctcttgggagaaggagagcacagagattgtgaggctttgcattgaacttagtgctgctctgtcatggtggaaaagagaaccaggctgtagtcagctgacatctgcctgcagagagggcacctggactggcccatgcccagaggtgaaccgctcatcccaaaggtcagaacttgagttctagcaagccttgccaccacaagctggagtgctctgggaccttaagtgaacttgaagggcagtctaggccataaggactgcaattcctagggaagtcccaatgctgagctgggctcagagccagtggactagaggggcacacaacctactgagacaccagccagaaaggctgaagggaatgcctgtatcagctctcccaagccctgggcagtggccatctggcatggagaaatctgtgtgcttgggagaggaggagagcagcgactggggaacttcacattgaactcagtgctgccctgtcacagcggagatctggcaggattcatcacctgctaactaaagagcctctggtccctgaataaccaacagcaatacccagataatacaccttgggcatcaggctctgagatgtcctggcttcagaactctggataggttcattttatcacaaccttctattacaatggtatacaaaataattctcttttggattaccctagaacttgagtggccacgacaaagaataaactttttaaataatttaactataatataattcagcaatttctggttacttttaatcgaactttgatataattcattgaattctaggtaagtggaatccaagttgatttcatacatgtcaaatatttccctcttgctccccaactctatacagtatctatgttgtgagaggtaacgttatactcatatatgaaaatctgacatattttggttgaatgatacgttataaattgcatgtgttcctaattttagtaatagtagcaatagaaaaaatatattcaaaagttacaaacttaattaatctttaaatatatatgcatcagttaaaaacagcaccatatcttctttattaagtatcataagttataggttacttttatattctggtagaatagtatttagaactaatctttcaagaatactttttgaaagttcgaatttgttttctaaacagaataaaatttcttatgaaggagaccctacaaaggtgttttcacttacatattaggtacagaaatctttgtgtttactattcaagtttgcaggcttccttttaggctatttctagatgtctccttaattcaattttttttccattttaaatattactattaatttcttgagatatttttcaccaaccttacaaacaaaatgatcaagtcacaattcctcactttggcaattttaaaactaaattcagatttatactattcagttatactttaaaatcccatacaagaccaatttaacctagctttccctgtctaccaaaattcaaaattcaagctcctaggtaaactggaaggctgtctgcttttaatacaacttcatccaaatttttgcagtaggcaatgttccattaaaaaaaaaaacaaacctaatcaaaatgaagttcactctttctatgaataatcacaagattgtttagtattccatttaagtcttttattaagattagcgtctagcaaataaaagtacaaaaacagtcattatgactttgcagttttagtatctttaaggtattcctatttgaagattaatccctatttcccctaatattataaatgttgatttataacaacaaacaagcaacaaaagataaatgaagaagatttaaaagtgtcataggaaagctttttcactcatgtttaaaaatataacttctttaaaaatataactttaggggtaaataatgtttttccactgtaatggaatattataaaaactatgcatattaagcaagaaaagatatgtttccaagaagctatatgtcagtttgttggaaaaataacaagtaaaagtgaagaaaggcctccaataactccaataacttcttccctttggtctcaaactgactgggttcactcacttctattggttctttgataatgccaatgaatagtctaaaatttctgcttactccagggactgaattaggtacagaaatctttatgtttactattcaagtttgcaggcatccttttaggctatttctagatgtctccttaattcaattttttctccattttaaatatcactattaattccttgagatatttttcaccaaccttacaaacaaaatgatcaagtcacaattcctcactttggcaatcttaaaactaaattcagatttatactatcccgttatactttaaaatcccatacaagaccaatttaacctagctctccctgtctaccaaaattcaaaattcaagctcctgggtaaactggaaggcttaattcttcccacatatgtgtattcttttttgttttttatttttacttttaagttcgagggtacatgtgcaggatgtgcaggttagttacatatgtaaatgtgtgccatggtgatttgctgcacccatcaacccgtcacctaggtattaagcccagcatgcattagctatttttcctaatgctctctctcccccacctcaccccctaacagggcccagtgtgtgttgttcctctccctatgtccatgtgatctcattgttcagttcccacttataagtgagaacatgtggtgtttggttttctgttcctgcattagtttgctgaggataatggcttccagctccatccatgtccttgcaaatgacatgatctcactgctttttatagctgcatagtattccatggtatatatgtaccacattttctttatccagtctatcattgatgaacatttgggttgattccatgtctttgctactgtgaatggtgctgcaatgaacatatgtatgcatgtatctttgtaatagaatgatttatactcctttgggtataatatgtgtattcttaacaaaacataaaagcatgatgaagatatatacccagcagaagtgtgtatatttagttaccaaaagaaacatataagaatgttcattgcagcactattaataatatccccaaaccagaagcagcccaaatgaatattgacagtagaatggataaatatatggtggtatattcaccttgaaacactattcaacaaatgagcatgtaaaaactacaatgatacacaacaatataaatgaatctcacaaacctaaatattgagcaaaagaggccaggcacaaaaaactgcattctgtatgattttatttatgtgcagttcaaaaatagataaaaagtgaaaatagtggctgctcttgaaggtggggcagtgacggttaggggcttgggagggaggcttctgcaatgctgttaatgttcagtttcttgatctaggagctgcttacatgggtgtgttcagtttgtgtgctttttggtatgtatgttatacttcagtagaaagttataaaaaccatgagactgcaggataagtcccctcaataaacttcggttcataggaaaaaaaaaaaaaactgcatggagtcagaaaaggggtgttatatgtcaatatcagatacatatgagcagaagacatctccagttcatggccaatacggcttgtggctagggtgttttctaaaacccataatctgagatgaaataaacatcctaatctgggcatgacagtaagatttcaaaggacaggattagtgcaagtctagaaatgtcaccatgcactttttcccttgcatagttaggctttcattgagttgaccacatatgtggtttacctctcaatctgtgggacctcaaaacatcatttggcttctttttgttgttgttattgagacagggtcttgctctcttacccaagctggagtatggtggcgtggtcatagctcactgcagtctccaactcctgagctcaagcaattctcctgcctcagcctccttagtagctaggactatagaggcatgtgccacccagccagctaatattgttgttgtttttagagatggggtcttgctacattgcctaagctggtttcaaactcatggcctcaagcaatcttcctgccttggacttccaaagtgctgggatttcagacatgagccattgcacacagccctcatttaacttctaataggaattttgtccacaacgtacagaaaaatagttctaggagaataggatgtgggggaaaataggaaacacacggagagccaaacatgtaaaaaagaacacactcatggcacttccttgaaaggaaaagaacattccagtttcaacactccctgtcaagtgattacaatactaagtgatcatttggggcagttcatttgtatccctgcctgctgtggggccactttcggttctctttctctctctggtgccattggcctaatcacaagtgagaatgctgcctctaagggctccaccatcaacccctgaactaaacatctttcatgtgccccttcggcacactcattacccttttgcacccagttctgtgccccaggggtgagtccctttgatctccatcaaacccgaagagctcccttgcctttgggtttcaagttgaattcagcaaggagcctgatcatcagagtcccatgttgttagggattaaaagaaaatggaaaggctgaagagttcttggagtggggtggggtggggggtggggaggcaagttttattccccattcctctcggaattctaacctggctttgattgtttttgttcttccttccttggggacaaggaagtgggtaaatttatcttcaaagattaaaacttcacaaaatgttggacaaaggagaatgatatacagaagtgctcatttcaaaaaaagaaaaggcaaaactggatcctgttcaaatagacatctttgatataggtgggaaaatagaagagggtacacctagatgttctccagatagcggctcccttggctgaggttcaagtatagttcaaaatctactgctccatctctggtccctgatatgtctccagttagagcatcaaaaagtcacccaggacaagtgctcttgttctagggcccacccagcacttccctcagtgggcttattcagtcctcggagcattctgggcatttagtaggcaatacaagaaacagcaacatctaaaaacaatttatctctcaagttttattgaaatttctcttttacaaaatgtctgatttttaccctaacgactgcatcctcacccaaatctcatcttgaattgtagctcccataattcccatgtgttgtaggaggggcccagtgggagataactgaatcatgggtacagattcccccatactgttctcgtgcagtgaataagtctcacgagatctgatggtttacaagggaaaactcctttcacttggctctcattctctcttgcctgctgccatgtaagaagtgcctttcgctttccaccatgattgtgaggcctccccagccacatggaactgtgagtccattaaacctctttttctttataaattacccagtcttgggtatgtctttatcagcagcatgaaaacggcctaatacaattcctaaatattttttcatcatggcgtgttttgactcaaatcctacaccatggggaaaaatatacgtgtgtgtgtgtgtgtgtgtgtgtgtgtgtgtgtgtgtagtacaataagttaaattccagtgtttcaaagtttttaaaatcattatatttgtatctttataaatcatgaaacagtatttaaaaattcagtatttcactaaagcccaaaaacccccccattatgcagtatatccatgtaataaacctgcacatgcaccccctgaatctaaaagaaaatatttttaaaatcaatatttatacttcagatttccatttactcaatctatgttatatctatatgaaacaaaaatataaaactatgcagcttttcatcagctatctcttagaaattatttgtcgaagtttattaactgtggaagaaaaggtactcagatgagactggagagttccagagaagctccttgtcctggcacatctgatccgctgtggctgcagccaacctctccatcacgggctcaccactgtcccagagtccactgtctcttacatggactattatgatagcttcatcttccttattttcctgcttccactttctcattacttaaatttatattttcattcctgccaggataatctccctaaagtatagttcattcatgatatttacttaccctgaaatgttaggatatttaggaatcaaaataagtatgctaaaatcagattcaagtttacaaagtaagattgataaattaaaagtagaagatgaatctatgtatttacacatgaattcacacaagaagaaagcctgaagcctcttacatggagaatactttttcttttcattaaaaaatcctggatgggcacggtggcccacggctgtaatcccagcactttgggaggctgaaatgggtggcttgcctgagctcaggagttcacgaccagtctgggcaacacagtgaaacctcgtctctactaaaatacaaaataaattaggcaggcgtggtggtgtgcacctgtagtcccagctactcgggagactgaggcagaagaattgcttgaacccaggaggcgaaggttgcagtgagccgagattacgccactgcactccagcctgggcaacagagtgagactccatctaaaataataataataatcctaattgtacacttattagaaagctctctttcctattctataatccataagcctcctaacagcatctcttaacaggctgtggtagggtgtcctttcattctaggcgagaaaaactctcacctgtttaaaaacaaagtgtgtcatccctgacaactctccatttattatatgaaatacacagaaggctgttcagtcaaaaactcaaaatagagttttagctatttccagaaacctggtttacactctgctccactccttactggcttaagtgatttgggacaaactgaaagcatctcaggaccttgaggaatcctcagacacgtttaattaaaaatatatgtaaaacataaatacaatttttaaaacctcatatgcttcccaactagggtgaacatacaatatttaactactattaatgttttattataatttttccttctaaaactttattggtttgtctttattattgtcataagctataaaacatacatatatatgtatgtttttatataaatataatgtctagatccctttcaatgcatttatacacacaccctaaacatccccccccccacacacacacacaatcttttttctaaattcactcttgtatcaaagttaaaatattggaaagcaaagtaaccaggaagcaacatattgaggctaccttagcttaggtctctacaatatgccaaagcacatcttaatataataactttcagcttttattgaaagtcaaaataagaaatagtctgcattttctgcaaaatgactattgaagatcttgtcagaaaaaaacaatcattattttattttaaaatttggtgccatgagagatctttttggggtgatagaaatgttctaaaattgtgcttggggtggtggctcacacctgtaatcccagtattttgagaggcctgaggtggatggatcacttgagctcaggagtttgagaccagcctgggcaaaatggtgaaaccctgtctctaccaaaaatccaaaaaaattagctgagcatggtggcacatgcctgtggtcccagctcctcaggaaactggggtgggaggatcgcttgagcttgggaggtcaaggtagcagtgagccgagatcagcccactgctgtccagcctaggtgacagagtaaggcctcgtctcaaaaaaaaaaaaaaaaaaaaaaaggaaatgttctaaaattgaactgtggtgatggttacaaaacacagaactctgtgaatttactaaaaatcatatattgtgcacttaaaacaagttatttttatggtgtgagaattgtacctcaataaagctattttctttaaaaagaaaaaaaactgatgtcaggaaaagattacttcttctggaaaacctgttcatatgattttataaggcaatgagaaactaagtaaacagagctaatacacgtatataatatagtcgttataataataatattaataatacatatataacagacactattctaaatgctttatattaactcttctaagcctctcaataatcttagagggaacatcttattatcttattaatcatcctcatgttatagatgtaaagcctgaatcacatggaaattaagcatcatgcctaaggtcacacagtaatttaagctagaagttggacggatgacaaccgggtccagagtccatgctcttaacccacactaaattcaaactgttcccaaaaccacctaaaagagttcaagtcaaagcaaatttagaatttaaatacagaaatacttttatatctagtataataatatctaccattctccacgtttgttatattttaattacatgttaatatgtttacaagtcattttaagtctgttctagaagtaaagacaaatattttattcatcatttcttataatactttcactgtatcagtgttttataaatgcaagaaatatttacttgctgaaatgaactccaatagaaattactaaattctttttttttttttttttgagacggagtctcgctctttcactccagcctgggctggagtgcagtggcactattcggctcactgcaagctctgtgtcctgggttcacgccattctcctgcctcagcctcctgagtagctgggactataggcgcctgccacagcacacggctaattttttgtatttttagtggatacggggtttcaccgtgttagccaggatggtctcgatctcctgacctcgtgatttgcccacctcggcctcccaaagtgctgggattacaagcgtgagccaccacgcccggccagaaattactaaattatttttcctatatttactcattatttgagtgatataatcctgaaagcattttttttttttacttaacttttaagtctggggtacatgtgtagatttgttatataggtgaacttgtgtcatggggtttgttgtacagattatttcatcacccaggtattaagcctagtacccgttagttatttttcccgatcctctccttccttccatcctccatcctgccataggacccagtgtgtgttgttcccttctatgtgtccatgtgttcttatcatttagctcccacttatgagtgacaacatgcggtatttggttttctgttcccgcattagtttgctaaggagaatggcctccagctctagtcatgttcctgcaaaggacatgatctcattattttttatggctgcatagtattccatggtgtatatatatcacattttcttcatataatctatcactaataggcatttaggttgattccatgtctttgctattgttaatattgctgcaataaacttacatgtgcatgtgtctttataatagaacacgattttctattcctttgggtatatactcagtaataggattgctgggtcgaatggtacttctgcttttaggtctttgaggaattgccacactgtcttccaatggctcaactaatttacactcccaacagtgtataagtgttcctttttctctgcaacctcactggcatctgttttttttttgtctttttagtaataaccattttgactgtaagatggtatctcattgtggttttgatttgcatttctctaatgatcggtgatgttgagcttttttgcttttttgcttttttttttaaactgttaagaaagtgtttgtggttttattgtatcatgaggcattgaaacatctgaacaaatcaatgtctgggcggggtgaggcagctgctttctccttcacttctttggattactagagcaacttgtcagtagattaaaaaaaaaaaaaaaggataaccttttgcattacttaagtctttccaaggcatgcactggtacaacacaaacttctcccgtagatggaactagtctagcgtccaaacatcatgcataacacttcggtggcagcagagcactgcgcccactctcaccgtggtgctgctcatttgtgcatgatatttggagcatctggaggagcaggaatagtattgggaagaggagggaggaggaaacagcatgtctggctgagaggaggtcagctgaagttgtgcagggcaagcctgaacatgtcattggtgcaaacccaagcatcgttgatgttctttaataggaacatctggtggaaccccatgatggggtcttcatgtcttaagctggtccacaaccatgctgatgatgcagctatctggcatgggctgatcgtcctgcgctgtgatgctgtgctggattttctgaaacggaaggctagacaacttctctacaatggcagctttccatggaactgttgtccttcccacataaggcatgacacgtcaatgtaaattgcgcctagttgggttctatcattatcaaataactggtagcaacgttgaatgaagctggatccaatctgctcccaaatgggcttgtctcccactctggagcgtcacccggcctcagggagacctgaggggctggcacaatggcagcagcggtggcagcaaaccagtgtggtctgcgtgagctttttttcatatgatggttgaccacatgtatgtcttcttttgaaaagtctattcatgtcctttgcccactttttaatgggttttcttaattgtaaatttaagttccttatagatgttcgatattagacctttgtcagatgcatagcttgcaaatattttctcccattctgtaggttgtgtttcttttcatattctagtgaactactactgtacatatacttaatactaactgaaaaatagaaagcttgtccacattagtgtcagggttaaaaatatttagaatgtttatgacaatgcaaaaagagtttaaaatatcagaataaatatgttaaggcatttttgtatttattgtaaaaacagagtttgaaaaattaatcaaacagatggttttggaagttttaattgaatactttaaaatagactatacactgtctcaaaataattcttcattatgtttacagcaccaaaaacttaaaaaattaaatttgataacacaagaatattgaaaaaggaataaaccaaacttatactatccacatttgttgtttatgaattttaactcctccgaaaatactatttggttttataccatcattttcctttcattacagtctatttagttccccatatgctttaattacttatctttgaaaaatgaaaaatgaacatgtacaactcacaccattaaagtttcagataactttccatttctggaggctattaaaattattttctacagtaaaaaacgaaataggaagcaaaagtatttaatacatatgtagaacaaaaattgaaaagaatagtaaggcaacaacattaaactagtttcatttttagaaacaatagcaacaggcaaattagctttaaggagttagcatttaaagtgaaacatgctaactacaatcctccttcttaaataatgataggttctgaaatatcaacttgagctctaaaccaaagatgagttgacagtttcaattgcttggagagagtataaatatcaagcacatcatcctctcatagaaaaattcccagcctttgtctttgatacaattactgtgtcagaataaagccactcaacttttccattaacatctcaaacacattatatatcatcccaattcacaagactatccctacatggtcgcaaaattctataatctgagagaatcaaagaacttgacacttagaagtcattaggagaaaaggaaaggtattctatggaaggagtatatctggtcatgtaacaaggtgaagaaagacagcttggaaatagaaaagaaagagacaaaactagtagagaccagcatctctacagagacaggagaagatgggaccaaaatcccaggataatttattctccacttttccttcacaactcagttaaagacttttccttctctaagatgcctcccattaccagtccatcttactgattattaccttattatgtttttaaagtattttgctttatacagcatgtatcatgtttttatatgtatataaattcatatttatatatcccagttttctctgatagcctctctactatatattcaacatgcacagaagaaataaacccttattcaatgaatgaaagaaataataactacatggataaataacactacattctaaaactgagattttccttctttgcatatttttaaagaaaaaattttgttaatagtcaaggcaaatttctacatcacaaagctgtcttgcagcaaaatggaactgtctctgggccaaccagatctaacgctattcttagattcaaaagcagcagcagtcacaatattctcctttgggaaaacagccaacttgtgctgtttactttgaagttagacctcacaataatttactcttttactttcagactacattattactactatgctgggtactgtactgttaagatcatccagacatttagccaaaatgaaggtattaactatatggaagatggataaataatctacagaagaattttatttaacatgctaaaatatcttcttttaactccaagcaaaattcagtattttggcaaagacttttgaagtacctaaagagggttacttggctcagaaaatgattatgttatatatagaaaactgcagaaacttcagggctctttgactatctaccagcaccactaaaagatactatattgttatatacataaactcctaatatcacactgaaacgatcagtctgaactttaattgctgttatggtcaacaagttaatacctagttattctaagtacttcaaatgcctaacctggactggaaaatcattaagaacatcattacatcttgagctgtcttctaaaccttttatttcctttagtatgatattacaatgtgtaaacattgtaggtactaaacaaatatttgttgtcttactgctatttaaagcaaaggtcccaaacccctgggcaccatacaggtccatggcctgttaggaaccaggccacagcaagaggtgagccccgggcaagccagcattgccacctgagctccaccttctgtcagattagattctcacaggagcgtgaaccctattgtgaactgtgccagcaagagatttagcttgcacactccttatgagaatctaatgcctgatgatctgaggtggaacagtttcatcccaaaaccattccccacccaccccctatccatggaaaaactgtcttccatgaaaccggtccctggtgccaaaaagtttgaggaccactgattgaaagaaattaccccttccttagatttataaatcaataaaccaatgaagaaatgaagaaaggataaagaaatttaaaaagaacaaaggcaaagtggaacaagagagaaaaaatatggtaaatttcataaagttcatggagaaatcttcatgaagaaagtagttaattattttaaagagaaaaaatgaactaatgaagaatagagagcatcctattcattaaaaaaagcaagactgggccaggtgtggtggctcacacctgtaataccagcactttgggaggccgaggcgggcggatcacgaggtcaggagttcgagaccagcctgaccaacatagtgaaacccagtctctactaaaaaaaataaataaatccaaagattagctgggcgtggtggcgtgtgcctgtaatcccaactactcaggaggctgaggcaggagaatcacttgaacccaagaggcggagggtgcagtgagccgagatcgcaccactgcactccagcctgggtgacagagtgagaccccatctcaaaaaaagaaagcaagactgccctagttttgttcaatatttatttgacttaatatctaatgaatattattgttctctcctgatttcatctaattcatattgacaaggtaaacaaataagtccctctgtagataaaaatatggatgtcttgtgatgccatagtttataaatcgcattaaaacgttctattcaggaactgagccaatatattttattaacaagcaaagtgagacagaaggaatggttatgcaatcttcccaggcagaattcgatactaaatgtgtttgatcttgggtattctttttggcctttctttaagtcattcttatttgcaggtttagggaagcaagtaaaataaaattactgattctctgggagttagctaggtatattgagctcaagaaagcttctcctcttaaatcactttcttgggtcagtcaccgtattgaccttcctccaattaaactcttatcattctgtaccaaattgccaaatgtcttgaatatttctccaactagactatatggttctatgggaatgtactgaacattggctgacacatgatgggaactcaatatttattgagttcagacctcacaataatttatgttttaagttatctaaatgaatcaatgttttttcagctaaaaactgcaaggtcaaacctagtaataggagagcccaatcaatttagtaaatgaatggagaagacaaataaaatctaatattttaatgtatgcctaagtacagtaaaacattaaaatactgagtatatcataagacaaactctttcctaaataatgcctgtatagtaatccattttcaaatataacaactggaacatttcatttcccaaactgctcaacaaaatctacggaggaatttctaaatgtcctaagacctaaatctcattttttaaaaaatatgttttcgcttaagagggagagagcatctgaaaccactaagttctatttttttacattcctatcacttaaaaacagctgaactgatttttcttttaaaaaaaattactggctagtaataaaatcttgaagatagagatttgtgatgggaaactgatgcaaacgaatccatagcaaagctcttataaaaatatagtgtttaggtcccagttacttaatttggctcacagtttaataaagggtagttttaaatcaaatgcattacaattttactcacttcaaagcttcctcaaatttatgaattttcttttgagtatcttcttttcctttatcaagttcactctgcaagtcatgagcctgccatgacaagaacatggaaaatttattggaagacgagtaaagtttacttcaaagagacatacaaacaatgaaacagtgatcacaaatccatttttaatataaaattagatttagatatttcaagatagaaacttggtctaccatagaatgatttcaatactatactcaaatacctattttctgttcaaaatgaatttcttgagtctaccggcaggtgaattcttttaaaataaattcataacttaaaagaaaataaaaaatggaatacttcagattttttaaattatattttaatcaaagaaaagaaatcttacaagattcaagagaatacaataaacaatgtgtctatattccctgaacacataatggttatgatgaaatggtcttctcttccactgctgggaataatttgtataactatttactgagtttggaaggaaactgccacccctccccactccccgcaccatgcctacctctttcctaaatgtggatcatttgagtaaatgagatggcagcatcaataacaagggtgaaatgaaaatttgtcttcggctgggcacgatggctcacatctataatcccagcactttgggaggccgaggcaggcggatcacaaggtcaagagtttgagaccagcctgaccaacatgatgaaaccctgtctgtactaaaaatacaaaaattagccgggcatggtagcgcacgcctgtaagcccagctactcaggaggctgaggcaggagaatcgcttgaacccaggaggtggaggttgcagtgagccaagatcgcacccctgcactccagcctgggcaacagagtgagactccatctcaaaaaaaaaaaaatgtcttcacaaaaagctcttcatatgcatatgcagataaacatagccaatgtggacattttacggatcttaaaatgtaaaagggaaactttggtacagctggatgaaaaggaaggaatcaaacagcagccatggctctacatacatggcaactgaggatgcagagcccaggtgggaggtgggaaagctcaagttacttggtggggtgggaaaacccgctacagacctgctggtaagcaaggtaaggctgaaagtgaaacgagtggccaacaggtttaagagagaaacgacaagaacaacaacaaaacataaatacactatgacaaaccatatcaaacactgaatcagggctagccaaaaatacctgtagttagctatttatatcagtttaaatggagacctatttaactcaaaccctatctttaacctcttcttttaaaaattcttttggatttctgctctcagtgttttagtaaataaataaattaataaaatcaatgtttgcttataaactgaaagaaagtgagggtagacaggacattttccaagataatatcgaaaagcttctatgggctgctatgatgataatctcaaaagtaagaatacactgagaggcagagaagaaaaagcaagagaattaggaacctgtagccaccctcccccatattttaaatggtaaatttaaagtatctcataaagactatttgtcttatgagaaagagaaagaacaacttgccttgcaaatttttgccactacatttattttatcttacatgcaggaaaaagaagtctgctgttcaagtttttaccatgttcaagtgtttaattattattttggatccctaatatgtattacagtgtttggcacatagtaagcatactatactagagtacaaacattactaaagcaacaaaagcaccatttcaacgcaaatctagtctttttaatgtagagagtcaaagactaaaacctcaaaatgaaattcagatatgacctaatacaaagatcctggaaacatgtttttacatcagtaaaaaataaaatcttaagtgaaaaatcacccaccaatttaggaaaaacacacagagaaaagtcaatgtattcaagtgaaagggtgggggaaggacaattcagaagaaagttaaagggagaaactaatatgtgagatgttatcttacactggtgtttacttatacatattcacctctccttttgctttaatcgttctttcttagtcaagttctctcgcaagttgaatttggcccaaatcatacatttttttcttagatttattgctagcactaaaatactatttatgccgttttttcctgtttcctaattttttatgttactttttatacatggcatttttgttactgtcctcaactcctccatgttctgacagattgacacatagagacagaaaatgacttttccagctttattgccatataattggcaaataaaattatacatctttgaggtatacaacatggtgtttttaaaatttattttaattgaaaaatgacaaatcgtatatacatatgtgtgaagttttgatatatgtatacattgtagaaatattaaatcaagctaagtcacatattcatatcatacatatacttatttttgtgatgagaacatttaaagtttgttctcttagcaattttcaagtatactacagattattattaataataatcaccatattatatctccagatacttattcctcctgtctaaaacttttatttttgagacagggtctcactgccacccaggctgaagtacagtggcacaatggtagctcactgtaacctcaaactcctgaactcaagtgatccccccgtatcagccccccaggtagctaggactacaggcatgcaccaccacacctggatcatatttttttagaatcagggtctcactatgttgcccagtctggtataaaatgcctgccctcaagtgaacctccctcggcatccaaaagtgctgggattttagtcatgagccattctgaccagcctaaactaaaactttgtaccctttaaccagcatctacccattccctgacatccctccccacccagcccctggtaaccaccattctattatctgattctaggagtttgattgctttttcagatttcatgtataagggagataatgcagtacttgtcctccaggaccttccatgttattgcaaatgacaggattttcttttttaaggctgcatagtattccactgtatatatacataccacagtttcttccatccatagatgaacacttaggtcaatcccattcatccacagataaatacatagcttgattccatattttggctcttgtgaatagtgctgcaatgaacataggagtgtagatatctcttaaacatactgatttcatttcctttggatataaacccagaagtggaaattgctgaatgatacggtagtgctatttttaattttttgagatacttccatactgtttgccataatgacattcccaccaacagagtatagacgctctctttcttccacatcctggcctacacttgttatccctttgtgtgtgtgtgtgtgtgtgtgtgtgtgtgtgtgtgtgtgtgttagcaaaagccattctaacaagtgtaaggtgatatttcattttagttttgatttgcctttccctgatgattagtgatgtcgagaatgtttcatatacctgttatttgtatatcttctttggaaaagtgtctattcaagtccttggcccattttttaaacatcaggttatttgtgtttttgctataaaattgttttagttccttatatatttaggatattagtcccttatcagataaatggtttgcaaatattttctcccattctgtagtttgcctcttcactctgttgactgtaaatctttgccactttgtatatccagaatggtattttccaggtaaactttcaggatttctacagttttcagttttacatttaagtctttaatccatattgactttatgtttgcttatggtatagggaaagggtccagtttcaatcttttgtatatggctagccagttatcccagcaccattcattgaatagggagtcatttccccattgcttttttgtgttgactttgctgaagatcacacagttgaaggtacgcagccttatttctgggttctctattctgttccattaatctatgtgtctgttttgtaccagtaccatgctgttttgcttacagtaggcttataatatagtttgaagtcaggcaatgtgatgcttccagcttgttctttttgcttacgattgtcttggatattcaatctcttttttggttctatatgaattgtaaaacagttttttctaattctgtgaagaatgtcattagtggtttgataggaatagtattgaatttgtaaattttttaggggagtatggacattttaacaatattgattcttcctatccatgaggatgaagtgttttttgatttatttgtgtcatctctgatttcattgagcaatgttttttatcccattgtagaaatcttgcacctctctggttaggtgtattcctaggtattttattctttttgtggctaatgtgaatggaactgcattcttgatttggttctcagcttgggtgttgctggtgtataagaatgctagtgatttttgtacattgattttgtatcctgaaaaaatatagcttttttatcagatgaagttgtttatcagatcaaggagtttggggttttctaggcatagaatcatatcatccgcaaacagggatatttgacttcctctcttcctatttggataccttttctttctttctcctgcctgattggtctggccaggttttccactactatgttaaataggagtggtgaaagagggcatccttgccttgctgaggttttcaaaggtatgtctccagcttttgcccactcagtattacgttggctgtgggtttctcatagatggctcttattattttgaagtatgttcctttaatgcctagtttgttgagggtttttaacatgaagagatgttggattttatcaaaagccttttctgcagctattgagatgatcctgtgggttttgtctttagttctgtttatgtgatgaattgcatttattgatttgcatatgttgagtcaaccttgcatcccagggataaagtatacttgattgtggtgaattagctttttgatgtgctgctgaatttggtttcctagtattttgttgaagatttttgtatcaatgtttatcaaggatattggcctgaagcttactttttttgtcgtgtctctgtaaggttttggtatcagtatgatgctaacctcacaggatgagttaaggaggagtccctcctcctcaattttttggaacagcttcagtaggaatagtagcagctcttctttacacatctgctagaattaggctgtggatccctctggtcctggggtttttttggttggtaggctttttattactgatttaattatgtaactcattattggtttgttcagggattcagttacttcctggttcagtattgggaagtattcttgtatggtttttcgcatctcaatttccttcagttccgttctacttttggttatttcttgtcttctgctagctttggagttggtttgctcatttctctggttgctctagttgtactattaggtggttaacttgagatctttctaactttctgatatgagtgctaagcattatgaacttcactcttaacactgcctttgctatatcccagagattctggtacattttatctttaatctcattaaagaatttcttgatttctgcctaaattgcattatttacccaaaagtcattcaggatcaggttgtttaatttccatgtaattatatggctgtcagcgattttcttagtattaatttctatttttaatgcactgtggtccaagagtgtagctggtataattttgctttttttatttgctgaggattgttttgtgtccaattgtgtgcttggttttagagtatgtgccatgtgcagatgagaagaatatatattctgttgttttgggtagagtgttatgtagatgttatacatgcatttggtcaagtgtcaaatttgagttctgaatatctttgttagttttctcccttgatgatctgacatttgactaatactgtcagtggggtattgaagtctctcatcattattctgtggttgtctaagtcttttcataggtctctaagaatttgctttatgagtctgggtgctcctgtattgggtgcatatatatttaggataattaggttttcttgctgaattgagcagtttaccattatgcaatgtccttctttgtcttttttgatatttgttgatttaaaggctgttttgtctgaaattagaatagcaacccctgcttttttctgttttccatttgcttggtatatttctctccatctctttactttgagcctatgggtgtcactgcctctgagatgtgtctctcaaagacagcataccattgggtcttgcctctttatccaacttgcctttatccaactctgtgccttttaattagggcattttgcccatttacattcaaggttagtattgatatgtgcttatttgatcctgtcatcatgttgttagctggttattatgcagacttgtttgtgtggttgctttattgtgtcattggcctgtgtacttaagtgtgtttttgtagtggctgttaacggtctatccttcccatgtttaggactctcttcagaacctcttataaggtaggtctggtggtaatgaaatcgcttagcatttgcttgtctgaaaaggatcttatttctcctttgcttataaagcttagtttgctgggacataaaactcttggctgaaaattcttttccttaagaatgctgaatataggcccccaatgtcttctgatttgtacggtttcttctgagaggtctgctgttaccctgatgggcttcactttgtaggtgacgtgccccttctctctagctgtctttaatattttttttatttcgaccttggagaatctgataactatgtgtcttggggatggtcttcttgtggagtactttgcaaaggttctctgcatttcctgaatttaaatgttggtctctctagcaaggttggggaaatttttatgaatgataacccaaaggatattttccaagctacttgctttctttccctttcagggacaccaataagtcatagatttggtctcttcacataatcccgtatttctctgaagttgttttcattttacttttttttttctttatttttgtctgactgagttatttcagatagctgttcttcaagttctgatattctttcctcagcctggttgattctactgttaacacttgtgattgtattctgaaattcgtgaagtgagttgtccagctctatcaggtaagtttggttcttcgttaaaatggcattttcatatttcatatcctatattattttattttattccttataatccttggattgggtttcaacattcccctgaatctcaatcatcttcgttcctattcatagtctaaattctacttctaccatttcagcctggttaagaaccattgctggagaactagtgtgggtgtctgtaggtaagaagacactctggctttttgagttgccagagttcttgctctggttctttctcatctgtgtgggctcatgtcccttcaacctttgaagttgctgtcctttggatggtggggtttttgttttgttttgttttttgcttttatctccattgatgtccttgggggtttgtggcataaggtggggtccatcgactggcttcatttctagtagattttgaggagccaaggctcagctcaacactcccacactgtatactctaactctaaggggctggtatcgggtcactggctttgttctctggtccctcaaagttgggacctgctgtgttaaatgggccaaagtgttcctggtccgatggccacaacactccaacgagtggtgccagccaaagcgcttcatcaggcagtggcaatgtgattaatgcttgtttgcatgtgccagcagcagtggtagtacaccagggttcacccttgttagctggggtggggcgctggcagaccagcaactgccagcctctgtatgcgcattcacagtggcagcagtggcaccatggaggggaggggtcactggcatctgtgtgtgcattcacactggtgggcagtgttggcatagcagtggatttctggctggggtggggctggcaaactccttgtgcatgttcacactggtggcaatcgtggtgggaggcagggccactggccttcctgagtgctttcacaccagaaatggcagcactgcaacacagcagcaagtgggggacgggtacactcacgctggcagcaatggcgcagtgggatgcacgcacatcactgcaccagcatggaagggcaaggttcacccatgcacacatgtgccaatatggcaataggaggatggccttgggtgagtgcttgctggtaaagcagcatgggggaggctgcagtagagggagagtgtgagtgggccagtgcatgtcagtgggggccactctgctggagctctctggcaatctggcacagtctgccagcacaggagctatgatgagggccctagggaggcatcctggttgagcatctgagtctgcactgtaagcaggcaaagccaggctatggtcccaggagaggccagccgatgggagagttcaggtaagactggccccatctgctctgttcaggttcaacaattcttttaaggctaaagtctcctagaggaacatggccagcctgagggaatgggcatccccggccatgcccccctgcaaacattccctcatcaaaactctctgggctctgtacaggctggagtcctgccccaaccatctctctaagcaactctctctgccagctcaagtgtgggggtcatggggtcttctgctgccaggattccagaggtccaaagcaagagcagctcactccttgcctgctcaactcacccattccccaggagacattaggagccaggaagaagacccagtgtgtggcagccccatgcaggattcccagcttcctcccctttcagcccagtgtctctgtcctccctctgtccactctcagtaactttcctctgaagatcgacttggaatgtgccagtcttcccaatgtcctacccccttggtggcagatattctttctagctgcatctagtcagccatcatttcccacatttattgatttacctatcttgagcaatccttgcatcccaacaataaacccacttggtcatggtgcctgatcacttaatgtgctgttgaatttggtttgctggtattttgtcaaggacatcgtctttggaaacagattttaattacactaatgatgccataaatatttcacaattatttttaacctacatccctctaatatttagcaagttaaaaattaatacctctgccctgttaaaataatagcttggcatatgtttacttctccctctcctagtcattttggttttcttttatataatcttgagatgctgaggcagatagtggttttaaattgttttaacttcacataccttctttttcaagattctcttctgacatttccattgtttatattgtgtacacaataaatatttaaattcatctctattttaattttggcattcaccagtactttttcgttcttgagtattttttttgtttgatttgatcttttgcttatccttaggctgattaaagtccatcatccagtaattttatttttcaaaaagaatatcctagtgatatatcttctgaggctttgcacattcaaaaatgtcattctgttgcctttacacatgaaggaaattgtaggtataagattcttaggtcacaacactttggcctaaaacacagcacacgttaagtttctctattgttttatgacatttaggtttgcaaataagaagactaaagtcatctaaactttgctttcccctccccctggggtctggacatttataaaaatcattctctttgtactgtaattcaaacattttttaatcttgtattgagttttagctgataaagagtgaaatctttaaaattacatacacagaccttctgaaaagttttctcatatctttagttatttttgtgttattttattctgagccttccttcagaaatatcagttgttatatactggttttctattttctgccttaatatcaccttcctcaaaatttttgattctttgtccctttcttttgcagtctgaaaggtcattatgccttgccttcatatcgctgatttaattctttacaaaatctgacctaacccaaccagcaactatgtgatcgtaagtctgctattgtacttttggtttccttacgatttccttatgacaattttcacttcatccctttctttccttatggtgtctgttcctccttcatagatatcatatcttcttgtatgctactggtgaatttttaaacattttcttccggagtaacacattttcaggagaaactccttcctctgaatcttctgtgtaatgctctcattcctttcctctacaatgctttcccacagactccattttggttctgttctcctactcattcttgaacaccgtacaccactcagacttggtgcttgatattcagaacaccattcagtttgctgcttgacaaaaaccacaggggctgtaactgtgcttctattacgtgtctctaagtgtgatctctctctcagagatacagctaaaaccaattcccaggagggtttgaactaggttacactgctctactgaggaggcacgtttctcctcaagccacagcctgcttcactggtactctaaaatgatatgttacacagcctgcttcactggtactctaaaatgatatgttatacagcctgcttcactggtactctaaaatgatatgttacatgggaaaccaacaaggaattgctatcagagttgctgacaagtcaataagtattttgcaaattggcactgtgcctccaatgtaccatgtaccagtagtttcccctctatttactgttgattttttttttctgggactcagaactgccacataaaagcacagttgagatttacgcctttaaatgggaagcttcaaaaaattaacaatttttgagaaaaatctatctctaaaattatacgatgattacgagtccaagctcataatcagatggcatggatttgtgtccctgttccttcacaaactacataacattctgtgcctcagttggctcctctgaaaaactgggataacaatgagtatatcaaagaattgtgataagttaataaattacttgatgtaaagaccttagaacaatattaggaacataataaatgatcagtatatgtgaaacattattattacttcctcagattgaataactcaaggttattgtgaacacccaaaatcacaatgtgccacaatacagtaattcccttagtctgtctaccttttcagaaagtagtacctgaattgccaattttgtctttttgtaactgctttttatcattaattattgaatcttcacctctgacaagttcttagctgccatttcttgacactggtcagtgtgctagcacaagcaccttgatctaatttattgcttctaaaattattagaatgaaattatctgggtgggaaaataagggactcccctctgaggtaaacatcaatgtgtcaatgaccatacttttgagctgggggtttcttaaggtagaagctgtttctcatttttatatccctaggacccaggataatatctagcccatactccaatagtcaataagtattgttttaaatttgttttttcttaattgaatatatctgtattgtttaagagcctttttggattgcatttttagtttttacctatattccagacagctgtgggtgacataagtaaacaccagaaaagtgagagataattgcatacagatcttggcaaaagagaacagatcaatacttttggtgggttaaaaaaaaaatccttgtttgtgctgggcgcagtcgctcacacctgcaattcctgcactttgggaggctgaggcgggcagatcacgaggtcaggagattgataccatcctggctaacatggtgaaagccccgtctctactaaaaatagaaaaatcagccaggcatggtggcacatgcctgtgatcccagctacttgagaggctgaggcaggagaatctcttgaacccgagaggcagagactgcagtgagctgagattgtgccactgcacttcagcctgggcaacagagcaagactctgtctcaaaaaaaaaaaaaaaatccttgtttgtacctaaaagaaaattaaagaacaaacaacctagaaagagataatgctatttccaccccttcctttttaatgtacaaatggtagtaagcaataaatgatttgcttgtaatcctttccccactttaaattgttaataccagaaaagtatttaaaagtgataggtaatgacaacacaaaccagatagtcaaggatacataatatattttcaaacatgagaatttgctataaataattgatttaagtagccataagcacatttattgaatattcactgaatatattttttttgctcccttgcatcccaagaatttaggtaatcacaaaaggaatattgtgtagataagaaagagattgtgctatatatcagaaactagatatactgtggcagacaccatagcatagtaaagtgcacagaggaggtactgacccaaacactgactagctgaataactccacaatgcttcttaactgctatgacctctgcttcccaatatgaaaaataagggtgattagattgcataacttctataaatcttttcactgcacaatttcatggtttaaaacatcactaaaggcacacgtactcttaaaaatcatgtcagtggtagttcaaaaatactatccaatatgttaaatatacggctgtgactattttaaacatgatttaaaaagcgtgcatgattgctaggcattggaataactatattttaaggattgtgaactccattagacttcgtatctcatttgttaaacagttccatcagaatgattttaagtagatatttcaattcagtacattttagaacgtaggtgcttaacatatgtctggcatgtttctctaggtaaacagcaccatcttttactctctggaactgtttggaaaacaagcaataggttatctgtagggggcaggtgtttccttgctagtcaaatcatttagtctaaccatttcctgatttaacagatgaggacaattcatcaacaatgacatttcggtttactacttattatttgtttgatgttcaaagatcttaagagcagacaatagccactagagatcaataaagaccattacataatatgtgtgtgcttaaattagggacagcatctgatgctgtttcttttacctcaaagacaagttagaatcctatgctcctgtcctgctgctgtctcataggcaggataaaataatgtcattcagatggcatttcctccccctgaagagatatttagaactaagttttataccaaaagttattgaatgtgcacacctgtaacactaacaacaacaacaacaacaaaaaagccctatacatcccatttagctctacaattacatagtccagagctacggaagatttatgtcaggtcttcgagctatcaaaaaggatattccctgagagggatataagacatcaaaactccaaggcttgagatcacagcaggtttaataaagaaagaaaaacagatgtcaatgtaaaagggggagattatgaaattaattgtaaaataaaaagtggcatgctgagcaacattttcttccaatgtaaataatgttaggaacatatgcaatatgaacaatgatggctatttttcttttaaagattgttattattttaaacaaatcttagttacagtgaaaacaactaatatacattaacaagtaacgttattaaaaagctaggccaattgataccgcatggaaagggaatcactgtagttatgacacctaataaaaaggatttaggtctgctccttgaagtgaaatagaataggaatggtcagcaggctactggatacagatgaactgagctccaatattccctttctagtgtacattcaccagggagggagactgatagcagaaaccttagtttacttcgaggctaaatacccaagaaaagataatggtagaagaaagatttcctttctaggtctatctctatgtgcgtaacagtcctcagcaggatgtaatgaagtttgggataggaataccttattttacaaatagccagtgcatccctttctcctcactacagcctgtctgtctcacaggtacatacataccaggatatcaggaagagggcttaccagactgcaacagagcaggaagccaggaagctcttccttaatggatggacagccagtgatctgcccaaagaatgaacggtggacaaacaatacacctaaaggatactgatgccttatacaggaagcaaggattatgaaaaagtatgtccatttcatatgaaatatacttaacattttgtattgagctgcattaaaactgcaacaataaggaaatttattatgatttaaaagagcactcatgcaggtcaatacgtgttgctagaaacacttttccaaatgacagaaacagatttcttcctatacactaagctcatgaagggcagaatctatgtctaattcatcctcaaccccaccccagtacctaatataataccttccccaatataaccatttaatgggtatctgctgagtgactatatggataaacaagatggtggtattacaaagtgttttttaacattttgtgatataaaccatatgtaattttaacttgtatgtattctaaatagtttaaaggttaacttttttcattttctattatttttgtattttacaagtagattgacttgataaatgttaaaacagcagatagtgacaaaagcagcaacaaacatttgccatttaactactcttttactttctatatcttatagcaaaaaagaatttagaaacttaagtttcatagtcagaaatctatagaactctgtttttcccgagatggtggaccagaggcctttccaacgtgcctcatctacttggaagaattttgtccaagaaggaaatgaaaaatcaacagaaagtgaaagaaaacttcagatactggggaagagaaggtgagcagggagacagtggctaggtctggttgagaactgagtgaagctccaatataggagaggggaagagaatgtccctctgcaatctacctgtctactgaggaactgtgcaacctaggccatggggaacaccctatccctcccaagccctggatataactaggagagaggccaggagcgtgtgaaaaggaatgataccaggaagtaccccaggcattgtcccagacctgggacccaacaggacaatgccattcttgattctaactcatatcaagctcggcgggtccctgaaatctagcagtggcggcagcaccagcattagtcttgggccaggatttggagtgctggatctggagcaggggaagagcccccacagccagaacttagaggtaagtgtggtgtgcaatccagctgtgggtgctagaattgggatacccctccttcatagaccgaaataggaggagagttgctgaagaggcatggttttgcctgggtagcaggttttgtggccacaggcagctttgaaaaataaagtaaaaaaactgcacgtaacatttctgagtgttgcaactggctcccttgcttggaataggggtgtgagccccctcaggtctgaagagtgagaggtgggtccccctcctgatcacctggagtaggcatgtgggacacccatcacttcccatgcagagaacttggtgcagcagtggttgctctgtttcttgcccagccttatctccagccacctgctgactacctctagacccctgtcagggctggtgcttgtgcctactgttgggagatgtgaatgcagacttgcccagtccagctctgcccagatttggcctccactgagactgagcacaggacccagtccactgaatattccatggcccagccattgtctgggcaatgaagtacttctcatggttaacaaaggtcaagcataaactttattcctacaagagcaactggcgtttttacctgcaagtgccacctactggtctggaggttgacctgcaaaccccatagtaaatctgctgacacaaatgcacagtgcttgggaataacgtaagattcccacgccccttgctaccacaatcatcaatgccactgtggcttctcaggaggctgtgagcctgcttaccttccaggtacaccactactacaaccagtatttgagaaagccaccacactaagtctatttataaccaaggaaatcatacaaagccttaacattcaacatacccagaagtaaacagctctacccaacatacttcatagttatatccgcaagaaaaaaagttacatttcaatgaaattcaaaactaagaagttactatttctccagatgtgaataaatcaccataataataccagaagtatgaaaaagcagggtagtatagcacccacaaaggaacacagtaattttctagcaatggatcttaccaaaataaaatttttgaaatgctagataaaggccaggcacagtggctcatgcctgtaatcccagcactttgggaggctgaggtgggcagatcacaaggtcaggagatcaagaccaccctagctaacatggtgaaacccgtctctactaaaaatacaaaaaaaattagccaggtattgtggcaggcacctgtagtcccagctactcaggaggctgaggcaggagaagggcatgaacctgggaggcagagcttgcagtgagccgagatcgtgccactgcactccagcctggatgacagaacgagactccgcctcaagaaaaaaaaaaaaaaaaagaaatgccagataaagaagtaaaaatactgattttaaagagattcaatgagataaaagatattctgaaaaccagcacaaagacatcacaaaatcaattcaggatataaattttaaaaacttgccaatgagacagatatcttagaaaaaaataatttctggaaatgaataattaagaaattacaaaatacagttgaaagcttcaacaattgactggaccaagcagaaaagaaaattctcagaaattgaagacaagacttttgaattaatccagttaaacaaaaataaactaaaaataaattttaaaaaaatgaacaaagcctttgagaagtatgggactacataaagcaactgaagttacaaaagattgccattcctgaaagagaagaaaaagcaaaaagtttagaaaacctatttaaggaaataattgacaaaaacttctgtagtctagcaagagatttaaacatccacatacaagaagtgcaacaaacactagaaaaagatattgcaagatgcagtttaccataagaaatagtcatcagatgttgtctaaagtcaacatgaagaaaaaaatcctaaactcagcaagacaaaagcatctagtcacctattaagaaaaaaaacatcagactaacatcagacttctcagcacaaaccttttccaaaccagaagagattgggatccgatcttcagagtgcttaaaaagaaactgtcaaccacaaattttatatcctgacataacaagcttcataaatgaaagaaatacaaagtatttcccagacaagcaaatactgagggaatttgtcactattaggctggttctataataaatgctcaaaggagttctaaacatgtaaatgaaaggtcagtattcaccaccataaaaacacatttaagtataaaactcacaggtcttacaaagcaattgcacaaaggaggaagagaaagaaattaaatagcaacatgacaaaactccaccaacccacaaagagaaaaaagaaacaaataatttagaaaacaactagataacattataacaagaaaaaaactcacatatgaatattagccttgaatgcaaatggaatgaatgctctacttaaaaggtaaagattgacaaaattgatttttaaaagcatgaacaaaaaaagtaaagaccaatatccctgatgaacatatatgcaaaaatccataataaaatactaagaaatcaagtccaacagcacatcaaaaacataatacaccatgatcaagtgggttttactccagggaggcaaggatgattcagcatatgcaaatcaataaatgtgattcatcacataaactgaattaatggcaaaaaccatatgaccgtctcaacagatgcagaaaaagcatttgttaaaactgaccgcaccctaatgataaaaaccttcaacaaattaggcatagaaggaatacacttcaaaatattaaaggatctgtaaggcaaacccacagccaacatcacgataaacagggaaaagttgaaagtaatcccaataagaactggaataagacaaggatgcttactttcaccatgcctattcaacatagaactagaagtcttagccagagcaatcaagcaagaaaaagaaataaaagccatccaaatagaaaaagaggaagtcaaattatctgttattgataatatgatcttatacctaaaaaaccctaacaatttctccccccaaaaacctcttaaatattaaaactgaattcagtaaattttaggatacaaaatcaatgtataaaaatcagtagtatttctatgtatcaaaaacaagctgagaaccaaatcaagaagcaatcccatttacaatagttataaaaaaaacctaagaatatatttaaccaaggaggtaaaaggaaaactacaaaacactgttgaaagaagttgtagatgacacaaacaaatggaaaaacatctcatgctcacggattagaataattaatattgttaaaatgaccatactgcacaaagcaatctaagattcaatgcaatccctaccaaaataccaatataatttttctcagacttagaaaaaacaatcctcaaattcatatggcattaaaaaagagccagaagagccaaagcagtccaaagcaaaaagaacaacactggaagcataacattatttgacctcagattatactacaaggttatagtaactaaaacagcatggaactggcataaaaatagatcagtagaacagaatacagaacccagaaacaccaccacataactacagccaaatgatctttgacaaagtcaacaaaaacatatactgggggaaggacacccttttcaataaatggtgctcagcaaattgaattaccatatgcagaagaatgaaactgaatccctctctcaccatatataaaaatcaactcaagatggatcaaagaattaaatgtaggacttgaaaccctacaaatactggaagaaaacctagggaaaactcttctggacattggtctaatcaaagaattcatgactaagacctcaaaagcacaagcaacaaaaacagacaaatgggatttaattttaaaaaagcttctagaaagcaaggtaaataatcaatagagtgaaaagacaaccgtaagaataggagaacatatttgcaaactatgcatctggcccggggactgatatccagaatttacaaggaactcaaacaactcaacaacagcaacagcaacaaaataataataataattaataaccccattataaagtggacaaagggcatgagtagacatttttcaaaaaaagacacacaaaaggccaacagacctatgaaaaaatgcttaacatcactgaatattagagaaatgcatattaaaaccacaatgagatatcatcttattctagtcagaatggctattattaacaagtcaaaaaataacagatgttggtgaggatgcagagaaaggaaacactaacactctgctggtgggaatgtaaattagtataatctccaaggaaaacagtatagagacttctcaaagaactaaaaataaaactaccatctgatccagcaattccacttctgggtatctacccaaaggaaaaggtcattattcataggtttctcacagcatgattcacaatagcaaaacatggaatcaacttaagtgcccataaatggatgactggataaagaaaatgtggcatacacacacacacacacacacacacacacatatatagatatatatagaccacacacacacacaccccatttgtatgtacattatcttaaatgaaacaactcagaaagggaaagtcaaatgccacgttcttatttataagtggaagctatataatgggtacacatgaacgtagagtgtggagagtgtggaatgacagacactgaagacttggaagggtgggaggttaggaggggacgagggatgagaaattacttaatgggtacattatttgggtaatggttacactaaaagcccagacttcatgattatgtaatatatccatgtaaaaaaactgcgcttgtacccgttacattcacacaaaaattttaaaaataaatctataaaactctgcactttactgcctaaggtattaagtgtgtcaataaccccctagttattacaggagggatatcaacatgtgtcagttgaaatagtactataaacaacaaggaacaattgctaatctttttcaagtagtagtcagtactttcattgttttaggttcttttgttaaaatgtttaaagttcttgttgcacatatgacacaacagaataccaaatacatcccattgattgtgtagttttaaactagtagaaagaaaatataatttcaacatgttataatgagaggttaagataataatacagttgtcccccagcatccatggggaattggtgccagggcccctttaggataccaaaatccatggatgctcaagtcccttttataaaatggtgtagtatttgcatataacctacacacatcctcctatgtactttaagtcatctcataataacttatatagtacctaatccaatgcttacacatcacttcattcacatggattcaacatagtacttgacacatggcaaatccaagttatagttttggacctttgtgtaattttttttcctgaatatttttgatccatgtttgactgaatccacagatgtgaaatccatggatatgaaaggccaactgtactcttcactcattaaatataacacacaagcagtgttttaatgttgatataactaataattgaactgaagcagttgtttattatataaacaggaaaaataagcaaaatttaattactggttagctgaaattaacttagaaacaaattattcttggctgggcgcaatggctcatgcctggaatcccagcactttgggaggccgagacgggcggatcacttgaggccaggaattccagaccaacctggccaaaatggtgaaactccctctccactaaaaatgcaaaaattggctaggcatggtggtgcacacctgtagtcccagctactcaagaggctgaggcatgagaatcccttgaacctaggaggcagaagctacagtgagccgagatcgtgccactgcactccagcctgggtgacagagcaagactctgtctaaaaaaaaagacaaagaaacaagttgttctttaaaggtgagaatgtatggtttcataaaaatcagtctgcattaatgcctcatttgctattttaaatattttatagcttccataaaacatattacctttttttcatagatgtgttttaaatgacttttctccatctgaaacttattttcttgatcctgtgaatgataaatgtttatatttattatactttaaattatactagagtcaataaaattagcaacctaattaaatcaatcaatctacttaatgtcaaacttcagttcagagttttgcatatgattaagtaagccctacaggtagaaattggagtagctttgtattacgaggcataaaatcttagtcacctgaagatattactattctcaaaagcacttgctttacagtataagaaaatctttctgacccttaggattaagagattacttcaaaaatgaccaagtcaataaatatggaaatgataaatttgaagttacatcatgtaacagtccttggtattttttgatcacgagagaaaagagatctaaaaggtgcaaaagagagagacagagggagagagagaggcagagaaagaaagagggaaagaaagagagaaattatgaagattggcaggtaatttaaaagaaggaaattattctaaaataatgatatatttaaataaaatttatttttaaaactaatctcaaaagagatcattccaattcaaattattgtactttattctctacatctcaaagcatcaatctctattaagataaataaaatgtaaaattatacaatgcgataaaagaatcagaaaagatgacctgcatttctgagttttatttttttaattgactctcaatgatacatctgaatcaagaaaactgtgtttgaccattgttcttctgtgtagaaatacaagactcacccttagttgttgctttctttgaagttctgattcctgtaactgctgttttaattgacagacattctgctctaattcttcaatcatactagatgcctacaaggattttaagaagaataaaaagcagaatattgatttttgtaccatattatactttctgattgaaaaaatatgccttttgtacccctgaaagtccaatcagaattaaaattatctagaaatttgaatgaaaaatgtttttaaaagatactagaaaaaataatcttttaaagtaaaaatataaattaaatgcagcatagtattaaatattatgaaaatgtaatgctgacataaaaatataatcttttaaagtaaaaatagaaattaaatgctacataatatttaatgttatggaaatgtaacactgacataaaaataatagctttacagaaaacttcaaaattttaattataaaatgaaagcagaaccaagatttcaaaacaataataacgcatatagttactctatgaaatgtattattcatacaactaagcattggaatttatatgtttcctccttttaagactggcacttaaaatgattagcttatagcagaattcagtttattaaatatttgtgttgtgctatatagtagacatttcgaattttaaacattttaaataccagtaaaaattcctgaagttcctgttaatttaagaataaagtgaaagagagattaatttcaaatgccaaataatttctacttggctatctatggctctaggcttagtgaataaatacttcatgtggattatctattaacataaataataccttagaagctgaaagagcatgttcttgttttagaaggtttatatcagcatcatatttggtttgtaacagtttcatgttttgctcataatcatttacaagatggtccttctctttatgcagtgtgttacgcctaaaaacaagagaataaaatagactttcaatgtatttaaaaccaatctctaaaatgaaattttttaatcagctaaatccaaatacatttccattcaatatattaaataagtatccacaattttgtcaactgcttctaaacattctgcttatgttaaaaacaggttgggtacagtgactcatgcctgaaatttcagcacttgaggaggccaaggcaagaggatcacttcagaaaaagagtttgagaccagcctgggcaacagagtgagaccgtgtctctacaaaaaaataaaaatagaaaaattagccaggcatggtggtgcatgcctgcagtcctggctacttgggaggatgaggagggagaatcgtatgagcccaggagtttgagatacagtgagccatgatcacaccactgtaccccagtctgggtgacagacagagaccctgtctctaaataaacaaacaaacaaacaaacaaacaaacaaacagcagtatttagattagaaacttcccaaggctaaacgcacaaggtgtaattaattttggcagataactgatacagttaatatcagtactttatagctacacctgataaatatctgatttcagacaataccttgcctttacttcttgtaattcactacacgttatctggtaacatctttcaagttctgctttttcttgaattaatttctgcctctgtaaattactgttctctgcttctccagtcagctgctggacacgggcctccagttctttgatcatgtggttctaaaagaacaggtcatggttaagaaagtctctgactcagttgtaacacttttgtatctgtaagaagcttgaggaacacgtataatctataagaataaataaaacaaatgtatcataaaccatggtagtagaaattaaatcaaccttgaacttaaccaagtctttaaaaaaacaatgcatactaccagaaaaataagaacatcacagttatatacttttagccttttgttcatttaatgaatatttactgaggctggtaatattcaagaatgtagatacatagcagtaaataagacaaagttcctatcctcaggaaggtttcagtctctatgcctctttatacgtacggccattagctgactacttaccagtgatctttgcgtttgattttaagtttttgaaatgtgttataagagtaatgtaatagtatttttaaaggaaatccatagccccaaaattgtagcacaagggtgttcacataagtgatacacttatttttaagtgtataggaacatttaattagttgtgttagtgtgcaagatttttattcattttttaacatctttgccgttttgtaaaatgcacttctctactcttccacagtattaagattatcactcaactaaatcatttctctattatttaatatttatttagaatttttcccctttgtagaactgcaatttaaaacgtggataaaggtatttatcatcttttagatactttatctaaaattagggtaagcaagcattagatgaagggacagttaattttcagttttaaaattaaacttctaataagtgtgagcaataaggataggttagtatgatgttgcactcaactattgtgttattctaagagaaccattttaaagatgcagtttaagcattagataatattacaaccctgacatcctttcttcatctcatcctttcttcattacaataccaaataggtatacaagttaaattttggtgtaacagcttccaatctatataaatgacttatctaacttaaaagcatggtttatagactaacttctttaaatgcatacaattctagactgacaaacatcagaagttctgatttcttcttcctgcatcttattcactttgtctcttcattatccctctgctttaggagctcctttcagaaaatagtttccatttcctaatatatattctaaacaccctttatgtcctgcgtattcattaactggaagaaacaaagaacatatactttgccttccagttttagatggcggaataaagatgatttgtattccttcgtctcttggaaaccaaaaacagacaagataaactaaaaatagaaatgcaaattccatactaataaaccctacaagaggatattctattattggcaataaaagagtagcttgcagcagatcacaatcccaatgctaacaactgaaaaacccagttttgttttgttttttttttttgtttttttttttttttgagacagggtctcatagcgcaatcttggcttactacagcctcaacctcccaggctcaggtgatcctcccacctcagcttcctgagcagctgagactacaggtacatgccaccacacctggctaatttttgtaccttttttggtagcgatggggtctcactatgttggccaggctggtttcaaacccctggcctcatgcaattcacccttctcagcctcccaaagtgctaggattacaggcgtgtgccaccatggccagtgaaagatttaattagtaggaaagcacttgagaacttctaaggcagtttgaaaacatcatagagatgaggcatcatcctgtaaggtgcttttaccctagaggtatttttcaatgacggaagatgaggatggggcaaggaaacaaaggcagatggtggccgaggcagccaggacttgaggacacaagatccctcagaaaagcaacacacagagaagtgggcaccacaccagcagttttctcaagagaatttgtcaaattctttttctttttctttttggagatggagttgcactctgtccaggctggatctcggctcactgcaacctccacctcccaggttcaagcaattctcctgcctcagccatctgagtattggaattacaggtgcacaccaccacacctggctagtttttgtaattttagtagaggtggggtttcaccctgttggccaggctggtcttgacctcctgacctcaagtgatctgcccaccttggcctcccaaagtgctggcgttacaggcatgagccactgcacctggccaaatttgtcaaagtcttagcattcacagggcaggaagccaagaaaccaagtgaaaaaaaaaaaaaaaactcagaaaagcacactagagttttctgcagtatcagtgtacttaggagtaaaatagattgtccaaggaggagagcccctagtattaataatatcacaggctttcagttgagacctgtgttgaggactaccactaggagcgaaagttagtcaaaagtagaccaaagattaccaagattgcaactcagccttgagtcaattcagtccctgaatggatccagtgatctgtctctacaccagctgcctctcagaagtgagagaagagcctctctggaagaagataacatcatccacagcctttattattttttgtgcacaatgtttggcaattaatcacaaaataacaggcataccaagaaataaaatcagaggaaaaatagaaatagacatgcagatgccccatatattgaaattgtaaaacatatgaggcatgtgttttcctgactcaaaatatatgagacatcacacaaaattaagtgaagatcaaatataattacaggaatagtccagaagaagaagtctcgtggctggaaatcctgaaaatgtcatcagaacacacttgtacaaactaagtggcatgcaaataacatcgctggttcaataataacagatgcatacattccaactgtagcttctttcaacataatctggcacgaaaaagaagcaagaaagattatgctgaatgaaaaaaatcacacaaaccatttttgcacaaagcaatctatggatgagattgattaagggaaagaaataacattatgagcaagtaaaaactgtaagagcaaacaaccaacatagaagaaaacaaaatggagatccagcatttacctagttagtgtacctaaagaacagaaatggtagaacaagaaaatgtacctaatgacatacaagaaaactatacatgaaaataatatacaaatagagtatactgtaaaagtcacacagaatgaagaatgccaagacataagtaaaattattaaacttcaaggaaatgatccttttaaagcattaatcagacctgtcactctcttgcaaaaccctccaatggcttctcttatcactcagaataagaagagactatcatggcctctgatttcatctcctaccaccctccctctcatttactatactccagccatacaggcctccatgctgtttctcaaagtcatcaagctagcctcaaagccttttcatttactgttctctctgcctaaagcatcttcctccaggggcctgcatagctcatttcctcacttctttcagttctccacctaaatgtcatcttgtgaaggaatctttccatagccattctacctaaataagcagatctctactgcctatatttctgtggcctcttaccctttcttttgctttttctttctttgttgtttgttttccacaataaagtataagcttaagacagccaagacattgctttatttgcactagatctcctgtttctttctagcacactgcttagcttgtagtaggtattcaataaacatttgccaattatcaaaacagctgaccttgaatgatatgggtttgaactgtatgggtccatttatatgcagatttttttttcaactaaatggtgatcaaaaatacaatattcacaggatgtgagacccacttacatgaagggtccgctttttctgtacccagactccacaatgccgattgcaagacttgaatgtgtgccaattttgatatacacagaggtcctggaaccaatcccctgcatataccaaggcactactgtattctcaaaaataaaaacaggataactgctaaaatgtcaaaatgtcccttccatattcaaaactggagtgatttctggccatattatagaaaatattagcattttataaggttataacagggttacaatgaggaaataacaaacatctgtccaatatagaatatatcaaaatgatttttgcatgttttataaaaaatagagataaaatacaagaaatccaacatagaggtaaagatattcccctctatattaaaagaatttctggaaatctatttctttttttccttatatgaatccaaaataaatgtgaacatcataaaattttagaaagtatcaaattgctaaagaaataaaccaaggcaaagggggttgaattacacaaataaataaatccacagactttgcctaaagaaaaagggtttctgttagccagaaaaaccagacagctctctttctacaatgtgaataattacagtggagatgagagaaaaaatgctcagataaaagcataaaactatttttatgagagaaagaaaaaaagagataaaacagaaagatatccaacaaatcagagaagaaaaatgatagacattgaagcaatattgtgacctcagctatctgtatatcattgaacaaagtaacagtgataaagtgaacttgaattttttttgtttttgttttcgtttttgttttcactgagacagagtctcactctgtcgcccaggctggagtgcagtggcgcaatctcgactcaccgcaacccctgcctcccaagtcctaatgcttcagtctcccaagtagctgggactacaggcatgtgccaccatgcccagctaagtttttgcatgtatatatatatatatacatatatatatatatatttttttttttagtagagatggagtttcgccacgttgcccaggctggtcctgaacccctgacctcaagtgatctgcccacctaggcctcccaaagtgctaggattacaagcgtgtgccaccacgcccagcctgaacttgaaattttgactaaggaattattaaaatgatgaaaaaaattatcagatctgaaaggaagagatttgtgactaaaataggtaacccgaggactgtacctgttcaaaaggagcagaactatgagaggacgtggttcctgttcattgccctattaaatgctgtggtctgcactactggccagtctttttgaggatatgcatgtattgtaagtaccgacaagtgagtacctctgtgaacgtgctacttgcccatccttatttgtcttcacctgttgacaaaccttcaggttccaacagaaaacaactgttggtgaagttgtggagaaactggtacccttgtgcactgctggtgagaatgaaaaatggtataaccattatggagaacagtatggaggcacctcaaaaatttaaaaatagaactaccaaatgatctggcaatcacacttctgcttatttacccaaaagaactgaagtcaggatctcaaagaaatatttgtactcccatgcaaaagtattcactatagccaagatgtataaacggcatagcataaaccagagaaaatggtgaataggagatgggactaatgtgcagctctctcctggatggacagaacagcatctggagactcacattgtgaacttttgctccaagaaccaccacagaaacataccaggaaaaccaaaagaattcacagaccctttgaataaaacagcttgccactgcaaacaccacaagacagccgaaaaactgagctcccgaagtgtgatgggggaaagtcagcctccaaatacacatccacactggggagcctgaacaatgtaaatgtccatggatgaatgaatagctaaagaaaatgtggtatatacatgcaatggaatattattcagccattaaaaagggaaagcctgttttatgttacaacttgagtgaatcttgaaaacattatgctgcatgaaataaggtagtcaaggagggacaaacactgcatgattccagttacaggaaatatctgaaatagtcaaacccatataaacaaagtagagtgatgattgccaggggctagacagaatggaaaatggaagttgctactcaatgggtacagagttttagtcacgcaagacaaaaaagttttaaagatatgccaataatatcgtgcctatagttactaacactgcattgtaccttaaaaatgtgttaagagggtagatctcacactatgtgtttttaccacaataaaaagaaaaagagaaaacaatggctaaaacttaacaccacattaaatgtgcatacatgtaaaattcttgcccaataaccaaggcttcatggaccaccgacgtattttgatgatgaatataatgacaacagccaccactgaaccctcattataggtcaggcactgtgctaagtgttttaccagctttaggccatttctctttcccgcaaaactatgaggtaggtatcattaacatcattttaaatatgaaaaaactaggacttaggaaaattgattaacgtggccacagttgccctactggtaaactggtaagcagcaaaaaagaatttgatccaagatctccttgaatcaaaacctattccactgcattacatcttctccaggactttgatattctgctcatggaattaacataaaataaatttgcaaaaatacctcgggtagacatatcatttcaaaacataaagtaaacaaagaaaagctaaaatgcaacactgcaatacttgaggtctctttcttaacctcccacattattactgctattattatcagtcccaagataagatattttttaattgtgtaatttgaaggttgtagtgttttctaccttgaacaatctattataataaagggctggctagtgaaattctactcatttctaagcccctttattaaaatgctcattccaggagaaatgagactcatgaatgggatattataatctatttgctaaaggaacagaccagtagaaataatctgttaccataaaatgtctcctaaatatgtgtggaaataaaagtggctcattatccaatgatttcttaaacatatactttagttagcttagattaataaagtcaaaagttatcaggtttaaaatataataatttttaagaactaaattttaaaatatacaaccagaatgctctaaaaataacatttcaatatccatccactctccagctctccttcttcccgtgaccacctctctctctcctctccctgttctctcctctctcctctggctctcccgtgctggtcatgctaatgtcactgcggtattatgacattagcatttcaaactacattgaacaattctaactataatgctaagtaatgattaaatcatccttctttccagtatttatgcatagtctttcccccatttcaacaaattaaactgcccatcctgaattttatcatgacttccataggatgatttttcttataatactacaagattatgtttgtctttccgtaacaacaattcttactctagtaccataaaagtatgaaaagtacattcccaattacttcatcagtaatagaaataaaaaggacaggccccagaaccagtcccttcagcacactactcaccatattccatcaggctcatactactttttaaaatgaattttacaacatacctgaggccaaactttactggtttgtcaaaagactacttctcctgagaattcttcagaaaataactcaaagaatgttatgtataatatagattttaagtatatacatagatatgattattatatatctgaggcccaccagatggacaaaaccaatctagctggtactgtctgtgaaggctgacataaggttaggaagtcctggggctgtaccagatacaacagggagtcggaggttgcagtgagctgagatcgcgccactgtactctagcctggcaacagagcaagactctgtctcaaaaaaaaaaaaaagaaaagaaaagaaaagaaaaaagaagattctgatacgatttattcaaacagtgaacacctgccaagacataactgctgttagaagctggcatgctttctcacatgcagataagtattacatgaaatgaaaaagtggcctttgcattaagatctctatttgtcaaacaaatacttttgtatatactgatgccaagtttctgactgaagaagcaaactatgtgacgtcacttattcattttatttttgatttttaaagcattttctgaacactaatgttctacacacaattttacacacaaagtacataaattttgaacctataacatcaagggaaagcctataggcatatataaagtatcttaaaaacaacaacatttgccaaattaattttttaaacggaataaaagagctgagaggatgcaaaatagtggagttcttaaaatggagtaaaaacttagtcaagaaaaagaatgctgatgtagaactatgttttgccggctgtaacagacaatgcagaagcagaattcagtggtatatgacaacagaatcagggaagaaataagttactgtacagaaaatgatgaacagattaccttgtatgaacaggatatcttcccacattgggaactgaaaggtagcacttggaaaactaggttggacttcgtgaactgatgtaacttgtaagcattaattataataggcatgatactaggaactcagattcttaatcatgggaaaattagaaaaaaatgcatctattggctatggagtaagaggagacagggaagagtaattggcaggttactggaagagtcaggaatgaggcaacaacggccaggactcaattggtagctgtggaaacagaagggaagagagcagatccaggaaaattttcagagaggtaaaatggatgattctgtaacatactaaataagggagatgaaaagtgggaaaaacataaatcttccaggttcaaaatttaatgtgccaacagaatgatgatgatgccaactgacaagaggaaatttgggaaagggtattattttggtattaattatcataggtttgatttcctataagttaagtcttagaaaatataaaatgtctcatggtcttttcatcgtacaacatctactgacataagaagtcagtactggagatataaatgttggagttttacatacaaacttaattcgaaaccttgtaggagttaaaaattaaaaagggttagtattaggcaactacttggtatccacagttctcctatggcaaacccctatggcaaaaagagcaactaattttatcttatttcacaaacttcttatgaaaataggacatattttcataagaagaagaatttatccatgaaaataggactattttcataagaagtttgtgtgccactgcactccagcctgggcaacagagcaagactgcataagtcttaaagatagagtttatgatttataacaaaaggtgcttatgtcttaaagatacatacgtttatgatttgtgaagttataaatcataaatcttaaaaataaattctgataacttttttaaaaattgaaaactcatgagccactagaagtgtgaacattgccagcctccctaaagccttattagttaccctccacccaaaggtaaccactattttgacctctatcagtacaaataaattttgtccttttcaaactttgtataaatggaatcacacagtatgtaactttttggggtcaggcttcttcatgcatattatatgcctatgggattcatccatgttgtggaatgtaagagtaatatttttcagtactgtatatagcatgctaaaataatttacccattctattgatgagttgtcttcagtttttgactattaaaaataatgtggctatgaaaactctcatacatgttttatgatgcacacatgtacagatttcttttggttatacatgttgcagtgaaaccgctgtcataagatgtgcctatgtcaagcctcagtagttactatcaaggagcttttcaaactggatataaaaatttgaacttcttacagcagtgtatgagacttcagactattctgtatctttgtcaaaactttgtactgtgattttgtttttttaattttagccctttttgtaggtatgtagagatactgaatttacatttccctgactattaataatttgagcacctttttaagtgtttattaatcatctgaatagcttcttttgtgggctgcctattcaaatacattgctcttttttattgaattgtttttcttgatgatttttttctatatttaaaatgcaagacctttattgaataaaggaattgcagatatcttcttccattctgaattgccttttccctttttttctttttttttttttttgagacagagtcttgctgtgctctgttgcccaggctagagtgcagtggtgcaatctcggctcactgcaggctccacctactggttcaagagattctcatgcctcagcctcccgagtagctggcagcatgtgccaaccacgcttggcgaattgttgtatttttaatagatacagggttttgccatgttggccaggctgtctcaaactgctggtctcaggtgatctgcctcccttggccttccaaagtgctgggattacaggcataggccaccatgccagcctcttttccctttcttaatgatacctttggtgatcaaaaggtattaattttaatatatcctaatttattagtatctttctttaaggtaaacatttaatttcccttttaagaaacctttgactagtccaggccaagaagatattctaagatttcctctttaagttttatcattttatctgcacatttaattctaagatgttcctaaaatgggtttattaaatgatgtgaaggttcaagatgcattttttctatatgaatattcaattgaccaatttattgaaagaaccacttttcacagtaaatggcttggtaaaaaaaaaaagtaaataattgtaattttcattaaaactattatcctatattactagtccccaaaattcaaaagaacaaggagaaaatgattttagaattattatataatgaatatacattgagaaacaaaaaatatagccatcaccaaaataagtattgtaggaaattaaaatttttgtcaaacaaggaaaaacattatgtttgacctaagtggcaaatagagcagagtttaaatgttaatttattaaaaaacacctttaagcaaaacagtgtatagcaggtcctcaaataacatcatttcattataataacgagaaaaaaaatttggtttcattatatgtcacttcacttataatcagtttccaaaaacctatcaatgacattaaataaggacttactgtatacacaggctagtatatactgtatacacaggtcagtatttccttggtcaggtgagagggtgcaagagaaatgataccccaaccgcagcatgcataactagcacacagatattggtttccaataccatttctccatataatccgtattgatggggccatgtccaagaagcacagaagtcaaatgaaagagctcccaatggccaaagctggaacaatttgagcaacaaaatgaagaaatattggcttataacccaaagcataagaaaaatatccacattctcatattagtatgaataaataatagaataaattgataaataaggagaaaaagtctcccatgcagaaaaattccaaaaatttatatagataccccaccctcaagagcagggagtaaaactccctacttcttaaacacgggctgccaaacggtaacttcctttcaagtagtacagtatggaaaggtggggagtaactttacactggagaaacctaattaacactacctcagccagatgatcaaaattaatatgcacaggtatgatgtcatgttgataatatgtattcatggctgggcacggtgattcatgcctgtaatcccagcactttgggagactgaggaaggcagatcacctgaggtcaggagttcgagaccagcctggccaacatggcaaaaccctgtctctactgaaaactacaaaaattagctgggcatggtggcacacacctgtaatcctagctactcaggaggctgaagcaggagaatcacctgaacccaggaggcggaggttgtagtgagctgagattgtgcaactacactttagcctgggtgacagagagagactgtctcaacaaaataaaataataaaataataataatatgtattcatgatatgatacgatgagaatagcactttaactctgaggatcttcctgcctaaacccacaaccccagtctaatcatgaggaaagcatcagacagtttctactagatgggcattttacaatatgcctaaccagtcaatactcctcaaaactgtcacagtgataaaaaacagggacagtctgagaaattatcacaaccaagaggaaagtaaggaggcctaacaactaaatgtcatgtggtatcctagatgagatcctggaaaagaaacaacattaggtaaaaacgaaggaaatctgaataaatgaaagactttagctaatagtgtatcaatattgatttacttattgtgaaaagtgtaccaagataacctaagatgtgaaaaacaggagaaaccgagtgcaggttatatgggaattctctgcactatcttcttaaattttctgtaaatctaaaactattaaaaaaaagtgtctatttttaaatggtcattttattcaacatgatgaattggtgctatttggagattctctcgattataatcattgtgagcttgggagaagaaatggtgatagaaactataaaatcaaattctagctatctcagtgtgtccatgagtagttctatgaattatcatatgtcactactaacatagttaaatatttcagatgtctaaggcttttggcactctttaaggtaaaggatcttaacctaccttaacctaccatagaggatcatggatggaattcagactgtcgctgaatttgaattttttctttaaagttcactttcattttcaccaccctaactgaaagttaacatttcccaattgtgaatgtagtcatcagacaaaggtagcattagcaatacctggaacaaacagaaatcatggatatttttatagttcattacactactgagcaatcactatacattgtttaccctcattagaaattactatcatgcctactgctagattttgatatttactgcattaatttagaagcatatgtattactttatcacagttttgatttatgaatattttaacaactgtaactcaatataatttttctttgtaatcttttatttttaaaatactattctgagaaggactacacagaattcaccagattcccagcagggtccatggtacaaaagatgttaagaactccagtaagaaagcctagaatctcaataaagccgcccacagattttcagtgtgtctaaaccctaatgtcaatagaccctatcattttacagccttcatcttcccaagcatctagcaaggaagctataatttttatatttacgttttaatatttgttttaaaaatctattgtttgcatattttcactatgagtttctcataagaaaatccctgccaataccaaaatgcgtaagtctcataatctatacaagtgtctgcttacaataaatggcaataagacaacactagactcaacaaaaaagaaaaaagcctgaaagaacagcaaaacagagaaactgattctcagtgacagtcccgtctttcatcttaagccaggccttgaactctaccttgtttaattattaaatcaggagctgctcagcaagacctgtctacttttgacgattcttaaattcaatcctgctgacagactccgtccatgtttctctatatttactagtattacctatgacaaggtttgaatgctaatttttaaaattcaactttcattaaaaatagaatgaaagttctctgacaggtacctcttggctccaaagcatgacttttctttttatcccaaacttataaaaattaaaaattccattgtgaatgatatttctctcaatattatttaataaataaaatatacctatgcaataaacatcaaagcaatatattttacaaatttccattgtaatattatttaatatatttattaaatatattcactttgtgaagatttagaatgttgaaataatgaaaatgtattttagatttaaatttgttttttgtccatgcctttaaatatcaaagaggtatctgtacacccacgtacacggcagcattattcacaacagccaaaaggcagaagcaactcaactgtccatctgccaatgaatggacacacatgtggtatatgcatagagtggaattattatttagcctttaaaaaggaattttgacacaagccacaacatgaatggaccataatgacattatgcgaagtgaaatacgccagtcactgaaggacaaatactgcataattccacttacatgagtttcctagaatggtcaaattcgtaagagactaaaagtgaggaactgaataaagacggcaaatggagaattattgtttactgggtacaaagtattaggaaagatgacaaaatttggagctggatggtagtgatagttgcactacagtgtaaatgtacttaatgccactgaactatatacttataattattaaaatggtaaatttcatgttacgtctattcaataaaaaaagaatgacgaaaaagaatgtgatgatttatttgtatcctaaatatataaaatgttcctataaatcaaggaaaagaataactcaatttaaaaatagacaaaggggatgaaatggctattttaaaaggccaagaaatgtaagagccaaaagggaaatggaaattaaaataatacattttttcaagctagaaacaaaaaaaaaatttttttttttgaaacagggtcacactctgtcacccaggctggagtgcagtggtgtgattatagctcactgcagtcttggcttcctgggctcaagcaatcctcccacctcggccccacaagtagctgggactacaacgtgcactaccacgcccggctaatttttttattttttgtagagatggggtcttgctgtgttgctcaggctggtctcaaactcctgggctcaagtgatccacctgcctcagcctcccaaagtactggggttacaggcgtgagccaccatgcctggccaaaatattttaaaatttggtaagtccaagtcttggcaaggatgtgaagacaattcctactcttgttgagcagtgccataaactggtatgaccactttgaaaagcttactatggatacagaaattacactcttaaatacatactccctaaagcagtgattttcaaattgtgggtctcaatccatgtgaaatcaagttttaaatcacaacccagcaatttttaaatgaaattaaacaaaatgaaaaatacagaatatgttagagtaaatggccaatagtaaaaatgaaacttttgtttgagttataaatatgcagacagatgtgtgctcatatatgtacttgtgtatgttctgggcataatttattaaatttatttcttactgggagtcatggtcaaaaatgaaatgaaagccagtggcttagagcagcagttctcaaagtttggtcaacaaactcctgagcttcccaaagactcttttagtagatccacaaggtcaaaactatttctataactatacaaagacataaattgcctatttcactatcatttcctcacaagtgtacagtggagttttccagaggctacatgacacatgataccacaacagaataaatgcaaagacagatatgagaatccagttgcctgctaagacagacgttaaaaagttttttttttctttttcttttttttttgagagagagtctcgctctgtcgcccaggctgaagtgcagtggtgcgatctctcctcactgcaagctccgcctcctgggttcacgccatcctcctgcctcagcctcccgagtagctgggactacaagcgcatgctgccacgcccggctaattttctgtatttttagtagagatggggtttcactgtattagccaggatggtctcaatctcctgaccttgtgatctgcccgcctcggcctcccaaagtgctgggattataggcgtgagccaccacgcccggccaaaaagtttttaaaaatatagtccccaaagaaagcatacaccatactagtgtgtttaactactaaaaatgggtcccaaatttgactctgagcaacctaaacaaaatagaaaacatgatcgtttataaggatcttccatgagcatattaagcttttctccttcttaaatccaatggtttaatttttaatattttcatttataagtgataacataattaaaacaaaaattaaatcacattttttacctattttgtgagctgaattgtgtcctccaaaaagatatgttgaaggacaatctcccgtacctatgagtgtggccttatttggttggaaatagtgtctttgcagatgtaagcaagttaaaatgatatcatactggattagggtgggccctaaatccaacaacttctgtcattatgagaaggccatgtgaagacatcgagacagaaatacacaatgaaaatgcaaatgttgacagcaggactgccatgctgcagctgtaagccagaaaatggcgaggaccacccgcagccaccagaagctccacagagacaagaagaattttcctctaccagaaccttcaagaaaagcaggttctgctggtgtcttgctttcattcatacttcaggtcttcaaaactgtgaggcaataaatttctgttgctttaagccactcggtttgtggtcatttgccacagcagccctaggaaatcaacataactatcaaactggccaactttcggtttgtttttatttatttttattttcatttttattttatttatttatttttttgagatggagtctccctctgttgcccaggctggagtgcagtggcatgatctcagctcactgcaacccctgcctcctgggttcaagtgattctcctgcctcagcctcctgagtagctgggattacaggcacacgccaccatgcccggctaatttttgtattttgagtagagacagggtttcaccatgttggccaggctggtctcgaactcctgacctcaagtgatccgcccaccttggcttcccaaagtgctgggattacaggcgaaagccactgcacccagcctgtttttaattaaaacacccatctttggtttgaaaatgtagaagaacggacattcacatatactttcaattagagagtaattttattatgtagatattaatttttttctttttcatcatctcttttctaaagtttcaatagtgagcttgtatatctttttgcaataacaaaaactttcattttaaaaccactattgtcaccattatttaacatttttctgtaagttctagtcagtgtatgataaattataaaatacttgctacatacatgtaaagggttgaaatttctaacacacatttattcttgagtcttttctacagcagaaatataaaactttatacaacaaaagtttgagactcaggaataaatattacaaaagatgtcctaaagaccccagagtactgttttctttattaacttggtaaattgattctaaatgtacaatcatcccttgccatctgtgggaaactaattgcaggaccccctacaataccaaaatccagagatgctcaagtcccttatgtcaaatgacatagtacttgcatataccctatacaccccctgctgtatattttaaatcatatccagattacctacaatatgtctaatacaatgtaagtgctacataaatagctgttatgcagtacttttatttgtattatttctattgttgtatcatttttgtttttttttttatttttttgaatatttttatgtgtggttggttgaatcacaaatgaggaaccgatagatccagacagctgactgtatttgtaaaaggaaagggcccagaatggccaagactcttctgatgaacaaggaaggaagacttccttatcagacatcaagagtaattatgaagctgtaatagagatgacagtataatcattgcagagccagagaaattatccaatgttcacatatatagaagttcaatatataagagcaggcatgacagatcaatgaaggaaggaggaattactctaaagtaaagctgggaaaaaaaagttatccacatagaaaaaaacaaaattaaatctcttatcctgcattagtcacaaaaactaactccagaaggattaaggcctcaatgttaaaggcaaaactttaaagtttttcatagaatatataggcgaaccttcttgcacttacaatacagacagatttgtttaacaagacataaaaagcactattttgttttttttatttttgagacagagtctcgctctgttgcctaggctggagtgcagtggcgtgatctcggctcactgtaacctctgtctcctgggttcagacaattctcctgcctcagccttctgagtagctgggattacaggtacgcatcaccaagcccagctaattctgtatttttagtatagatggggtttctccatgttggccaggctgatctcgaactcctggcctcaggtgattcgcccacctcggcctcccaaaatattgggattacaggggagagccaccacgccaggccaaaaaagcactaagtgtaaaagacttatacatttgactaagttaaaataagaacttctttcatcaaaagaccatctttccctccaaatcctatcagctgatgtattacaatctaggagactgtcgctctccaaagttgtatttctctcccttaggattacaaggcttgctgatcgcacatgggaatttgcaaaggagagttcaacagtggtcctgtggtattatggagatctctccctgaggttcaccccatccttgctacttgaacagactctaattgaccaaaacaaggacctagtcttccaggttttccccaatatgcgtaagagtaacttataaacccaagggacatgggctcacagtccaaaatatctagatacctcaaaaaaaacactatgaaagaaagtcagcagtacttgcatatatataataatattatcacctatattatcattcataatacacagcacattatgacttatataacattctgaagataaattatgagaacagatgaactaagaattttaaataagcttaattaataaagagtcaaatgaggccagctgcagtggtgcacacctgtaatcacagcactttgggaggccaaggtgggtggatcacctgaggtcaggagtttgagaccagcctggccaacatggcaaaactccatctctactaaaaatacaaaaatcagctgggccatggtggcacacacctgtaatctcagctactctggaggttgaggcaggagaaccgattgaagccaggaggtggaggctgcagtgagctgagattgtgccactgcactacatctgggcgacagagtgaaacttcatctcaaaaaagtaaataaataaagagtcaaatgaaaatactaggtataaaaaataatcactgaaataaaaagtaatagatccctaagcaggagtaactctaccaaagaattaactgatgagagtaaaaacagaatgagaaactatcatagaaataaagaataggaagaaaatacaaagagatagaaaatatagcataagacctaagaggtagaagggatagatcttttcaaagaaataatgattgtaaatactcagaactaaattaaaaaactcaaatttaaagggctcaaaataatgccaaaaagtccataactagagacattatagtgatatttacatatataaaaatcaaagagatgatgttcaaaactgctcatctcagatcttcatacttgaaaaccaagtggggtcacatttttttctaatgtttattttttattaatagatgtggctccagtgtcttctggaaatggatattgagataaagaaacctaaaggtatttcgcattttttctcatattagtgacttaattttttgttgttttttcttcagggtaggggaatggggagaggatgtcagtgttttacaatttggacactcaaaggattctagagcctcaaggactcccagggatctgttcaccacacttggccagttgccatggtaaaaacctcaactgtgcctgaagtctcccaatccagagactgttgtattctctccagaaaataacctagtgtcttctgctgagttgtagaagagacaatcccatgcttcacaaaatgggggagaagatataaagatttggtcattttttattttattatttttaaaaagtcgtattatcaaatatctacaaaattacaaagaagagtataaaaaaaccccttgtacctaacactccaattaaacatctagctgcctcttaaataggccttctagcaatttatgtgttgaagggccacttatcagccctcttccagagatgcctggagcctctggagctcccatggtgtaattcatcttgcttctcaggttccttcactgctgatttagggttatgctttcttgagcctgctagatcaatttcaacaaatccattgcctttccaactccaaaaattgtattgctctcttattctctttgtccatcagggcttacacctttttctttaccctattcctattatttccatggaagggaatggaggcccaaacaattttccactcttcatcaaacaaatgtgttaattttttcttttttttggatccattgcccaagctggcatccagtagcacaatcacacctcactgcaaccttgacctaatgggctcaagtaatcctcctgcctcagcctcccaactaactgggactacaagcacacccccccgggcctagctaattttttttttttttaagagacatggtctcaccatgttaccctggatggtcttgaattcctgggctcaatcaatctaactacctcagtctcccaaagtgctgggaacttcttaaactgagtccttctttttcgtttgtgtgtctctcttgattgtcattcttgtatgtttcatttttgaacataatattaacaatgatctgagtgtttattattgtgtatattaatataatattttatgtatattaatatatgtatatattatatacttaatttatgtatattaatatttccaacaacttacattatattgtactactgttattctattccacaaataagaacaattaacatctgaagagcttacatgacactcaagctattaaggagttggaatttgaacccacaactgtctgaccctaaagtccaggttccaaacaactgtgcataccacttctcatttctttttcaatgtgaggtagaccttagtgctggtccaagggtgcaaggtaacacactctaagatatatgtgtcatacgcctgcgtaacaactcttgtttaaattccacagctttaaattcaagaaagtacttggaccaagccaggctggcctggggaggttgtgaatggtaaatgagacagagttcatgcctgggatacaacacttgaccattctatgaggtcatattacatacagatgctccttgacttaaaatgagatcatgtcccaataaacctatcattaagtttcaaatatcattaattcaaaaatgcatttaatacacctaacctaccaaacatcatagcttagcctggcctatcttagatgtgttcagaacatttactttagcatacagatgggcaaaatcatctaacacaaagcctattttataatgaagtatagggtatttcatgtaatttactgaatactgtattgaaagtgaagaacagaatgaatgtacagatggatggtccccagcttacaatggcttgacttacatgactttttgactttacgacagtgcaaaagcaatatgcatcactttaagtacccatgcaaccatttttggaaataagcccatagtaaattgaggagcatctggtattctactgaatgcatcttacctttgcaccaacataaagtcaaaaaattgtaagtcaaaccatcgttaagtaggggaccatttgtatcagtaacaagactgatgcgatgcactgaacacggacatgaggagctctgagccacatgcagagtagccttccagcaaaactgttccaggcttatggatcttgagatgtaaggcaggttcctaaagagctgaagacagtcacttccccagacctagactccacagccatatatatatataatcaatgaagattctctttgggagatcctctatctcatcctgaccagtgtcacaggtctctctgctgtgtagcctgactgtggtgacctccttcctgaattacttcagtaaggaccattttgggcttacccatgtgatgtctatgtctggttcccgagttaatatgatctattaagaacactggtcagagtggtcacactactccaatctccctctttgatttccttcacattagcattattttcagaaaaacaatcaagtcttccatttaaaaaaaaatgaaacaaacaaaaaaagatagaaaagaaatggccaggcgtggttgatcatgactgtaatcccaacactttgggaggccaacgcgggcagatcgcttgagtccaggagttcaagaccagcctggccaacatggcggaaccctgtctctactaaaaatataaaaattaatcggatgctgtggcatgcacctgtagtaccagctacttgggaggcttaggcacaagaatcgcttgagcctgggaggcagaggttgcagtgagctgagactaagccactgtactccagcctgggcaacagagcaagaccctgtctcaaaggaaaaaaaaaaaagaaaagagattatctctgaactgaaagtcaatggaaaaaaaaacaagaagaaaaaagatttataaaggcttctgagggttaaaaaataataaataagactaggtacaggggctcacacctgtaatcccagcactttgggaggccaaggagggtggatcacaaggtcaggagttcgagaccagcctggccaacatggtgaaaccccctgtctactaaaaatacaaaaaatagctgggcatggtggcgggcacctgtaatcccagctactcaggaggatagtttgaacccaggaggcggaggttgcagtgagccaaggccatgccgttgcactccagcctgggtgacagggtgagactccgtctcaaaaaataaaagtaaaaataataataataataaataaaaagcagcattaaacacactagagtcaaatccctcacagacttcaagggtctgtccatggccacacataaatctgtatggagtaggaaggtaaagtttttcttttgattctgtaacacacttctttctacactgtgcacatcagggaaacatgaggacatggaaattgagaagacaggttctaagatgtcaagaacaggtttaaagactcactgtggactgtgtttgcgccatgtattcactctccattttattcagacgcacatttgtatcctcaagcaattcttgaatgttttcagtgtgttgcttttgaagatcaaacttttcctgttccatttctgctacagcattgtgaagctacatcaggaaatcaagagttgactcttttactactatggaattgactattttgtaattcagcggaaaaaatggtttctatattcctctatttatatatatgatgacctgaacaccaaaagatacaaaaaaccaccagtaaacattcaaggtaaagatatcatataaaaagcaggatcaagaaacacttaatttttcctttactttcctgaattgaaaattttaatggatgaacaaatattaaaaggaattatctgcctcaggtagaaatggtaaataaatcaggcagataatacaagtgaacattactagtattagtctgaaatgagaaaacagaaacattataatattgtaactaattaggaatattgtcccattgtccccattattcatcctatttgcacggaattttgtacaccagtaatgttaaaaactgctttctcccctacctgcacctcaaacaagaaattacttctagtcattccctaatctatacaaaaacagacaaaaagatcacatttatcagtcaaacaatatgggtaggatgactaagcagaattgtatactacatgtacagaggtctttatttataaaaatcattatgtatatactgtttaaatggatgagcttttaaaatttctacacaaactaaggtaaggaaaacaaaggcaaatacaggaggtccagacaagcttcaatggacatcttccaaaaggggttgaaaatctgtgctcccagccctgtgggcattccttcacttatcttaatgggggtacaactccgagtctaacttccattccctgcatccaaccccacacctacccaataggagaagagaccaggagtccaaacagtccaaatgatatatttggctttttgtttttgtttttgttttgagatggagtctcactctgtcacccaggctggagtgcagtggtgcaatctcggctcagtgcaacctccgcctcccaggttcacgtgattctcctgcctcagcctcccaagtagctgggatcaaaggcagccgccaaaacatctggctaattttttatatttttagtagagccggggtttcaccatgttggtcagcttggtctcgaactcctaccctcaagtgatccacccgcctcagcctcccaaagtgctgggattacaggtgtgagccaccgtgcctggccccaaataatacatttgattcactacctataaatagggaagagagaaaggacaaatagaggcagtgtgaactcttatttgactagaaagatactggaaggacagggaaaacctgtgagagatggaagctagggcagaatgcaggcaataattatgataattgtactggtaaaggtctcaagaacgcttcttctagtttctagctgaataggaagaatgaggatgctcagtaatagccatacagaagactcctggattttgcaagtttaacatacacagttttgattatttgtaagtggtccccgaaatccctgatgtatctaatttttagttttgctgaaataaacattgtaaagcagtattaggtctgttgttcaaaagtgagtcacatagctggtacaatgcacccaaatctcagtgctccttcacagctgtcgagtgacatgatagtaactcagataatgggctctaaaggagtcacttagaattttacagttgtacttacaggagcaattatatgatgtagtggtttcctcatgtttaaggtctcccaaagcccctagaacatatgcctgccgaatgtcaaaaatctaatagcccatcaaaacttagtggtttctcatgtgtcttccacagttgttttataaagggaccgtcgctgtcggaggggtggctgtaagtcagtctacaacactcatccaaggaatttgtagttgagactacaagggtaaaaatggcactggcaaaaacaactatgctattacttggctgatgtgtttgaggactagataggcatctggtctcatagtctaaccagaggtgattaaaatgtattcattcaacaaattttattagtacctgctatgtaccaggcataatgcatcagtgagcactttcccaaacctaacaatgaattggagtccaggtcactcagtctaggaggctttaaagggcaaacgttcctttaagggataaactatcttagtagcaaatattattaggctataggatacaaatcttgctggagtttatgaaaccataggacataacaatgagttgatccataggaattctcaagaagaatttttacccagagtttgataatgggtacaggagacaccaatgcccttcccagcatcctacatattcgtctttaaccatatagttggctcatgccagaggagacccagaggcaacagaaatctgtcccaaataaagggaaaagtattacaaaaccccacaggtcaatagcgcagccactgtggaaaacactttggcagttcctcaaaaaatttatcaaaaagatacacagagttaccacataacccaggaatcctactcctaggactacacctaacagaatgtaaaaacacacacaaatgttcacagcaacattattcacgatatccaaaaagtggagtcaactcaaatgtctatcaactgatgaatggataggcaaaatgtggtctatccatacaacgcaatattatttgaccataaaactgattgaactattgattcatgctacagtgagggtgaaacttaaaaacattacggtaagtgaaagaagccagtcacaaaatgccacatattatattattgtatttatatgagatatctagaataggcaaatctataaagacaaacagtagattgatggttgaagagcctggggtgtggggagtggtaactgactgctgatggataaaggtttctttctagggcaatgaaaatggtctgtaaattatattgtggtggaagttgcacaactttgtgaatacatcaaaaaaaccaatgaattgtatactttaagaaggtgaattttatggcatgtaaatcataactcaatattttttaaaggcccacagaacagcaaaacgtgttgacagctggggcaaaagtcaagacaggaagaagaattgtgagaaaagatgaggcttgaaagatcaccagagtctttatcatgaaaagccttgtaagtcctaagaactaaggaaacaatgggagccactaggacaatgggaaacactagagtgatttaaacatgattgtgaggtcaaccagatttgtgtttgtgaaagaccaatttggctgtattgtgggacatggaatgacgacggacagactggaggtagaggccagttacaggtgatctaggcaagagacaggggtctcctgaactaaggaaggaagagtggtagatacattcaaaagatgaataattaacagaacttggcaaggcattagatgtgtgagctgaagcaaaaagaagagtctttaagtagctgagttgatccctatcccatagagaataccctactgggtaggtatatccctccatgggataggcatctccatgggataggtattctccatgggatagggaaaaaggaaatacccattttagcaacaaacgaagaagatgaagtttaaggacaatgatggaattcagaccaaggagagattttaaataggtagttgaataactgggacttaaggtgagagacataggatgcatatttctattagggaatatacacacacacatacatatatcaccttgtccatgtagaatacataataattgttgaatgaatgactacataaataacaaagtgtatctaacatgtgcttattaattttggtgcctgtcctgcttgtactcagttttcatctcagcccagatttacataaaattactctacacacacacacacacacacacacacacacacacacacagccttcagtgagggggcaggtacagtggctcacacctgtaatcccagccctttgggaggccaaggcggaaggatcacttgaggccaggagttcgataccagcctggccaacatggaaaaaccccatatctacaaaaactacaaaaattagccaggcagtggtggccacacctgttattccagctacttgggaggctgaggcatgagaagagcttgaatccaggaggcaaaggttgcagtgagctaagattgcaccactgctctccagcctaggtgacagggcaagactctaaaaaaaacaaaaaaaaaaacttcaagcaggtttacgtatttacacatccactatttattgtataactagaaaaaaaagctttactaatccagcagaaagaaaaagacgtacccttgtaagtggcagaagcctcttctcttcaaatacctgacaatttaaactagaatatatgaaattagggaattcagacaaaggaaagcaggggacttgctaggtacacaatgtcattgaagtaaatacaaaaatatgccaaatttatagaaaagataaaaccaaaatgtgagaaagaaaaaccacatgactagaaataacaaaataaaaactagaaaagaaccaactaaaaagcaatctatagattcaacactatcctatcaaattaccaatgtcattttttacagaattagaaaaaagattctaagattcatatggaaccaaaaaagagcctgaatagttaaagcaatcctaagcaagaagaataagtcaggcatggtgcctgactcctgtaatctcagcactactgggaggctgaggcaggaggatcgcttgaggtcaggagttcaagacaagcctgggcaacatagtgagaccccacctctacaaaaaaaagttttaaattagccaggtgtggtaatgcacacctgtagtcccagctactcaggagactgaggcaggaggatcacttgagcccaggagctcaaggctgtggtgagctgttatggtgccattgcactccagactgggtgacagagcaagaccctgtctcaaaaccaaaataaaacaaaagaacaaggccagtgggaatcacattacccaacttaaaactatgttataaggctacaataaccaaaaccacatggtactagcataaaaacagacacatagaccgatgaaacagaagagagaacccagaaataatgatgcacacctacaaccatctgatctttgacaaagttgaccaaaaaaatggagaaaggaccccttatccaataaatgggatgagataactggctagtcatatgcagaagaatgaaactggataccccacaaaacacaaaaattaactcaggatagattaaagacttaagtataagacttaaaactataaaaatcctagaagaaaacctaggaagtaccattctagacattgaccgtggtaaagaatttatgattaaatccccaaaagcaattgcaacaaaaataaaaaatggacaagtgggacgtaattaaaataaagaacttttgcacagcaaaagaaactatcaagtaaacagataactcacagaatgggagaaaatatttgcaaactatgtatctgacaaaggtctaatacccagaatctataaagaactcaacaattcaacaacaaaaaacaaataaccccattaaaaagtgggcaaaggacatgaacaaacaattctcaaaaaaagacatacaagtggccaacaaacatacgaaaaaatgttcaacatcacacgtcatcagagaagtgcaattcaaaaccacaatgagataccacctcacaccagtaaaaatgggtgttatttaaaagattaaaaacaacagatgctggcaaggttgcagagaaaaaggaatgcttatatactgttagtgggaacgtaaagtagttcaaccactgtggaatgcagtttggagatttctcagggaatttagaacaactaccatttgacccaacaatcccattactgggtatatacccaaaggaaaataagtcattctacaaaaaaggcacatgcgcttgtatgttcattgccatgctatccacaacagcaaagacatggaatcaacctagatgtccatcgatggtggattggataaagaaaatgtggtacatatacaccatggaatactagatggccataaaaaaatgaaatcatgtccttcgcagcaatgtggatgcagctggtggccataatcctaagcaaattaatgcagaaatagaaaaccaagcatgttctcacttacaagtgggagctaaacattggtatatatggacataaaaacaggaacaatagacactggggactcctagaggaaagagggggacaaaggctgaaaaactactgttgggcactatgctcactacttggatgatgggatcattcatatcccaaacctcaatgtcacacaatataaccatgtaacacacctgcacatctaccctctgaatctaaaataaatgctgaaattattttaaaaaatgaaataaagtatccataatattcaaagcaatatacagattcaatgtaatccctatcaaaatatcaatgacattttcacagaaatagaaaaagcgatcctaaaatttgcatgtaaccacagaagattctgagtagccaaagcaatcttaagcatgaagaacaaaggtggaggcatcacagtaactgacatgaaaatatacttcaaacttgtagtaactaaaacagtatgctattggcataaaaacagacacacagaccaataaaacagcatgaagcacccagaaaaaaaatccacacatttacagccagctgatttttgacaaaaatgccaagaacatacaatggggaaagtatagtctctttaataaatggtgctggggaaactggatatccacatgcagaacaatgaaattagacctgtatttctcaccatacacaaaaatcgacgcaaaatgaattgaaagacttaaatggaagaaccaaaactatggaactactaggagaaaacatagaggaaaagctccatgacataaatctaggcaacaatttctatacagcacctcaaagcacaggcaacaaaagcaaggaaaaaaaaaaagacaaatgggattacatcaaactaaaaagcttctgcatggaaaaaaaaatcaacagagtgaaaaggcaacctacagaatgggaaaatacatttgcaaattatacatctgatatggggtttatatccaaaatatataagaaactcaaacaactcaatagcaaaaaaacaaatattctgatgattaaaaaataacctaatgacttatttaggccaaggacctaaatagacatttctcaaaagaagacacagaaatggccaaaaggtagatgaaaaatgctaaacctcactaatcattagggaaaggcaaaccaaacttacaatgagatatcatctaactgtagttagcatgattattattaaaaagtcgaaagatagcaagtgttggtgaggatatagagaaaagagaacccttatatactgctagagggaatacaaattagtacagccattagggaaaactgtgtggttcctcaaaaaattaaaactggaactaccatatgatctaacaatccccctactagatatatatctgaagaaaataaaatcaatatgtcagagatatctgcattcccacatttactgcagcattattcacaatagtcaagatatgaaatcaatgtaagtgcccatcaaaggatgaatggataaagaaaatgtgatagatacacacacacacacacacacacacactggaatactattcatccataacaaagaatgaaatcctgccatttgcaacaacatggacaaacttagaaggacattgtgttcagtggaataaactgggagcagaaaaacaaatacataatcacactcgtggaattttaaaagttgagctcatagaagtagagaacagatagcgattacaagaagcaggggaggagagggaggaaaggggacagagagaagttaaaaagcaggtataatgttacagttattgatagggtttggctgtgtccccacccaaaatctcatcttgaattgtaatccccataatccctatgtgtcaaaggagagaccaggtggaagtaactgcatcatggggtcagttcccccaagctgttctcatgatagtgagtgagttctcatgagatccgatggttttataagtgtgtggtagttcctcctgtgttcattctccttgccgccttgtgaagaaggtggcttgcttccccttcacctcctaccatgactgtaagtttcctgaggcctccccagccatgctgaaccgtgagtcaattaaagctctttcctttataaattacccagtctcaggcagttctttataacagtatgaaaatggactaatacatagtggacaatggacactaatataggagaaataaattatggtttatttataataaaaatggacaatataataaaaatggacaataatataggagaaataaattatggttttctaatgcacagtagagtgattatagtttataataatgtattatatatttcaaaaagttagaagagaggaatttgaatgtcctcaccaaaaagaactgataaatgtttgaggtgatagaaatgctaattactctgattttatcagtatataaagtatctatgtattgaaatatcacactgtaccctaaaaaatgtaaaatcattacatgtcaatcaaaaataaaataagtttatacaataaattctagtccatattatattttctaaaatttcaggaaagaaatactccaatggcccaaatacaaaattaaaatggcttaatttccaaaaactgttttagtgctatttaactaattttgtttaaaatctgttggctgataagaaatccagaacattaattaaattcaagagctagtcaaaagaatattttctaaatgaaaactattttatagaccatagacttccagaagaaaatataccaaaacatgaacagtagctatttctaaacagcctggaattttagttattttttaaacttttctgtatattctgtgaaatctattacttttataattaaatatgttacttggaagcataaacttttatgttttccattagtattttatgtagcttacctttttttcccagtcattatttagagattccgtactttgttcacatatctttttcagctctgcaatctggtcttctttagtctctctgataacttgacagtcacgtatcagtgtctgaactgtcaaaaattttgaaaacatagttaaaccaattctaggtacatagagtttgatgatataaaatttagtgcaccagttagtaggtaattcaatttttcaccaagtcttctcaatgctttcttctaaaatatcttttattccttgctctttttctcgatttctaccaccacagacagccttggttaaattcatcattactggctccctagacaattgtaacagtgtattggtctcaagcatcattcccctccaaggagtcctctgttgctttgaggaaatctttcaccattattctaagtgaagtaactcaggaatggaaaaccaaataccatatgtttttacttataagtggaagctgagctatgggtatgcaaaggaacacagaatggtataatggactttggagattgagaagcagggggtggaaaagggggtgtgggctaaaaactacatattggatacaatgtacattacttgggtgatgggtacaccaaagtctcagacttcaccactgtacaatgaatccatgtaaccaaaaccacttgtaacctaaaagctactgaaattttaaaaatttaaataagtaaagaggcctttcactggtgcaaatctggtagttatgcccaggcttacaaacgttctacagctcttctcatctaaaagataagtataggtcaaagcctctgacatggacaagagttcctcatggttctggccatatctcttcccacttgcatgttttaaaccactattataaacacaccaacctatatgcagattcctgagttcatattctttcttatatcactgcctaaatatgatcatctatctacatagaatgcccttccctcccttattgaaaaactcctactcatccttagactctcaactgaaaaatcacaccttctttatgaaccagtcataaagaatcactaaatcatgattcactcaaccagatttctccccttgcagggacagaaagaaattcctctttattcccatgaaaccttgagtatttctcaattaaatcatttattaacattatagtgatttacttgcctgtttcctctttaatgagactatgttcacggagaagaaagagatttcaactttttatccacagggcataacagtgccacacaggcaagtgctcaaaaagacgtgtactgaatgaataaataaaggaacccctcctttcaatatattgttgctgctagatacttttaaatcatttttgaagtttatgttactaaaatgaaataggttttaaattatataaaatatttgccttataaatcatttctctatcttctttactaaaattatttaaacagtcactgatttaagtgaaaatgtgtttaatatattcatctcttctggatagtaaaataaattcagctctatttttaattggatataatcttatcatagcttactaaatatgtttttattcatttacttcgagacagcaaaatttttgtaaacatttccctaaaaattgttttcactcttatatctcaactacacaacaaataaggagaggagatgaatccaagttaacctaatgtgggtctttaccatctacaatatattttactttacacttccaaaattaaactaagatctgattgcaattcaaaatgcctttagaaacattatttttaaaacctcatcatttttaaaccttaggcatgtttgaattacctattttgaatcagggtaaagaagaagacctggaaataaatttaaaatatttttctagacactggtaatatttggagaaaaaacctaaacgaatttataattgcttttaccaacatttaagggtggaaatgaacctacaaatatttatttaattggttaacttatctatgtaatggctgtcctaatttgtcaaagccattatcattcactcagatatactcaggtttgatctgggggagagccagtaagttccatacagaaaatcctaaatgaaaaccttcccttctccttttctcttattcattgcctagatcttctcattcactaaatcatgattcactcttaaaaacttcttcttttcttcggttccattctaactactcccagcgccatcattcagaaatccttctcaccttaacatgcaaaattacagcagcacagaagcagaacatctctgagttggcagggactttatatattatttattctgatctcaccattttataatgagtaaaccaagacccagagacaacttgctatcatacatcggacactggtaacagagctggaattacagcctatgttttctaataagtagaattctctctccttcactccattctgcctctgcctaacagacttggaattggcctactctgttcaatacaccctccattaccaggctactcctcccaaaacatgaggtcctaaaactcacatctcaaaatccttccctggctctttacatccagcatctacaggacaaagttcaagcttctaaatctaaaattcaaggtcatacttaatctagccccaagtcaactatcttaatattttaaaatcttttttttttttttttctgagacggagtcttgctctgttgcccaggctggagtgcagtggcacggtctcggctcactgcaagctccacctcccaggttcatgccattctcccgcctcagcctcctgagtagctgtgactacaggcgcccgccaccacgcccagctaattttttgtatttttagtagagacagggtttcactgtgttagccaggacggtctcgatctcctgacctcatgatccacctgcctcggcctcccaaagtgctgggattacaggcgtaagccaccgcgcccggcctaaaatctatctcttaatgcatggggtatccattctagctaaatagttgagaagtacccttcctacaacttacctatttcagcattcccatcccagtacctgcaactcttctctccaactaaccaagactttaaaatttcacaaaattttacaaaagttcctttcccaaaacaatattttcaacactctctctcatgaccacctattgatgtagatgtttcgacccataatcatagtcaactacggtcagagttagctcaagtggttacctcctcatgccggactttccatctgtccatagtcaacttaatacttgattacatgctttcttttccttcttaattaaagtgcaaataggaaatacattttaatttttttctgtcaatcacaataccagcaaatactatcagacataaaagtagatacttaatgtaatgaattttactagataaagaagaataatttcctttgacttcctcatgaaggccagtaagtcctaattctatgactgccctcaatactctatggcagctgtatcccaatgaggctagagttaagaagagggagtgaaagcaacatactcttccaactctgtatctaaaccaaccaccagtactactccatcactgtcactacacaaacacacacacagacacacacacacacacacaaataaacacagtttttgccccttcatatggaagcctatataaatatatccactgatgaaaccccacataaacattcctatctcatactataaaaggtcagaaatcaaatttttttctccacatcactaaaataaaatggaaatgttattaaaagatgtatgtaacaacacaacatcacctttcttttcaagctttctaatagtctcttcagtttcatgttgtttactcctgtataaagttttcagttcttctatttcattattctttctttctaaaatctgcaaataaatttaaaatatttcagtatattgtactactttacatataggacacttttttgaatcctgatatatttaattctaaaacataaatagaaaaagtgattttaacaaatatgactacactgtgaaattataaacacacacacacacacacacacacacacacacacacacacaaagtagtatctcttatccacagctttactgtctgctgtttcagttagatgcgtgtgtttttgtgtatgtccatgttaataattctagcctagtcagaagttcacgttttgctcttgcagcagctaggaggtagaatctatatgatctgccacacttggaagcttccaagttgcctgaaatcgtgagactttcctccttttgactagtgaatattgccgcaaattggcattgtagtgatttaagtgactttttaaattgattctcaaatgtcagtgttttgtaaattaggtagaagtgttttgtcctgaaagggagttagggattctttttctcagattagcataaaaatagctgaaattgtatgtgtctaatatttctcttcacatatttttcttatacttacgatatctactgttgtttatctgctagcaaattccagcagataataagtgaatggtgaattagtaggtatacattaatagaaactcgtaaagaaccaatcatataacttttcaatgagcataatatttttgtaagtctatctcagctaatctcataaatggtttccccccaaactgtaaaaattatattatagtgcattaagaaaattattaaatatacaagaataattattatctgaaagaaatacgttatctgagatttttgtataataatttttaaggacagtataaataataatttcagtgattccctaaaatataattcagaaattaagctgtcataaagtggcagagagaagtcatcagaaacttgccaggttgggagagtataattcatcacattgcactgggatagaatattcttcagctgggcatgtccctggatccgcccacaagcaccgttctatcctcctagtgcacagtaaaagaattcccagatacatgaggagatgacatgtaatcagcctcctttatatctagctctgctactgtgaatcagaaaaatcagctcaaaatatgtcaaaaattgcattaaaatctattgttaatttatattatgtcagaagttttaaatgtaatcatttaataaaatttgtgattttatacttcaaaatacatctatactcacaaaaactacagaaataaccaaaatgtaaaaaagatagcaagtaagagaaaatgctaatcaaggggaaaaaggaatatctacttttcttatggctggggtatatttcccatacacccaaaagtcagcttaacaagaacaacagaaaagaacggggcacagtagcacatgcatatagtcagctactcaggaggcttacagatcacttgagcccaagaattcgaggctgaagtgagccatgatcatggatcatgcctgtgaatagccactgtcctcctccagcttgagcaacatagcaagatcccatctctggataataatagccataaagaagcaaaaaagaaaaagaatgtatactaataggtaaaacactctaaattttacgccttgccaattcctgatgcttagaaaatgccagacaagagtaaactgatgaatatacttttcaaatctagcataaaggattttatttatattttacttggcacttcaaactagttgcactgtctgctgcaaataaatttcaggatttattttaaagagaaattgctggaaagaattttattattaaatatgttactttgagtaaatctttgtaacagacataccaagaaacctatttcaaattccatcaccgtaatttttccaaataaatttttatattcatttatcttatacatcaatagactctatttcaattgtacatgttatattgaaattatattactgactctctaacatacttatgatagagaactattatctaaacaatttaaactaaagtaaaactctagtaagagcaaaaaaaatttgcctgtaatatctgaatgggggagaggaaattggaaaaggagagttcagtttttttttctctaatatccagtcagtggtttcctccttattgctttaaaggacaagccaaatacgtattttactaaatattaatatatatatattaagcttttaagaaagcttggatacataatcctgatgctgtaactactgcaactacctgcctctgtctctagtactcagttttgggaagcagaatcataggcttagttttgaaacattaaatgcaaagtttccatttggatcaacctccatgtatttcaaaaaaacacatacatacattattatcactaaatgttttaatcattactaaaatatagtaacaacccaaatcccatataggataaccataattaacaatttttgctgtgccagctaagaaaaaaaaataagttttatttgaaaatacaggctgaaagattagaaagcatcaatcccaatgagctacttgaaaaacaagcctttattgtcagtgccagcactaaaatgcatacaagtccaagagctcctttttaaattaaaaaagaaatttaattaccagaaaaccaaaagaatattagaataaaacaaattctagtatttaccattgatgtcttatttcaactttcatgaaaggtaatgacagaatgcagataaaagactataagaaggtcagcctaaatgcaatagttaaagaaggactaaaaggtaatgtaaatataaggttttaaataaacacatatgtttagctaataaagttaaaaaatcaacttttgctgggatattagtttagcatattccacttataacagaatgtcataaagtacataaataagtggatggatggttggaagaatggatggataactggatggatcatcataaaacctagaatatttttagtgttcaatataattaaaacacgagatatatatcctaccttctgaacatcagcatcatgtttctgttgcagtttaagcttttcttcatgaaatttagcttccatcatttttgttttcatgtccagcttcaagaaaaatatttcaagggtgttattaatttactttccctttggcaaaaaatacacaattaaactaaaataattccctataaaaaagacagttatcattttccacctttaccttgtagtcacagattctagcaatcacattacatataccaatatgtttatttcagtcctctaattactttcaaactagttaaaagtctttaaaataaatttcacctggtaggcaaaactgacaatatgaagtacagattcactactctccccattctctcccgcacaaaagagaaaggcattttaaagtgatattttgcttttacatttaaatccacacagtattttactcttcattatttttcatttcagtaagtctcttccaaccttttatttttttttctttgatctacttgctcattttaaaatactctaattaacctacatatgtaaatatgacttgagaatgaatatccataaaaatggcaaattactgattagtgcatatctttcgacagtttttcagttctctctcccggaatcatagacccccgctccctcaagggagtgactttatctccttccaagcattccttaacttctatcctctccaaaccaacaccacatgcaacggtgctctgagcaaagccaaaaatgtaaccaatcttcttaatataagaagggtatcctagaattaaaagagcaatagtgacaggtttcaagaagagcaacataaaattgattatctcaaatgtgaaagtatttggtcacatgattcctcacaatttaagagagttaagtgttatacattggagtctggcagacctcttttccaactctaattccaatcccaccatatatgcactgttgtgactttgagcaagtgaccctttgacactctagttcctcttctgctaattaaggaaaagtatccttacctcagtggattgtgaaaatcatattcaataaaataatttaaatgaccatacccaggacaatgtgtggcacaaagtaagtatgcaaaaatatcagtcaaccacatttaggaaaaacattttaatattattaatgtaccttcaaaatattttcttgaaaatttttgaaatacactttatattttcaattactttttcaaatacaaaataaatttagcaagataaacatatatatcatattaacatatcaaactgagattttatgtttcacaaacaaaagttaacataatacaaattcatgacttaaatgttatgaatggtggagaaagagacagttaaccatttgctatgcaaaaaaaaaattcaattcccttgcctctaaatcacacaatatttcttcttcgtttttgcagaaaggaggctagacaatctaattccatgtaaagatccttcacagaagcatttttggggtctattaaaagggaactaaagccaaaaaacagtatgacaaagctggccaggtctaagagacatgattcattgccagatcttcccataacaccttctagagaacttgtcataccctcagcttttgagggtaagccctaaataccatgtgagtgtgctaccataaccccaacccaacacctctcaccggccctacctcattatttattgaccaagttaggaataaatacctgagatatgcttaagcaatccattagctagcaaaaaatcattcagattctctctcaagaatctgaactaacacaccaagttagctattttggggagcaaacccaagttctaaagtgcagcaaccaagagaaagcaggccaatccagtatatagaaaaaagtagagcaaatacacaaagattagaaatcacatagcatctgaaatacgagggaagcaaactcaggctccaacaatctcaatgacactagggttagttgaactcaaaaggatttttgtgtatctttttattttatgtagcttgatggatctctgttcttacaaccaaagatatttatctaaattctattcttctggttataactttttgccttggcataatattaaacttaaagaaaagttgcaataatagcacaaggaactcccacatgccctttacccagatttaccaattttttatattttgccctatatgctttgtcattttatgtctatatctacctctctatatatataaatgcatacatattacttcctcaattatttgtaaattagaagcatcctgcctctttatccctaaaaacttcaatatatatttccttagaacaagaacactgtctttgataaccaaagcgtggttatcaaattgaggaaatgtaatattaacacaatgatattatctactgcacagtttatactcaagttttacaaattatcacagtaatgtcatttatagctattatttttcataatccaggatccaaccaagaatcacgcattgcttttagttgtcacatcaactatttatttctcctttaatctggaacagcctttcttcgtgtttagtgaccttgacattttttaagagtacagaccgttattaaatgtctctccattaggatttgtctgatgtttcctcatgactaggtttatgagattttggcaagaatgacactaaagtgatactgtgtcctttttcattgcatcatattagaaggaggctagtttgtcccaatatctccaatgtacagctcagtaacttggttaagacagtgagcaccaagttactctaagggtaatattacaaagaaagtctctccactgccatccttttaaaaagttaagagtatctcatctctggaaactcttaccttgatgctacagaatacctctatatttccaccctgtactctaaagtagaaatcctggatgtattatgtacaactagggcatgatgcctgatgaaacatcaggattagaatatagaaacaatcttgctactatattatataaagacagtataaggatgcagatttagatatagatgtagatataaatatagatatgtacctatgtgttcatctatatagtctgaaattgaaaaacatttctaattagtttgacctccaaggaagcctgacttcaaaaaacatttaagttttctttttctgacatcagaatatacattatcaatttcaaatgtaagatgtaaaaattaggcttgcagatctacttcaggctataatgaagcagggtaccacactaacctcccactgttaaccataaaatgggataaaatatatgagataaccattctcaagtattggacaataggtaatgcagtactgtgatcctcaagaattgaagaccacgatagtcccaactttccgcctgggtacaacaactggagtccatgtggagcaccacaggcctactgagctgagaaagcagaggtcagagttctgagcagttaaagaatcttaaatgcagggtactaaaagaggtataagcttcccagaagatttccctgtcactcctcaaccacaggctgatggctgggatgtgtgcaccctgggtgaataacaaaacattactgctacaaagtagaaaatgtaacagctgctacaggttaaagtgctgggaagcaccaaagacctgcccagccaggtggagacagcttcctaacaacttgcaaatacctgggaattcagctgaaacaacataaaggccacaccttaggactactctaaacctacctacaaggactgaaagcaagcctcagaaagatagtttgtaagacaggtcccatggtgttggataatatctttggctttctatgtatttgccttaacagaatgtaaaaaccaagtctacacaacttaaaggtgattaactagtaattgaacagcctataagaacaacaacaacaaaaaaattctatggagaaaaataacagaatccagagtccctacaaggtatcaaccacaaggtcctttatctagaaagtaataaagatgcaccaaaaaaataaaaaagaaaagaaaattttgtccttaggcaaaatcaatataaataaataagttaataaggcccaagatgactctacttcagcacaccacagtttaaagaagttcatataaataccttcaaagaactaaaggaaaacatattcaaaaattaaaggaaaatattattttaatgaaagaacggataagggatctcagcagatagatggaaattataaaaaggaaacaaatgaaaattccagaatcgaaaagtgcaataattcaaaggaacaaaaattcactagatgagcttaatggattagagagaacagataaaggagtctgtaaatttgatgacagaacaagagaaattatctgacagaaaaaaagattgaagaattgatttttaaaaatcaataacactttggaaactgtgaaacaaaatccaagagtctaatatacatgtaattggggttcctatagaagcaaataagaatagggaaagattatttaaagaaataatggccaaaaatttcccaagtttgataaaatataaaaatactgacttagagaacaagatgctcaatgaactctatgcaggataaatgcaagaaaacaacgcctagaaacatcacaaactgctgaaaaacaaaaacaaaaagaaaaatcttggctgggcatggtggctcacacctgtaatcccagcactttgggaggccaaggcaggcagatcacaaggtcaagagttcgaggccatcctggccaacatggtgaaaccccgtctctactaaaaatacaaaaattagctgggcgtggtggcacgtgcctgtagtctcaggtactcaggaggctgaggcaggagaattgcttgaacccaggaggcagaggttgcagtgagccaagatcgtgccactgcactcaagcctggtgacagagtgaggctctgtctaaaaaaaaaaaagaaaaaaaaaaaaaaagaaaaatcttaaaagcagccagaggaaaacaggcattacattcagagaaacaacaggctccccaacagaaacaatggaaaccagaggacaaaggaataacatcttagaagtgctaaaagaaaaattcagatgacttaactcatcaccagtagaactgcactaaaacaaatagtaaaaggtattcttaaagatgaaaacttagaaactctgaaatgaaggaaagtactagaaatagtatgtgagcagagatacataaaagccatttttatcttctcacaattccccaaaacacaactatttaaagataatacaacaacctcaaaagttaggtttcataaggtatttagaactatgacaatagcacaagtgattgtagggttaaattagattatactgttttaaagttattagatttatgaggtggaaattagaaaatgggaaaagtccagtgtaagcggcacaatattgacactaaaaattgactttgatatggtaaggatgcataattttagcccaaaagcaaccaataaagaaaacatacaaagggaaagtatagccaagaagtcaatagaaaaattaaaatagaataacaaaaaaataactaaaaataaggcaagaaaggagcaacagagtagtgaaaaataaaaaaagggggtaccagtggaaacgaacaccaacaaggtagattaaacctaaccatatcgatcagtaactatattaaatttaaatggactaaacactctaattataagagactgttaaaaaattagcaatgggatcttgaatgggaatcattatggtggatgagaggcatgaggactagattgcagctccaactcggacagacagagcagtgtgcagaggcttgcatcatgaattttagctcaagaatgactgcaagaatgaaccaggaaccccgaggggacccccagaccctctgaaggaagaggactgctcctgcaggacgcgggagacaccccaaatactgtgagttcccaaactgcagaagtgggaaagggagaccctccattcccaaacacacacccccactgggaaaactcaaggtctggtttgcaggagacatttccgaccttacccacagctgggtcaatttagagggctgagtgaaatacaggggtagaggaagtagtaggaaaggccctgggagctcgctgggtccccaagcaggccattcctgcctggtaccacagggaccttttgcgagggcagctagaggcatagggggaaataccacagagagaaggaagtctccagctgaactttgtaacaatttgaactgggcgagaaggctctgggccagaactcagagaaaggtgcaaacccagtgtgcagactccacaggcggcggggtaagaaccaaagccctcttcttttgcagctgggaactaggtagcctggggcaagttctccagccctgctcacccactgcctggaaatagactcggggctgctagggggacatggtgggggtgagaccagccctgaagactgtgtgggagctgggtgagagctgtgactgccagccttccctcacttccctgacaacctgcatgactcagcagaggcagccatattcctcctaggtacacaactccattgacctgggaacctcacccctatcccccacagcagccacagtaagagctgcccaaggagagtctgagctcagacatgcctagccctgcccccacctgctgggccttccctatccacactggtagctgaagacaaagggcacatactcttgggagttctagggccacgtccaccactggttcctctccatagtaccacagctgatgctctctggaaagtgtcaccctctggcaggaggccaaccagcacaaaaatagaactgtaaaccactaaagctaagaaccctcacagagtccatttcaccctcatgccacctctaccagaacaggtgctggtatccatggctgagcaattcatagttcacatcacaggactctgtgcagacaacccccagtaccagcccggagccaggtagactcgctgggtggctagacccagaagagagataaccatcacttgcagctcagctcacaggaaaccacatccgtaggaaaagggggagaatactacatcaagggaataccccgtgggaaaaaagaatctgaacaacagccttcagtcctagacttttctcagagcctacccaaatgagaaggaatcagaaaatcaactctgataatatgacaaaacaaggctctttaacacccatcaaaaaaatcacactagctcaccagcaatggatccaaaccaagaagaaatccctgatttacctgaaaaagaattcaggaggttacttattaagccaatcagggaggcatcagagaaaggtgaagcccaattcaaggaaatccaaaaaaacgatacaagaagtgaagggagaaatatttaaggaaatagatagcataaagaaaaaacaatcaaaacttcaggaaaacattggacacacttagagaaatgcaaaatgctctgcaaagtctcagcaatagaatagaattgaacaaaaagaagaaagaaactcagagcttgacgacaaggtcttctaattaacccaatccaacaaagacaaagaaaaaagaataagaaaatatgaacaaaggctccaagaagcctgggattatgtgaaacaaccaaacctaagaacaatcggtattcctgaggaagaagagaaatctaaaagtgtggaaaacatatttgggggaataattgaggaaaacttccctggcctttctagagacctggacatccaaatacaagaagcacaaagaacacttgggaaattaatcacaaaaagatcatcacctaggcacactgtcatcaagttgtatattctggttattagtccattgtcagatgtatagattatgaagattttctcccactctgtgggttgtctgtttaccctgctgactgttccttttaccgtgcaaaagctctttagtttaattaagtcccaaccatttatctttgtttttggggttcttgttcatgaaatccttgcctaagccaatgtctagaagggattttccaatgttatcttctagaatttttatagtttcagttcttacattaagtccttaatccatcttcattgattttcatataaggtgagagaagaggttccagtttcattctcctacatgtggctagccaattatcacagcaccatttgttgaaaagggtgcccctttccccactttatgtttttgtttgctttgttgaagatcagtgggctgtaagtatttgggtttatttctaggtcctctattctgctctattctgtgcttttgtatcttttttttttcttttcttttctttttcttttttttttttttgagacggagtctcactctgttcccatgctgaagtgcagtgacacgatctcagctcactgcaactctgcattcctggttcaagggattctcctgcctcagcctcccaagtagctgggactacagacatgcgccaccacgcccggctaatttttgtatttttagtagagacggggtttcatcagattggccatgatggtcttgaactcctgacctcatgatccacctgcctcagcctcccaaagtgctgggattacaggcgtgagccactgtgctcgggaagttttatatcttttatgtggagcatttaggccatttacatgcaatgttagtattgaaatgtgaggtaccattgcattcatcatgctctttgttgcctgcatactttgggttttttttaatttttgtttttgttttttaacttgtatttttgttttacaggtcctgtgtgatttatgctttaaagagattctgttttgatatgtttctaggatttgtttcaagatttagagctccttttagcacttcttgtagtggtggcttggtagtggcaaattctctcagcatttgtttgtctgaaaaagactgtacttgtctttcatatatgacgcttagtttcactggatacaaaattcttggctgataattgttttgtttgaggaggctgaagatagggccccaatcccttctagcttgtaggatttctgctgaaacatacgaggggccaacgaacatatgaaacatcactaatcatcagagaaatgcaaatcaaaaccacaatgagatgcaatttcacaccagtaagaatggctattactaaaaggacaaaaataataataataatacttaacatactggcaaggctgctaagaaaaaggaatgctgcggggcacagtggctcatgcctataatcccaacactttgggaggctgaaatgggtggatcacctgaggtcagtagttcgagaccagcctgatcaacatggtaaaaccccgtttctactcttgcatatgtatatcaggatacacacacaaggttattcatagaattattatttgtaaaggcaaaaaattagaataaagtttatcaaaaaaggcaagaaatatgacattcattaaatagaaaacagtgcaaacaaacctattacaactatatggcacaacaatgcctctaacatactattgagcaaaagaagcaagacataaaagaatatgaaaagtttagttctctttgaacacaaacaaatgaaaaaacattccatgctcatggataggaagaatgaatattgtgaaaatagccatactgcccaaagtaatttatagattcaatgctatccccatcaagctaccattgacttttttttcacagaattagaaaaaactactttaaatttcatatgcaaccaaagaagagcccatacagccaagacaatcctaagcaaaaagaacaaggctggaggcatcatggctacctgacttcaaactatgctacaaggctacataaccagaacggcatgttcctggtaccaaaacaggtatatagatcaacggaacagaacagaggcctcagaaataacgccacacatctacaaccatctgatctttgacaaacccgaaaaaaacaaacaatggggaaaggattccctatttaataaatggtgttgggaaaactggctagccataggtagaaaaatgaaactggactccttcctaacacctcatataaaaattaactcaagatggattaaagacttaaacataagatctaaaaccataaaaaccctagaagaaaacctaggcaataccattcaggatatagacatgggcaaagacctcatgactaaaacaccaaaaacaatggaaacaaaagccaaaattgacaaatgggatctaattaaactaaagagcttctgcccagcaaaagaaactatcatcggagtgaacaggcaacctacagaagggcagaaaatttttgcaatctatccatctgacaaagggctaatatccagaatctacaaggaacaactttacaaatttacaagaaaaaaaacaaacaaccccatcaaaaagtgggtgaaggatagaaacagacacttctcaaaagaagacgtttatacggccaacaaacatacgaagaaaagctcatcatcactggtcattagagaaatgcaaattaaaactacaaggagataccacctcacaccagttagaatggccatcattaaaaagtcaggaaacaacagatgctgggaggatgtggagaaatagggacacttttacgctgttggtgggagtgtaaattagttcaaccattatggaagacagtgtggagattcctcaaggatctagaaccagaaataccatttgacccagcattcccattactgggtatatacccaaaggattataaatcattctactataaagacacacgaacatgtatgtttattgcagcactgttcacaatagcaaagacttagaaccaacccaaatgcccatcaatgatagactgaataaagaaaatgtggcacatatacaccatggaatactatgcagccataaaaaaggataagttcgtgtcctttgcagggacatggatgaagctagaaaccatcattctcagcaaactaacacaagaacagaaaaccaaatactgcatgttcttactcataagtgggagttgaacaatgagaacacatggacacagcgagaggaacatcacacactggggactgtcagggggtagggggctaggggagggatagcattaggagaaatacctcatgtagatgacaggttgatgggtgcagcaaatcaccatggcaagtgtatacctatgtaacaaacctgtacgttctgcacatgtatcccagaacttaaagtataataaaagaaaaagtaaaataaaataaaaaataaaaataaataaaaagtttagttctcttcatataaagttcaaaatctggtaaaataaaaatatttcaattttcaaagatgcaggtattaatgctaaaatcaatattaaaacaaataggtgaaaattatcatcagaaaaatcagaatagtggttacttctaggaaagatggaagagaatatgattacaaatggtcagacagcaggcttcttaggatattggcaattatctaattcttgcctgggtggcatttacaatggcatttctttgtacaattatttatcaaattatgtgacattatgcatatctgaatgctatgtttcatatgaaatctataacagttctgtcatttattatgtcaataactgtggctttctttatcctagagttatttaaattatatatttgactagcagactcacagacaaaaaaaaaaaaaggcctaattccaagcgcagtggctcacgcctgtaatcccagcactccgggaggccgaggcaggtggatcacaaggtcaggagttcaagaccagcctggccaacatggtgaaaccctgtctctactaaaaatacaaaaattagccggacatggtggcacgcatctgtagtcccagctactcgggaggctgaggcaggagaatcgcttgaacccaggagacagagattatggtgagccgagattgcgccactgcattccagccttggcaacagagcaagactccatctcagggggaaaaaaaggcctacttggcattacacataataaagaagcaacatctctttttaggcaatagatggaaacattcaatatgggtgaaaagaaaggtcaaaggaaattttctattttatttcacaaaaagagtaattttttactccggtttctcttcagattgtataaatctttcgccttttaccaaaggagcaatttctaccatctgttctctgaaaaattgacctcttcttgttgtgttgtctgttctttcattttcagtgagaaaacttttccaaatgtcataatgtcaaaaagcctttcttcagattactaaaaaaagaaagaaagaaagaaagacccgttgcttgatgatgctcactgtcacacaattctgtgatgtggatatcagagaaaatgtgttagcaattacaaaggcaagcaagtccaagtatgtttgtgaatgataggctaaagttaaaataaaggatcactgtcactgaacatgttttcccataacatatgagaaatatgcccaaaataaattgaaaattgttaagaacatcttaaaatatttaatatgtgggtcaggtgcggtgcctcatgcctataatcctagcactttgggaggcagaagcagtggatcactttaggtcaggagttcgagaccagcctggccaacatggcaaaaccctgtctctactaaaaacataaaaattagccagatgtcatggcgtgtgcctgtaatcccagctacttgggaggctgaggaacaagaattgcttgaacccaggagacagaggttgcagtaagccaagactgcaccatcgtactccagcctgggcgacagagcgagactctgtctcaaaaaaaaaaaaaaatttttatatgtgtatctgtagccaccaaaacaaaccactataattctttaactccaataaaactagatattaatattaatattaatattaattagtaaattaggttaaataaccattaattctattagtaattttacatattttactcatgttaacatctaagtatcttctgaacaatatgaatttaaaatggaagttgtattttattaaatagctccatttctaaaggctaaatattttaagactcactaaaacttcaacaaaattaaatactttaataaatccttcatgactgatatggtttggctgtgtcctcacccaaatatcatcttgaactgtagctaccatcattccaatgtgttgtgagagggacccagtgagaggtaattgaatcatggggaaggattttcctcgtgctgttctcatgatagtgaataagtctcatgagatctgatggttttataaagggcagtttccctgcacatgctctcttgcctgccaccatgtaagatgtgcttttgctcctcttttgccttctgccatgattgtgaggcctcccagccatacagaactgtgagtccattaaacctctttttcgttataaattacccagtcttgggtatgtctttattagcagcatgagaacggactaatacaatgacacagataaactctataatctgtaaaaaattggtatcaattaattatctccagacttactggatcctttaatataagtatttcaaactcctaaatttttattttataccattaagaactgactaatgaggtcaggcgcggtggctcacgcctgtaattctagcactttgggaggccaaggtgggcagactgcctgagctcaggagttcgaaaccagcccgggcaacacggtgaaaccccgtctctactgtaaatacaaaaaaattagccaggcgtggtggtgagtgcctgtagttccagctactcgggaggctgaggcaggagaattgctcgaacctgggaggcagaggttgcagtgagccaagattgtgccactgcactccacactccagcctgggtgactgagcgagactccatgtccaaagacaaaacaacaaaaaaagaactaacatagattactatcagtatttacagcaaaacctctgaaagagatctaatatttaaatagaaaaataaaatttttaaatagacaaaaaagaggtaattttttgttatgttggaaggtgaaaggcttttgtaagcataatacaaaaaccagaagcctagagaaaaggctgacagatgcaactatttaaaaggaaacttctcatgcatatcaaaactaccaggagatatcatttcagtccagttaaaatgccttttatccaaaagataggtaataacaaatgctggcaatgatgtggaaaaaagagaacccttgtacactgggttggtgggaatgtaaattaatacaaccacaatggaaaacagtttggaggttcctcaaaagaaaataaaaatagaactaccaatccaccaatcccactccaaggtatatactccaaaaaaagaaaatcagcatattgaagagatatttgcactcccatgtttattgcagcactaataacaatagtgaagatttagaagcaagctaagtatccatcagcggatgaatggataaggaaaatgtggtacacatacacaatggagtactacccagctattaaaaagaatgagatcctgtcatttccaacaacatggatggaactggaggttactatgttcagtgaaataagccaagcacagaaagacaaacttcatatgttctcacttatttgtgggagctaaaaattaaaaacaattgaactcatggagatagagagtagaatgatggttattaggggctggaaagggtagtgggaaggcagggggggagttgggatggttaatgggtataaaaagtagaaagaacgaagaaacctataatttgctggaacaataaggtgactacagtcaaaaaaaaaatttaattgtacattttaaaacaactaaatgagtatagattgtttgtaacacaaaggataaatgcttaagatgatggataccccatttaccctgatgtgattattatgcattgcaggcctgtatcaaactatatcatgtaacccacaaatatatacacctactatgtacgcacaaaaattcaaaattaattttaaaaagttaaaaatagaagaaaccttctctacactaaaaagtagcacaaatcaaaagatattcacagagaaaaatatttgtaagacatacaaaaaagaagtgatactttaacatgcaaattgctcgagtgttaataacaaaatggaaaaagaggcattctctataccattaatgttaacttaaatagacataacccttcttaagttttactgaaatataatttatatatcataaaattcacacatttacacaatacaaatcaaaggtttttaatataacagagagttatacaaccgttagcacaatctaattttagaacattttaatcatcctaaaaagaaactctatatccactagccaatactccatacactcccatgcctgcagccctatgcagacataaccttattttaaggacaacttgtcaacgtcaatctaaaatgcaaatgtgccatcctgtgactgagccattccatttcacatcatttattctgcaagaaaagacacataatacacaaagatatgcataggggtattcttgaaataccatttgttatagaaaaatactctaaacagcctacatgcatcaatagcaaattatattcataaaacatgatgtatcagtaaagtaaaatttatgtaattatgaataagaatggggtgatatttctgatatggaaaaaatcatcagaatatatatgtcagtcaaaaagcaatgaaatgggctgagcacggtggctcacgcctgtaatcccagcactttgggaggccgaggcaggcggatcacgaggtcaggagtttgagaccagcctgaccaacctggtgaaaccccgtctctactaaagatacaaaaaatagccgggcatggtggcgcacacctgtaatcccagctactcaggaggctgaggtaggagaattgcttaaatccgggaggtggaggttgcggtgagctgaaactacgccactctactccagcctgggtgacgacagagcgagactccgtctcaaaaaaaaaaaaaaaaaagcaatgaaatggtctatatacagtatatgatctaattttacttaaaaagaaataatcctagagaattttaaagagaatacccattaaattttcagcaataattatctctgaagaatgagttgagaaagggatgattaaatacttgagagctaatatttaattttaaataaagttgactcacttaaaagaatgctatttattgttttaaaaatattacccagcaacaataaaggcatttttagatgagaacatgcacaagagttgttttatagggacatgtaaggctctaacaaacttcgaaacagaacagcatttatcctcatgccaacaattaaatgttgaataaaagggatttaagcaagtagacataagattttcttttctttttttttttttttttttttttttttttttttttttttttgagaaggagtcttgtgctgtcacccaggctggagtgcagtggcgtgatctcggctcactgcaaggtctgcctcccggggtcatgccactctcctgcctcagcctcctgagtagctggaactacaggcacccgccaccatgcccgagtaattttttgtattttttttagcagagacggggtttcaccattttagccaggatggtctcaatttcctgacctcgtgatctgcccacctaaagtgctgggattacaggcgtgagccaccgtgcctggccataccaattttcttaaggaaaacatatgtttatagaacacatagagaaaagaaaaaaaaacgtaaatatattaccagtattttttatttctaggtgttgattctataggtgattttatttccctccttacatatgtctctatttcccaaaatgtctttaataaaaatctacataatttattttataatcagacatgctactttaaaagatagatgaaactaagatagtttttacacaggggcaaatcagcagatacttttaaatattgtgcaatggagaaaaatatgataaaaaaacttcatcaaaataagtcagaaatgactgtaattgcacaaaggattattttagaaaaatgtacactgaatatattttaatatatggaataagtttatgattacatgcaaacttctcaatgatgcctcaaatatttttatagtatgcccaaaagaaaaacagaaacataaggatttaggaaaaaataaagtcaaacacatttaaaaatgaatttctgatgcaatgcatgatagctttaaatgttttttctttgaaaacatatgtgggtggcattggtatgctgactcctgccccaagttgtcatcaacaaaatttttaagtgatgatttcctttcaattcatttaattatttatggtaagcagtctcaacagtaagaattaatacaaaataaaattaaaagaaaaaatagttgggaatgactcaaaatgatttttataattcatgaatgacaatttttagaaaaagaaattcaaaacaagagctcaaaggacaaatatgctttttaaaatgtcatttgtttttatttcaacagtttttgtaacaccaggattatacaagaaagaaaagcctgagtctaatgtcagcaagatggcagactaggactttcaagccctcgtccctccacagaaaaatcaatttgaacataaacatgcacaaaaataccttcataagagctaagtaaacaaggtgaaatattacagcacgaaataggaaaagacataacgcagaatgtagaaaggacagttttactcagaagtccgaggctgcaggttttaaaatactcacatcacccctcccccaactccagacagtaaagcgtggagagaccctccacttgggaggagggaagaaaggtgagcactagactttacctcagacctcaataccaggtcagtcccagtaaaacgtaggatcaggcaggactcctcagccctagactcccagccagtaccccaggactgaccctgcaaatccaccctggtacaaggaaaaatctcacagccccaggctccagactggcccagtagatttagtccctgggtccacctcaccccaccccatgctgataccagcagccacagcatccaaactaaccctagtgctggactgaccccagcagcctaaacttcagctccaccccagagccagaccagcccctacagactaaggttcctggctagcctctgtagccccaggctccaggtcagctcccaagacccaagactccaggccagtacccacagactgagcctctaggcctaatttggcacaatgcaagatcccacagccccaggttccaaagccagcccagcagactcagtctctggactcaccacattgccaggcgggcccagtgaccttgggctccagactattcacagcacgaggctggccccgacaacttcaggtttcaggcctacccaggaaccaggccagcctccagaatccctagtcatcaggccagcactcacagactcagcctccatgctggcccatgtgaatataggctccagacatacccaatgtcaggccagcccatctggccccaggctccaagcataacgcaggattcagagccaggtcagccaacacaaccccatgctttagacccacccaacctcccagtcaacacctctggcccagactccaggtcggccactggggccccaatctccatattaacccctgtggtcccatacaccaggagactcagggtctagacctgactaacagacccagggtccaggctcatcccaataaactgtggtgccaagccagccctcagaaaataagattccaggtccatccctacagaatcgtgacccaggcccacccctgcacactcaggcccctggcctgtcccagtggaccaaagaaccaggtccatcccagaacctgtctggcccctgcagattcaggcttaaacccaccctagaaccaggtcagcccttgcagacctaggcttcaggctagccctggtggatacatatttcaggcttaccatgcagacccaaactccaagctcactcccatggaccaaagcaacacatctacccagtggatccaggctccaagctcaaacatgaggaccaagataccaggcccacccactttctgaccctgcctggggactgtaggagagagcccaccaataggccaaacagcctgcccagaatctctggataggctcaatgatgactggctttctcaaatgaagccagtctacaaagactataataatttcctacttcttcaaatgtgcagacaccaacataaagcaacaagcaacataaaaaaccaaggagacataaccccagcaaaagaaaataatctcccaatagctgaccccaaagaaatgaaaatatataaactgcctgacaaataattcacactaattgttttaaggaagcttagtgagcttcaagaaaatacagagaaataatttattgaaatcagaaaaacagtaagtgtataaaatgagaaatttaacagagaaattttttaaaaaatcaaattctggagctgcaaaatataacgaatgaaaagaaaaatataacagcattcacaactgaattgatcaagcaaaagaaaaaattcagtaaactcaaatatacaggttattagaaaatatgcagtcagagaagaaaaaggaaaaagactggaaaggaatgacgaaagtttacaggacgtatgggacaggatcaaaagagaaaatattcaagttataggagctaaagaagaaaaagagagacaaaggtgtagaaagtttatttaaacaaataatagctaaaaactttccaaattgagggaaagatatatatatcctggtacaaaaaggtcaaaagtctccaatctgatttaattcaagcaagactataccaagccatgttataatcaaactgtcaaatataaagaacaaatggaagattctgaaaatatcaagagaaaagcaaattatatacaagagacttccaataagactagcagcggatttcatggaggaaatcttacagtccagaaaagagtaggatgatatattccaagtactgaaagacaataactgccaaccaagaatattgtgagtggcaaagcagtctttcagaaataaagaaaagttaaaaatgtaccaagacacaaaaaagccttagggagttcatgaccactagacttgtcttacaaaaatgctcaagtgaaatcttgatgctcaaagaagaagacactaatgaataacaaaaaatacatatataaggataaaactcaccagtaaaagtaaggaaacaatcaaacacagaatagtctaataatataatgttgtggaaatgacttatatctttagtatgaagatattatattatttaaatataatagccacaataatttctttctatacaatataaaaagatgtaaattgtgtcatcaaaaaatgaaacagagtaaaatgtagtttttatatgtgataaatcaaggttattatcagtttaaaatagcctgtcatgaaaataagatgttttatgtaagcctcgtagtaatcacaaagcaaaaacctacaatagttgcacgaaacataaaaagaaaggattcaaagcataccactacagaaattcatcaaatcacaaagaaagataacaagacggaaaggaacaaatgttctataaaacaaccagaaaacaaattacaaaacagaagtagcaagtctttacttatgaatacttatgttgaatacaaatggattaaattctctaatcaaaagacagaataactgaatggattaaaacaaaattcaactatatgcttcctataagaaattcatttcatgtttaagaacctacatagactgaaagtgaaggaagaggaaaagatatctcatgcaaacggaaatggaaagagcgagggtagaaatacatcagataacactgacttaaaatcaaaattataaaatgagatacaggtcattatacagtgacaaagggctcaagtcatcaaaaggatataccaattataaatatatatgcccccaaagtaacatcacctaaatatataaagcaaatattcatagatataaaaggagagaaggagtgtaatacaataatagtaggggactttaagaccacaatttcagcaacggacgggttacccagaaagaaaattaataaggaaacatcagatttggtctattctttagtgcaaataaacctaaaagagatatacagatatacaaaatgtaccattcagtggccacagaatacacattcttctcaaccaaatgtgaaatattcttcagcatagatcatatgttagttcacaaaagaaatcttcacaaatttaagaagactgaaatcatatcaagtatcttttctgaccacatgtttaatactagaaatcagtaacaagaggaatttcagaaaattgacaaatacatggaaattaaataacacactcttgaacagctactatgtcaaagaagaaattaaaagagaaatttaaaaatatctacagacaaatgaaaataaaaacacaacatacaaaaacttatgggatacagcaaaagcagttctaagaaagaagtgaatagcaataaatgcctacatcaaaacaggagatctcaaataaacaagttaatgttacacctaaataacttctaaaagaacaatctaagtccaaagttcacggaaggaaggaaatcataaagatcagagcagaaataaatgaaatatagactagaaaaacaatagaaaaggtcagtaaaattaagagttagttatttgaaaagataaacaaaattgacaaaactttagctagactaagaaaaaaataagagaagacaaataagtaaaataagaaatgaaagagatgttagaattgatgccacagatatacaaaggatcatgaaagactactatgagtaattatacgtcaacaaattagatagcctacaagaaaggaataaattcctggacacacagaacgtatgatgactgaatcatgaagaaataaaaaagctgaagaaatcaataataagtaaggtgactgaagcattaatttatgtatttacttttttttttttttgagatgggagtcttgctctatcacccaggctggagtgcagtagtgcgatcttctcactgcaacccccacctcccaggttcaagcgattctcctgcctcagcctcccaagtagctgggattacaggtgcacaccaccacacccaactaatttttgtatttttcatagagatggggtttcaccatgttggcaaggctaatctcaaactgctgacctcgggttatctgcccacctcagcctcccaaagtgctgggattacaggtgtgagccaccgagtccggccttgaagcattaatttaaacacacacacacacacacacacacacacacacagatacacacacacacaacatatgcccaggacctgatggcttcactgttgaattctaccaaacattgaaagacctaataccaatcctcctcaaactcttccaaaaaaaacagaatacttccaaactcatattatgaggccaactttacactgacaccaaaactacacaagaaaacaacaagaaaggaaaattataggccaatattaaggatgaagatagatgcaaaagtcctcaacaaaatattagccaactgaattcaacagcacactcagaagagcattcaccatgatcaagtggaattcatcccaagaatataaagatactttaacatatgcaaatctatacatgttgtacaccaattaacagaatgaaggataaaaaccatataatcatctcagtagatgtggaaaaagcatttacaaaattcaacatattttcataataaaaacaacaaattaggtatagaagaaatgtacctcaatacaataaaggccatacatgaaaaacccattgataacaatatattcaacagtgaaaaactgaaagcttttcctctaagatcagaaatgagacaaagatgtccactctcactacttcttttcaacatagtactggtggtcctagccagagtattacacaagggaaataaataaaagggtggccaggcacagtggctcatgcctgtaatcaatcccagcactttggggcgctgaggcaggcagattacttgaggtcaggaattcaagacaagcctggacaacatggtgaaaccttgtctctaccaaaaaaataaaattatatatatatatggcacacagtggcaaatgcctgtaatgccagctactggggaggctaaggcaggagaattgcttgaacccgtgagacgtaggctgcagtgagctgagattgcaccactgtactccagcctaagcaacagagcatgactgtctcctaaataaataaataaattgtatccaaattggaaaggaacgagtgaaatggtctctatttacagacgatatgatcttatatgtaaaaaaaaaatttttaaagactccaccaaaatgctggaactaataaatgaattcactaaagttgcagaatacaaaatcaacatacaaaaatcagtagccattttatacactgacaatgaactatacaaaatcaagaaaacaatccctctcttactaggtaccaaaaaaaaaaaaccacttagaaataaatttgatcaaggagattaaagaccagtataatgaaaactgtaaaacactgataaaagaaattaaagaagatacaaataaatggaaagatatctcatgttcatgaactggaagaactaataatggttaaaatgtccatgctatccaaagcaatctatatatttcatgcaatccctatcaaaattccaatggcatttttcacagatataaagaaaaccctaaaatttatatgaaactaaaaagaccctgagtatccaaggcaattttgagcaaaatgaacaaaggtgaaggcatcacactacctgacttcaaaatacactataaagctacagcaatcaaaagagcacagtaactggcataaaccagacacacagacctaatgaaacagaacagggaacccagaaataaacccatacatttagtgtcaactgattttcattattattatttttatttatttatttattttgagatggagtcttgctctgtcacccaggcaggagttcggtgacacaatcttggctcactgcaacctctgcctcccaggttcaagcgattctcccgcctcagcctcctgagtagctgggattacaggcatgccctaccacacccggctaattttcgtatttttagtagggatggggtttcaccatgttggccaggctggtctcaaactcctaatctcaagtgatccgcccacctcagcctcccaaagtgctcaattacaggcgtgagccaccatgcttggccaggtcaactgatttttgacaaagatgccaagaacacacaatggggaaagacagtgtcttcaataaatgatgcttggaaaactggatatccaacatgcagaagaatgaaattagacccttatctcacaccatatacaaaaatcaatttaaaacagagacttaaatgtgagacctgacattttaaaactactataagagaaataggggaaaagctccatgacattgctctgggcaatgatgttttggatatgaaccgaaaagcatagtcaacaaaagaaaaaatagacaaatgagattatatcaaactaaaaagcttctgcatagcaaaggaaacaatcaacagagtaaaaagacagcctacacaatgagaaaaatatctgcaagccatatatctaataaggggttaacatccaaaatatatatggaactcaaacaactcaatggtaagaacactgataacctgattttaaaatgggcaaaggatctgaatagacattcctcaaaagaagacacgcaaatagccaccagatatatgaaaaactgcccaacaatcctaatcatcagagaaatgctgactaaaacaatactgagatatcacgtcacacctattagaacggctatcaacaaaaagaaaaaagatcagtattggaggggatgtggagaaaaaagaacccttgcccagtgttggcagtaatgtagattagtgcagccattatagaaaaacagtacgagggttccttgaaaaattaaaaatagaactactacatgatccagcaatctcactattaggtataaatccaaaggaaatgaaattgctatattgaagagctatctgcacccccatgttcactgcagcaatagccaagatatagaatcaatataaagtgtccatcaacaaataaatgaaaaaaatgtgatatatatatacacatacacacacacacatacacacacacacacaatgaaatgttattcagtttttaaaaagaaggaaatcttgtcatttagtacaacatggatgaacctagagaacacgatgttaagtgaaataagccaggcacagaaaggcaaataccacatgatctcacttatatgtggattctaaaaaaggtgaactcacaaaagtagagaaatggtggttatgaggccaggcgacaaggagtggagttgggagatactggtcaaaggatacaaaatttaagttagatgagagaaataagttctagagatctattgtacagcatagtgactttagttaataacaatggattgtatttcaaaaatcactatgagagtacattttaagtattctcattacaaaaaataatgataagtctgtgaggtgattcatatatcaagctcaatttagccatttgacaatgtatacatatttcaaaacatcatgttgtacacaataaacatctacaattttgtccaggtgtggtggctcatgcctataatcctaatgctttgagaagtcaaggtaggaggaggatcacttgaggccaacagctcaagaccagcctgggaaaaacagtaagatcccatctctaccaaaaaaaaaaaattttaattagctggacatggtggcacagctgtagtcctggctactcaggaggctgaggtgggaggactgcttgatcccagtgagctctgatcacaccactgcactccagccggacaaaagatagagactctatctctggaaaaacaaaaacaaaaaacaaaacagaaagatgaaccctgcctaccatgcatcatgttttatatttgtttcaagtgcaacctcttcctagaatataccattattttaactaaaacctgaaaacctagattacataaaatattaaaactgtattatcaatgggtttatcagcaatatctcattcctacctctttctcacgtattcgagagagaaaatgatcatcatggaaactgctggattttctcaggctgaatttcggtgtcatctgctaaatgaacaggagttatttaacatgttttcagatctggtttatccttaaccccaaagaaaacttctaaattgcctgaggcccgtaccaaaatagtactaacactgcaggaaaaaatcacttccaagtgataaaattcaaaaactattatgtttcctaatgtagatccgcattattttctataaataacttagtgattattttattttaaaatacctgcccctagaaaaagtccaatggatttctcacataccagagaaactgggataggcttctgtctcaggtatcgaggattttctatctgaaaatttaaaaataaaacaaaataaggatttattaattttggagttttaattattatttgataaaatatagaattaagctgccatatgaaacattttctagattcttaatatttaattcatttttagaatgggtattgtatgatatatttttagcggctccctacaagtaaaatataaaacataaactcccttgcatgccaaaatgaaccttcatgatcctctcactgcctaactgcccactctcatcttccattacccttcacttcacattttatgctcccaggatccacaatgatttatattaccagaacatggcagatgttctcatgcctgtccacctctgaatttctctgcccagccctccaaaccctgtaagcacacacctatttgttcttacagtcgcaatttaatcactgcactcccagatgtatttggtacatgaattcttaaacatacctttctaatagcaaagagaacacaaaattcctttgggactccccctaaatctccctttcagattcatctatcttcaccataccccacattccaaggacaccagacaatttgttttaacttaaaagcactatactgtctcccatgtctgagtctttgcaacctgtaagatcattcccccaacttctacacatggttaacttactcaagacttgtagtttaaaaatcatctcccccaggaaacctagttcctactactccagtagtaccctggatgctagttcccttttacaatctggcatctccctgtttcaaaacagtgtggactctgaaagcagagaccatgactgccctgttcaccactctatccctagcacccaactcagtgcccaattaatatttcttcagaaagaaggaagaaacaagaggaaagaaaggagtaacctgtacctgattccaccttcttatcagctcctaaagtatcctatgtccactctctcatagcccttatgtaatactttgagtgtttatcagtatgtctccacatctgtctttgaacagaaggagtactgggatgacatcttctcagttttgtatctctgggacctagcacaatatctaatgtatagtagcctttcaataaagtatttattgcatgaatatactatatgataaagtagacatattgatagttatctctactatttcactcacaaataaagtgataattaaaaatctctaccgtgaaagtctaatttcttcatatcacaaacccacaaattactacatggataatctcacaaagtacaagaacacaaactatcacttcaacctagggtagtggttcttacacttgttaaattaagattcatctaaagctgcctcctcacatatttttaattcagcctaaaggtttctccattcatggtgaactgtaacctaactggatgtgtaaacagactacagcttactcttgtgccactcactgagttttggcaattaaaggcaatcaatcgttcaaaccagattcaaataaggcaaacgcagagctgtaaccaatcctgctgtttctgtacctcgcttccattttgtgtacatcactatccttcttctgtccataaatcttcaatcatccagtagtgctgcagcctctctgaacctattatgattcaggggctgcctgatccatgaatcattctttgcctactaaactctgttcaatttaatttctttaaggtttttcttttaacatcctggagtgtactatgaggatcaagtgataaacatttcaaatataaattattggattctagttctccaaaatcccattgtgttttcaaaaagttccccaaacgatttattacggttaataactcttgaaaatgaacaatccatacccaatttgacaataaagataacggtgaatgaagaatcaattaatcaaaaaatgtagaagtcataacatttataatagaatccaatcaagtaaaacttaaaaggaatatagcaatagacaggatataaagtataattattttagcatctaggttaaaggaaatacacaaaacaattttctttcgtgtggacgccagatcctataaagtaatggcaactgtatgaatttaaatgtctctccccatcctccaaagacacatacagattgataaagagaccaaataaaaatgcccatcatccatgactacatcataaaaaggagaaagggaatacaaatccctggattaacatgtaggtggccaaataaagataccaaatcagcagaattagatcctgagccagagtggtagcatggggaaaaaaggaagtacctcagggtcctagtagtggtggaactaaatatcatcaaatactgacctgtcaaagaaaagtggcctaccttaagtgggccacacaaaaaaacttaatggctcagagtgccagagatgggcacaaaacaaggggcttggaaactatgaagaaccagaaaggcagttctaggaaggaatcacttctgaggtagagagaagcacctttgaaggaaggttgttcatgataaagggagataaaaaagcagctgaagataagggccctgcagaaacaagacagaatcaaagaatcaaaagaagacaagccatggccaggagctgtggctcttgcctgtaatcccagcattttgggaggccaaggcaggcagatcacctgcagtcaggagttcaagaccagcctggccaacatggtgaaaccccgtctctactaaaaatacaaaaattggctgggcttagtggcaggtgactataatcccagctattcaggaggctgaggcaggagaacctcttgaacccaagaggtggaggttgcagtgagctgagatcatgccactgcactccagcctgggtgacaagaatgaaactctgtctcaaaaaaaaaaaaaaaaaaaagaataaagaagacaagccaggctgacaaccacaaaaggcaccatttgttaaagaagttaaacttcagtgtagcagaggaggagggctgtccagaactaagaaataaagtaagccacccactaccacttcccacacaatcactggctattacttgttcagaaaaatctaacagataatcatgaacagaaaaaaagaatccaatatccacaaaaacttactatataaaatagaagaccaaaatcaaaacctgccagcagaaggaaacacttttttaaaaagctaaaatacaggaaaacagtaatacaggcttccttttgattcccatatctccccactctcatacaccagggtttttgtgcaacccacttaaaataggacgctctcctacatgtcaatacttaataatatttttgttccaccaccactaggacaacaggtattcaaatataacttttaaataacttcaggcataaaaatactacaaatcaaaataaagacaaaaatacaaagatgttaaataggaggtgactagattcaggaaaaaaaaacatggaagagtaacaaaaatcatccaagaaatgaagactaaattaagagttgtacaagagagaggctggacatggtggctcatgcctgtaaccgaggtgggcggatcacaaggtcaggagatcgagaccatcctggctaacacagtgaaaccccatctctactaaaaatacaaaaaaattagatgggcgtggtggtggcagcctgtagtcccagctactcgggaggctgaggcaggagaatggcatgaaccctggaggcggagcttgcagtgagccaagatcacgccactgcactccagcctggacaacagagtgagattcccgtctcaaaaaacagaaaaaaaaaaaaaaaaagagttgtccaagagagaaaagataactatagtaacagcaagagataaagataggacctgaagccaaaaaccaggaaataaaactgacataaaaacgtgtttaaaaaggatccaagagaaatggataaagaaaatgagaaacaagaatacaataaatgtataattggattccctgaaaaaaataaaataaatgcaactaaatattttaaattattaagaaaatattcttaaataaaataatacctgaatcatattaaatactctcactctttaccttggaaaactgacctaagaccatcgactgaaacataaacagatggccctccatattcatggcttctacatctacatattcaaccaaccaaactgaaaatattcaaagtaataattagaaaacaagaaaacagtacagtataacaactatttccatatcatttatattgtattaggtactataagtaatatagagattatttaatgattcataggttatgtacaaatactgcactactttatctaaggaacatcagcatttgctgattttggtatctgtgggaaggaaggaggatgttctggaatgaatcaactcttgatactgagagatgactgtacaatatattgaataaaatccgatgtgatatgccgaatatctttcagagtataatataaaagtccaaatattaaactttacgaatattttttaaaaattctctggaccctcagtcaaaaagattagacatttataactttatttatttatatatttatgaaaaatgaaaagtatgtatcacacttctcaactgtaacatacatcatataaaacattgtatttaaggaactcaggtaaagaaaatgcaaatcaaatattttacatacaatctagatttcctccaagaatcaagaccataagaaaccatttgaaacatgcaagaattcagaaaatactgtatcacaaggtccattcagtagactctattagagcatgaacattttatcttagttaaaagataatcaagagggaaaaaaaagataatcaaggaaccttcagtcaagagactgatgcttcctgattaagtattataacatctgcaatttactttcaaatagttccaataaggcaaaatcacaaaatttaaaaggcagcagcaataagttactgttgtactattctttttctacttgaatattttcatcataaaaattgtaaaaaaaaaaactggtttctttaacaagatagcataaacctaattgataattatcttatattttgattttgggaaaccaaatactattgattagtccagttaaatggcagtttctgattactgtatagtttaaatacatgctggaaaaaaatgctttttaaataatgttaattctgagaaaaaaaaacaatcatgctgagtttttgtggaaagacactgcaaaaaacttagtggttatttcggactagctaaatgaaatcaccatggaatttaaaataatacaagctattagatagaagctataaatgtattttagaaagaagagatggctattttttaagaaaaatgtgaaaattattttgtgtagattaaaaaacatcaagctgagaaaagtttcaccatctcaacagttatttttccaccttatatagataaaagcatggtagttttgagaagacaaaaaatctgagagtacataagtaactagaaaacaatatcagagatccttcaaagaaataatttcttgtgtcacacctggggttatgtcatattctttcaacaattatttactaaacatctaccatgtgccaggtactttgagagacgtttatgacaagctgtgagaaaaagaactgtaaacacctgaaaataacacctgatggaaactctacataaagtaataaataggccataaatggtaaatggttgcataaatagataaggcttttaattttatattttcaatccattcaatcaatatataactatttaaaggaaaatgaacaaaaacataatataatgaaaataatatattgtggagtttataacattaatagattaaaggaagaaactatataatcctctcaaaagataaagaaaaattcaggccaggcatggtggctcacgcctgtaatcccagaactttgggaggccgaggtgggcagatcacaaggtcaggagatcaagaccatcctggctaacatggtgaaaccccgtctctaccaaaaatacaaaaaaattagtcgggtgtggtggcgggcacctgtagtcctagctactcgggaggctgaggcaggagaatggcatgaacctgggaggcagagcttgcactgagccgagataacccactgcactccagcctgggtaacagagcgagactccatctcaaaaaaaaaaaaaaaagaattaaaaaattccacaaccattcatgatttttaaaaatatcctgacaaaatagagacatttttaatttgataaatggaatctaccaaaaaaactataagtaagaaaaaactacaagtatgaaaaactagccaggtgtggtggctcacgcctgtaatcccagcactttgggaggctgagctgggcagatcacctgaggtcagcagttcgagaccagactggctaacatggtgaaaccctgtttctcctaaaaatacaaaaaattagccaggcatggtggcgtacgcctgtaatcccagctactcggaaggctgaggcaggagaactgcttgaacccaggaggtgaaggttgcagtgggccgagatagtgccattgcactgagtgaataagagcgaaattccatctcaaaaaaaaaaaacaaaccatgaaaaactgaaagcattccctttaagattgggaatgatacaatgagtaccacccactatgaacatgctcctattcaacactgtagtggaatcctaaacagcatttttttaaaaaagataagaaaaggaaaaaggaggaggatagaaagaaagaagagggtacaagattagaaagtaaaaactagaacacctcatcatttgcagatacctacttacatagaactctataaatgaataaataaacaagtaaataatagaactaataagagtttggcaaagttgccagatgccaaaccaacatataaaagtcaactgcgatcaaagaggcagagcaaaatgttcaaatagaagcctttagcaattttccccgcagcatgaacatcaaattgaacaactattcacataaaaaagcaccttcataagaagaaaaaatcaggtgagtgatcacagtacctggttttagcatattaaggaatgagatgccaaagaaggtaggaaagacagtcttaaatcacctgcatcacccttctcctatcccccagcagtggctacatggcatgaagagagaatctgtgtatttggggaaggaagagcacagtgattgtgggattttgcattgaaactcagtgctgccctgtcacagcagaaagaaacagcaggcagaattcagcttgcacccacagaggaacatttagaccaaccctagccagaggcaaatcattcatcccagcagtcggaaccttagttctagcgaactccaccaccaccatgggctaaagtgcactggagtcctaaataaacttgaaaggcagtctaggtcacaaggactgcaagtcctaggcaatctctgatgctgtgctgagctcaaagccagtgggcttgggggtgcatgtgacatagtgagacaccagccagggtagccaagagagtgctggtgtcactcccaggcaacacagtttgcagctctgagagagactccttcactctgcctgaagagaggagagggatgagtaaaaagaattttgtcttgcaacttggataccagctcagccacagtagactatggcaccaggcagagtcccaaggcccccagtccagggcctagctcccaaacatttctaaacacacactgggtcagaggggaaccgactaccttgaaagaaaggacccactcctggcagaattcatcatctgctgactaaagagcccttggtctctgaatgctcagcagtgacagctaggcagtacttgcgtgggcctggggtaagacttagtgtcatgctagcttcaagaatgatcccgcacattcccagatgtggtgtctaggggaagaaatcccctcagcttgaggaagggagagggaagacaaaagggaacattgtctttcacctttggataccaatttggccatagtagggaagagcaccaagcaggctcctggggtcaccaattccaggccttgggtcctggtaggcatttctggcagcagacttctcagtggaaatgtaacaggccaaaagagaggggcatgacatatttaaagtgctgaggaagaaatgcttttatcctggaatagtatacccagcaaaaataaccttgagggatttgatcaacaccagacctatcctacaagaaatgctaaaggaatttctttgatccgaaaggaaaggacattaatgtgcaataatgaatcatctaaaggtataaaggtcactggttatagtaagtattatacttagtaaagtaagtatattactattataacactgtaattgtggtgtataaactactcatatctgaagtagaaacactaaaagatgaaccactcaaaaataataactgtaacaatttttcaagacatagtgtaataagatagaaacaacaaaaagttaaaaagtggggggatgaagctgaagtgtagagtttttattagttttctctttgcttgtttatgcaatcagtgttaaatgatcagcagtttaatataatgcgttaaattacatgcacatttcatgctaacctcaaaccaaaaaacctacaacaaatgcacaaaaaataaaaaccaagaaattaaaacataccacgtgagtaaatggctttcactaaaaggaagacaggaaggaaggaaaaaggaagagaagaccacaaaacaaccggaaaacaactaataaaatggcaggagtaagtccttacttatcaataataacattcaatttaaatgaactaaactctccaatcaaaagacatacagtagcttaatgaaaacacacctgggccaggcacagtggctcatgcctgtaatcccagcactttgggaggccacggtgggcagattgcttgagctcagcagttcaagaccagcttgggtaacattgtaaaaccccgtcttcacaaaaattccaaaaattagctgggcattgtagcgtgcacctgtagtctcagctacttgggaggctgaggtgggaggatggtttgaatccaggagtcagaggttgcagtagccaagatcatgccactgcactccagcctgggtaacagagccagaccccatctcaaaaaaatgagcctaataactatttacagaacatttcatccaaaggatgtaaacattcttctcatccacatatggattatccacaaggacagactgtatgttaggccacaaaataagtctttaaaaacttttttgaatttaaattgcatcaagttttattacctctgaccacgaggtaataaaactagaaatcaataacaggaagaattttgaaaactatacaaacacatggaaattaaatatgctcctgaatgacccatgggtcaataaagaaataaagaaggaaataaagaaggaaaattttcttgaaacaaataaaaatgaaaatacaacataccaaaatctatgggatacagtaaaagcagtagtaagaggaaagtttatagcaagaattatcaatatgaaaaaggtagaaaaacttcaaataaacaacctaatgatacatcttaaagaattagaaaagctagagcaaaccaaccccaaaattagtagaacagaaataataaagatcagagcagaaataaatgaaatgaaaatttaaaaaacacacaaaaaatcaacaaaacaaaaagtttcttcaagagatcaaatcaacaagccttcaaccagatgaagtaggaaaaaaagagagaagattcaaataaataaaatcagagatgaaaaagagacattacaactgatatggcagaaatcaaaaaatcattagacgctactatgagcaactatatgctaataaatttgaaaactgaaaagaaatgtataaattcctagacacatacaacctaccaagagtgaataaggaagaaatctaaaacctgaccagaacaaaaacaagtaatgagattgaagctgtaataaaaacatctcccaacaaagaaaagcctaggacccaatggcttcactgctgaattttatcgaaaatttaaaaaagaactaatatcaatcctactcaaactattccaaaaaacagaggaggaaggaatatttcctaactcattctcaaggctagtattaccctgataccaaaaccagacaaagacacaccaaaaaaagaaaactacaggccaatatgactgatgaacattgatgcaaaaatcttcaacaaaatactagtatactgaattcaacaacacataaaaaaaaatcattcatcatgaccaagtaggatttatccccaggatgtaaggatggttcaatataggcaaatcaatccatgtgataaatcataacaacacaatgaagggcaaaaactgtatgaacatttcaattgatgctgaaaaagcatttaataaaattcagcgtcccttcatgataaaaaccttgaaaattctgggaaagaagaaacatacttcagtacaacaaaagtcatatacaacagacccacagctcatatctatattgaacaggaaaaactgaaagcctttcctataagatctggaatatgacaagatgcccactttcattactgttattcaacatagtaccgaaagtcctagctagagcaatcagacaagaggaagaaatacagggcatgcaaattggaaaggaagaagtcaaattatgcttgtctgcagattatataatcttatatcttaaaaaaacttaaagactacaacaaaaaactataagaactgacaaacaaattcagtaaagttgcagaacacaagatcaacatacaaaaattaatagcatttctatatgccaactgcaaacaacctgaaaaagaaatcaacaaattaattccatttacaatagatacaaataaaataaaacacctagaaattaacttaaataaaagagtgaaagatcagtacaacaaaaactataaaacactaatgcaagaatttgaagaagacacaaaaaaatgaaaagatattccatgtgcatggattggaagaatcaaaattgttaaaatgtccatactacccaaagcaatctacagagtcaatgcaattactgtaaaaataccaacaacattcttcacaaaaatagaaaaaaataatactaacatttatatggaaccaaaaaaagactgagaatagccaaagctatcctgagcaaaaagaataaaactggagtaatcacatcacctgacttcaaactatagtacaaagctacagtaaccaaaacagcatggtagtggcataaaaacagacacacacaccaatggagtaggatagagaacccagaagtcaatccatatatttacagtgaacttatttttgacaaagatcacaagaatacatatgctggggaaaggatactctcctcaataaatgatgctgggaaagctggatatccacatgcaaaacaatgaaattagagccctatcccttgtcatacataaaaatcaaataaaaatgtaggaaaaacttaaatctaagacctcaaactaggaaactactaaaagaaaacactggggaaactctccaggacattggagtgggcaaagatttcttcagcaattaccccacaagcacaggcaaccaaagcaaaaataaacaaatgggatcttgtcatgtcaaaaagcttctgcacaaccaaggaaacaatcacaaaaaatgaagagacaacccacagaatgggagaaaatatttgcaaaggagctcaaacaactctataggaaaaaaaccaataatccgacttgaaaatgggcaaaagatctgaatagacatgtcttaaaagaagacatataaatgtcaaacagacatatgacaagatgtttaacattactgatcatcagataaatgcaagtcaaaactacaatgagatatcatctcaccccagttaaaatggcttctatccaaaagacaggcaataataaatgctaacaaggatgtggagaaaatgaaacctttgtacagtgttaataggaatgcaaattagtacagccactatggaaaacagggtagagattcctcaaaaaattaaaaatagaattaacatatgatccagcaatcccactgctaggtatatacccaaaagaaaggaaattagtgtatcaaagagatatctgcatgcccatctttgttgtagcactgttcacaatagtgaagatctggaagcacgctaagtatccatcaacagatgaatggaaaaagaaaatgtgttacttacacgtaatgcagtactattcagccataaaaaagaatgagatcctgtcatttgcaaaaacctggatggaactggagatcattaagttctgcaaaataagccaggaacagaaagacaaacttgacatgttctcaattatttgtgggagttaaaaattaaaacagttgaactctgcagatcgacagtaggatgatggttcacagaggttgggaaggatagagggggttggggaaagtggggatggttaatgggtacaaaaatatcgttagagagaatgaataagacctagtatttgatagcacaatagggtgatacagtcaagaataatttattgaacatttttaaataactataagagtgtaattggattgtttgtaacacaaatgaaggatcgatgtttgagatgacagatacccatttatcctgatgtcattattatgtatcatatgcctgttatcaaaatatctcatttacctcataaatatacatacctactatgctcccatacaaatttaaattttttttacatttaacatgtaccctaaaacttaaagtataataataaaaaaaaaatcaactgcatttctgaaatgagtaaaaatcatctaggagaagagtttacaaagatataatttctaatatactgcataattcctagataaactgacaaaatgataccctagacctttatagagcaaataagcttcatcaaaagattagggctaaagactgaaaaaaaaatagagagtagaatccattttggacagtctcgatgttgcaaaaaatgtcaattcttaagttgatctagcaattaaatgtgatccaaaccagaatttcaacagggtttttgtaaaacttataatgaccttacaaaatgtatataaacaaaaacagggcaaaagtagtcaagacatgcctgatgaaaaaaatcaaggtggggcaattggcaatttataaagatataataaaaccatccgggcatgttggctcacgcctgtaatcccagcactttgggaggctgaggcgagcagatcatgaggtcaggagatcgtgaccatcctggctaacacggtaaaaccccatctctactaaaaatacaaaaaatttgcctggtgtggtggcagacacctgtagtcccatctactcaggaggctgaggcaggagaatggtgtgaacccaggaggcggagcttgcagtgagccaagattgtgccactgcactccagcctgggtgacgagcaagactccgtctcaaaacaaaacaaaaaaacaaaaagttagccaggcgtggttgtacacatctgtactcccagctactcgggaggctaaggcaggagaatcacttgaacctgggaggcggaggatgcagtgagcagagattgcgccactgcattccagcctggcaatgaaatgagactctagctcaaaaaagaaaaaaaaaagaaaaaaaaagaaaagaaaagatacaataaaactatagtaatgtagacaaaccaattgaaccaactggaaattggcagaaagaaactcaagtatacttatttgataatgtgatttgtgaaaggtctagcattgccaatttttgagaaaagaagggaatgttcaataaatagaagaatataaaatcagatcacttcctcacaccatatataataaattcccaatggattcgatcttatattaaaagcagaactacaaaaactttcagaagacaatttagaagaatgatgttatggcctcaatctagaaaagatttgccaaacaagaaatgaaaaaaaaaaaagcataaatacaaaaaatcaactcaagatggattaaagacttaaatgtaaaacccaaaactataaaaaccctggaagagaacctaggcaatacatcctggacatagtcctagcaaagattttatgacaaagacaccaaaagcaattgcaacaaaagcaaaaattgacaagtgggatctagttaaacttaagagcttctgcacatctgcacagcaaaagaaactatcaagagagtaaacagacaacctacagaatgggagaaaatgtttgcatctgactagggtctaatatcccgcatcaataaggaacttaaacaaatttacaagataaaaacaagcccattaaaaagtgagcaaaggacatgaacagacacttctcaaaagaagacatacacgtggccaacaagcatacggaaaaaaaagctcaatatcactgatcattagagaaatgcaaatcagaaccacaatgagataaaatctcacaccagtcagaatggctactataaacaaaatcaaaaaataacagatgctggcaaggttgtggagaagagaacacttatacgctgttgataggaatgcaaattagttcaaccattgtggaaagcagtatggccattgctcaaacagctaaaagcagaattaccatttgacccagcaaccccattactgcatatatacccagaggaatataaatcattctacagtagagacacacgcgaatgttcattgcagtactattcacaatagcaaagacatcgaatcaacctaaatgcccaccaatgacggattggataaagaaaatactgtacatatacccacggaatactatgcagtgataaaaaaggatgagatcatttcttttgcaagaacatgaatggagctagaggctattacacttagcaaactattaaaaacacaggaacagaaaaccaaatattgtatgttctcacttataagtgagagctaaatgacaagaacataagaacactgagaaagaaacaacggacactggagtctacttgagaggggagggtgggaggagggagaagagagaaaagggaactattgggtactgggcataatacctgggtgatgacatgtgtttacctatgtagcaaaccttcacaggtacccccaaacctaaaataaatgttttaaaaaagcatcagtaagagagaaattaataaacttgaccattttaagaacttctccaaaaaatacatcatcaagaaaatgataaaaacaagtcataaactgagagatgtttgcacaaatgattagtctccaaaatgtgtaaacaaggcctttaaaaatcaatgaaaaggccgggtgcggtggctcacacctgtaatcccagcactttgggaggctgaggcgggcagatcacctgaggtcaggagcttgagaccagcctggccaacatggtaaaaccccatctctaccgaaaatacaaaaattagccaggcatggtggcaggcacctgtagtcccagctactcgggaggctgaggcaggagaatcacttgaactcgggaggcggaggttgcagtgagccaagatggggccatcgcactccagcctgggggatgagagtgagactttgtctcaaaaaaataaaaaaattaaaaaaacaatgaaaaaaagatgtcaatacacttgagaaaattgaggaaaaaaacttggggcacatttcactgatgaggaattatgaatggctcataaacatataaaatatggtcaatatacttagaaatataaaaaatataaagtaatatcacaatgcggtgatattttacaattttatagattggcataaattaaaaatttacaataaaaatgttcaagatgtgaaacactactagtgggtacatgaattggtacttttactcagggaaacaattattaagataataatacaatctacctcaacatggtaccagagaaatgcgcatattcttcagtaaataacacagtgccagccaggcatggtggctcacgcctgtaatctcagcactttgggaggccgaggcaggtggatcactcgaggtcaggcgttcgagaccagcaaggccaacatggcaaaaccctgtctctactaaaaatataaaaaaatcagcagagcatggtggtgcacacctgtaatcctagctacttcagaggctgaggcaggagaatcgcttgaacccgagaagcggaggtttcagtgagccaagatcatgtcattgcactccagcctgggtgccagagtgaaaccctgtctcataatcccagctactcaggaggctgaggcaggagaatcacttgaacctgggaggtagacgttgcagtgagctgagatcacaccattgcactccagcctgggtaacaagagcgaaactccgtctcaaaaaaaagtaaataaataaaataaaataaaaataagtagcccagtgccatatacacactgcaacttgaaaaatagaggcagcaaatgtccagcaggcagcaaagtacatgcaattaaatatgtaccagctgaaggtataaatatgcatcgtcatatatacatatacatatgtatacatgtatgtgtatatatacatatattaggtaataatttatttttggaatgttgcagggttttgtataaagcagcataggaagtaagttcttcaaagatacatgcaattctgcaaatatacaaaacccaactcatgaagcagaatcaaaatataaaggaaaaaataaagaggaaacaggaatttccaaagatgctcaagcactaattaagtttaaaatttaaaaccaaaagccaagaaaaccatctgtgatttatttttattcagctctacatttacaagcagggtacaaaatattggttcagctaattacaatgcagcatttcaactatgcagaagtaactcctatttcaacctcttcatctttaaaagccattaaataaagaagttaaagactcattctagcatcataaatttcctttctcaagttgacaaataaatagaaaatgtctattctaattttttaaagcaacaatgaacactgtaaacaacagtgaattatgttgttattcatttacaatacactgagtttgtctcataaccaattttaatatgcaatgggaattattcatggtaaagcatgttcttgagtctatttgggggaaataagcaatctattttctgattttgtaacagcagccagatgtgctttgaagttcaatgttcccactttgtaatccacaagtaacacggaacttgaagcaatctgtaaacagtcttaacattttttatgctcttttagaaaagttcttcttctctcatactacctcaaaaaaagaataccacaataaatgtccaaaatggaaaataaaaaagtcttaaatgaaacactgaagtcgaagaaaatattgtatagaaagcaaagctgaaaataattaagtttcaatggcacgaataaataacatgtttgcacatttcttgcttaacaggcaaatagaatcgcaataataaaatatgtaataacttaggctagacatgaaaacagacatctgaatactttttaatgaaaactggcttttgactttttattttgtttattttttttagcagatttctttgttgattgtcagggttttctgtccacttgttttttaaaattacttggcatttggtcaaactgacataagcaaagaacctcttataaactaatggttatcaaatagagaagttttacatttccagaaaaattaaaaggcactttatctgatatactatcttagcaagaaggacattgtcaagcaatatattaccagtaacacaactaaaataaatgtttttaaatcatagcatcagtcagaagtgccaaaactctctccatagaacaaaataaattcactcttcaacaccaaattgaatatgctccaaaattatgcttttaagtaaatattttagaactttaaaaccatttttccacagaaaatttacaatactatattccaaaaggactctcatgcagaatagagaaaaagctcttatataggaataggaaaagggcagacaacaggaaaactgacaaagctttcagtaaacactttgagaggctatccaaattgacaataaacatattaaaatgcacctaactgtattagtcatcaggaaaacatatattaaaaccacacaatactatgtcactaactactctcaagaatggctttttttaattaaaaaaaaaaattgcctggccaggcgcagtggctcatgcctgtcatcccaacactttaggaggccgaggcagatggatcacctgaggtcaggagtttgagaccagcctggccaacatggtgaaaccctgtctctactaaaaatataaaaattagccaggcatggtggcggacacctgtaatcctagctactcaggaggctgaagcaggagaatcacttaaacctgggaggcagaggttgcagtgagccaagatcatgccactgcactccagcctgggtgacagagactgtctcaaacaaacaaaaaaaaaaccctgacaatactaggtattggagaacaggcagagtaatgggctctagcacacagtgctgctgagaaggtagattggcacagccactttggaaaactggcaatatctatcatatcagttagctttttgctgcataacagatcatcccaaaacttcatggcttgaaactacaaccattttatttagcacccaattctgtgagtcagcaacttgggcagctcatctactgggacagtgcattcttgaaatcgacccaagagtcccatagacagttctttcggataaacatagaaatgtgctcttctggtcttaaagtttgaaacttgcatttgttttatctgagttccctcctcaggcatctcaataaaatatcaaagaactgaaactgaccagatcaccacatccagacaatgcaatgctggacccctcattcaccatgattgctcctttatttctccctagttcctgttttcttacacattgttacagttcttccctgctatgtaaacctctaattttagtcattcagagagattaatctgagattgatctcccatctccttggctgcagcacccaattaaagccttcttccttggcaataattgttgtctcagtgattggctttctgtgcagcaaacagcagggcctagactgaacccctggtgtttcagtaacaatctcagctggacttccttgtctgttggctatgccagtgtgatagctgccctcaataagccccgaaatgaaggttaaagcaggtctcaatcagccccaaaatgaaggccacactgagtacaatggccaggtttccacatttcttacaggaagaacagaggaagaaaattttgacccagcagagggttagaaaaaatttgacccagctacaagacaagggaagggtaagtaatgaaaaagtatttaccaacttttccttgaaatttgtaacgttccttacacactgatgcattttatataccagcagatacagtgcttacctataattgtgagagctctgtatctaccattatgatctcttttcaacaattaacatttttttttgtcctcttgtttctagatcacattgaagacaccataaagttttccgttttattgttctttgcaaagatccagcttctgtttcattgattagttctaatgctttgggggaaattttgattgtttcttgtaggtttttgtttatattttggctttgtttttttaattgattaaattaaataagggatctttgatcctcaatatcactttgggcacatcacagaatgttttgtcaaattttaccatgatttattttagtctgcacttggtttttattactgtttttacacaaagctattcaggagtgtgtttgtacttcattttaagctttcagatgaaaacacggaaagggaactatctttttgatgttactgtctagctttattcaaatgaactcatttaattagaatttctttatgcctcagttaaatcagttttataactatcccatgactatgtgaaaagtctataaatccatatcccattcttttagttggtctttgttctggaaccatactttttattcacttttagaaactgccataccattttaaaaattatatatgaagcatggtaatttctccaatctccttttttttttttttttttttctgagacggagtctcgctctgttgccaggctgggaaacagtggtgcgatctcggctcactgcaacctccgcctcctgggttcaagcaattctcctgcctcagcctcctgagtaactggaactacaagcacatgtcaccatgcctagctaatttttgtatttttacaaaaatttttacaaaaatacaaaaattagtagagacggggtttcaccatgttggccaggatggtctggatctcttgacctcatgatccactcgcctcaatctcccaaagtgcttggattacaggtgtgagctaccgtacccaggctcaaaatttttttcagttctttcaaaaaggtaactctaggtgaatcatgatttttaaaaggaaacatactacatagaaaaacagaaattattagtcactctgataggcttcagctcttttacccatcgttagctatagctataaatggaatatatccttgcaggtcaggagcacaaataatttctttctttttccttaaaacaataaataaagcacaagaccaaaaaaaaaataaaatgttgctcatggctgactcctcatggaaaacagcagaatatattaactttttgaattttttaaatttaaattccctctatgcctctgtgagctttgacaaaagaatacagtggtataaccagcaaaataccaagaaaacagttctgttggtgaaacactccaggatattggtctctgcaaagattatttgagtaagacctcaaaagcacaagcagccaaagcaaaaatggacagatggggcgacatcaagctaaaaagcttctgcacagcaaaggaaacaatcaacaaagtgaagagacaacccacaaaatgggagatatttgcaaactaagtatctgacatgagattaatgaccaaaatacataaagagttcacacaacttaatagggggaaaatccctcatttttaaatgggtagaagatctcaatagacacttctcagaagaagacatacaaatggccagcaggtatatgaaaaaaatactcaaatcattaatcatcaaagaaatgcaaatcaaaaccataatgagataccatctcacatcagttaaaatggcttatatcaaaatgacaggcaataaaggatgctgacgaggatgtggagaaaggggagcccctagacactggtggtgggaatgtaaattagcacagccactatggagaacagtatggtggtttcttaaaaaattaaaaatagaactaccataagattcatcaatcccaatgctgggtctacatccaaaagaaaggaaatcagtatatggaagagatatctaatagtgctgtagtaaacatgggacagattactgcatttatactaaactcccatgattattgcagcactattcacagtagccaagatatggaatcaatcttattgcccatcaaaggataaatggataaagaaaacatggtatatatacacaattgaatattatttagctataagaatgaaatactgtcatttgcaacaacatgaatagaactggaagacattatgttaaatgaaataaggcaagcacagaaagacaaatatcacatgttctcactcatatgtgctaatgtgctagctataaaaaagaaaatgaactcatggaggtataaaatagaatgatggttaccagaggctgggaggggtagtggggagtgagggttaaatagggactggtaaataggtatgaaaatatagctagatagaaggaataaaatctagtgttcagtagcatggtagggtaactatagttaacaataacttactgtatattttaaaataactgaaaaatgggattgaaatattcctaacacaaagaaatggtaaatgtttgaggtaaatgatatctcaattactctgatttgattataacacatggtatgcttgtatcaaaatatcacatccccataaatatgaactaatatgtatccataattaaaaattttaaaataacaaaatagttccatcaaacaaaaaaaaatccctagtgcttattcacaatagcaaagacatggaatcaacccaaatgcccatcaatgatagactggataaagaaaatgtggtacatatacaccaaggaatactatgcagccataaaaagaaaaaagattatgtctttgcagggacatggatgaagctggaagccatgatcctcagcaaactaatgcaggaacagaaaaccaaccaccacacgttctcatttataagtgggagctgaacagtgagaacacatggacacagggaagggaacaacacacactggggcctgtcaggggaggctagagggttgtggggagagcattagaaaaaagagctaatgcacgctgggcttaagtgatgggttaataggtgcagcaaaccatcatggcacacgtatataacaaacttgcacatcctgcacatgtaccccagaacttaaaaaataataaaataaaaatctctagtgctatttatacccttgtagccaaattctagcccaacacctggaaactactaatctgttctccattcttatagttttaccatttccacaataccatataaatgcaatttaaaaaacagcctttttagtctggcttcttccattcaatataatatatttgaaattcatccactttattgtgtgatttgataattgagtccttttcattactaaaaagtattctattgtatagatgtacatataatttgtttatccagtctccagttgaggggcatttaggactatttgcagttttgaacaattaccagaaaagagggagagagagaactgttaaaaatacttgcatataaagtttttgtgtgaacacagactttcatcacacttgagtaaatacttaggagtgagattggtgggtcatgtgataaatgtgttttaattttttttaagtgccaactgttttccaagtaatattttgcagcaagaggtgagggttccagttgctcctcatcctcaccagcattttgtattgtcaggtctttgtttgttttcaccattataataggtgtgtagtggtatctcatcatagcatcttttgtcccatcttttaattaggttgttttcttattgttgaggtttcagaatctttatatattctggataaaggtatttgccagatatgtgaatatctccctaagatgaaactggcctcacaacacaaattggaaagtgttccctcttccggtggagatggtatagaattggtattatttctcccttaattgtttaattaaatttgtcagtgaaaccatgcaggcctgaaattttctttgttgggaggtttttgtttttgtttttgagatggagtctcactccatcgcccaggctggagtgcagtggcatgatctcagctcactgcaacctccacctcctgggttcaagcaattctcctgcttcggcctcccatgtagctaggactacaggcacatgccaccacacccagctaatttttgtatttttagtagagacgaggttttaccatgttggccaggctggtctcgaactcctggcctcaggtcatcagcccaccttggcctcccaaagtgctaggattataggtgtgagccactgcgcccagcctgttgggaggttttaaaatataaattatatttatttaatagctataggactatgcaggttatctatttcatcttaagtgaatttttggtagtttgtgttgctcaaggactttttccctttcatctacattgtcaaatgtatgcccatagagttgcttgcagtaatctcttattatactttgagtatctatagtgtctgtaatgatatcttctctttcattcttgatattagcaaatctattcttttcattctttgtcagtctggctaaaagttcattgattccattcatcacttaaaaatccagcttttggtttcactgattttcattattgcttgtgttcaatttcattgatttctactttaatctttattatttccttcatctgcttactttgggtttaacttgttctttcgccagtttctttagatgggggtttagattcataatttagaactttcttttctctcttggtgctttcaagattttctctttgttggccgggtgcagtggctcatgcctgtaatcccagcactttgggaggccgaggcgggcggatcgcctgaggttgggagttcgagaccagtctgaccaacatggagaaaccccgtctctactaaaaatacaaaaagttaggcgtggtggcacatgcctgtaatcccagctacttgggaggctgaggcaggagaatcgcttgaacctgggaggcagaagttgcggtaagctgagatcgtgccattgcactctagcctgggcaacatgagcgacacttcgtctcaaaaaaaaaaaaaagatttctctttgtttctcagcaattttagtactgtggctaagtgtgactctttgtatttaaacttgaagtgcattgagctttttggatgcgcaaattgatgtttctcatcaaactagaaattttgcagccaatcattcttcaaacgtattttctgctcctttgtctcctcttgttctggtacccgcattacacatatgttggtgcacttatggtattccacatttccgtgaggcaatgttcatttttctgcattcttttttcactctcttctttggcctgcataatctctatcaatctatcttcaagttcactgaatcttctgccagttcaaatctattgctgagcccctatggtgaatttttcacttcggttatacggtttaacactataatttccatctgttttttttttttgctttttgtttttagagatgggggtctcactatgttgcccaggctggagtacagtggctatgcctcctgaggagctggaactataggtgcatgccactgtgcccagctctggttctttttcataatttaaatctctttatgatattctgtatttgatgtgatatggtcatcacagctttctgttttttgctcttgtttttgtttttttcagacagagtctcgctctgtcgcccaggctggagtgcaatggtgcgatctcggctctctgcaacctccacttcccaggttcaagtgatcctcctgccgcagcttcccaagtagctgggactacaggtgtgcaccaccatgcccaaataattttttgtatttttagtagagatggggtttcactatgttagccaggatggtcttgatctcttgacctcgtgatccgcccacctcagcctcccaaagtgctgggattataggcatgagccactgcgcctggcccatcacagctttctttacttctttaaacatcgtttcctttagttctttgaacacatttataatggctattttgaagtctttgtttgttaaatctggtctcacaggccatttctgttgcataatttttctctgtataagggccatactttcctgtttctttgcatgtcttataattttttttcttgaaaattggacattttaggtaatacaatgtagcaactttggacactgattcccctctccatgagtaattttagttgttttcatttgtttatttgattagtggcttggctagactatttcataaagtatatttctcccacagggtgaagactttggaatcacccctcagtgtatgcagccttgggcatgcatacagtcacctgtgatgacagtggatttagcagggctcctctgttttttccccttatctttttgttgaactctatatctaatttgatatgacacccagctattatgtctactaattgctggctgtttgttctattattttcaacaacaccctgggtcataaattgctccataggctgatccaattaaattcaggcaggggtagatgctgaggtagtctctgaggattgttctgaccccaggaggactcttcttagctgtctctgtccctggttctctctggtgaatgtactagcctgtggtttagcttactgctgttaattagtaggaactaccagtctcctctttaaaaatctccattgttttctacagcatccttaggtttgaacttcccaacactgtttccattagtccatttctttgaggagagcttctgatctcactggtcttcagactgcctctccccctgtacaaaaatctatgagctactacactgggcactgtgcagagggagtagctttcttgttcccggcttgcatctcttggagtgaaatctctatcctatgaacaagtcgaggtaaggacaatgaaggccacagtattcttgacctactgtgtctggggtagagcttctgccctatcagtcttggctgagtggaggaaaagagccctttcccccaaccactaagctgcactcaccaggaatttagccacctccacttagacttcaaagggataagaaatgctggcagcatgcccctcccaatacaatactgtatcccttgattgggagctcaggggagagaaacttcatcttctttgccacacccactgggaatggaatttctgtgaagctgagctggagaaggaacaggggaaaagtgaaagcgagtcatggttgaagtgccaaaaactcttgctgttcttaccaagctgtagttgattttcttgaataaatgtcttcatttgctctatgcctttaggacaatttccagatttaattaccaattagcaattatgcttgttttgctagggagcacatctgtggagctcctcatgctaccattctagaaatagaaaccccctcttcttttctaaaataagtatttcatgctgtaaatttcccaatgaaacctacttgggctacatcccacacattttgatatgttgtgttgtcattttaaaatattttctcatttcccttgagattttttcttttacccctggattatttagaagtgtgttgtttaatttctaaatatttgtggatttcccaaataatttgttaccaatctctagtttaattctctatgatctgaaaaattattatcttaatcattataattatattgtaaggttctgaaaaatggcgatgcttgttcatttgtctcagtggacagtcaactgcattcagatcagtctgcgaattccatctctcctacggacagtagctctggtgtcagtttcaagtttgaagtctttactatgtcatttgagtctgcctctcacatgtaccactcaaggggtggtctgggactagggcaatagtttacatgacagttcagttctctaagacttctatgaggctatgatttgggggctatgttccacacatgtccaccttggggaaagactggaacttgtatggttcatacacagactaccaatccccttctcccactctttccattcctggatttccctgcatactctctggctctgagagcttcttttccagtcccactggccaaactctgaaggaacctcattgcactattgtacagttccaggtgactaggcatactctcagaggaaagtataatagcaagcgaaaatacatgggaaaaaaaaagtatataaaatgttcctcccatattctttgcatgaagagaggtttcttttatctgttgatccagccaaacagatgggcgctaactgctgcccttataccacaatagcatagtttttccactggggctggtctagaggcagggccaagaaagaaaaaaaaaaatcccctcacattcttccattctcccacttctctggccaaaaagatgggctgctctgtaagtttctgccatccatgcctgctacacaatccctcaatttggcccaccctggagtcaaagctgggagttaaggaagaaaaaaaacacaaacagaaaaccaggaaacttcctgccactatatcagtgattcttcatattccaacttccctctcaatcggcctgttattattgacttttcagagtccccagttggtttgctttttgtattttgtccagaattcttggttgtgggagaacctggctgtaatagatttactcatggccagaagtttacattcacttttaaaagaaataaatgtcaacttctcaaataaaactctgaatatagttacactccccaaaagcaagctttggggaaaatgctataaatactgttacggctttgtttgttttttatgaataataaatatttactatttaaaaaaacacttaaaatgttaagaaaataagtgctgatattttaccatgtggaattatcagctaccattttgagtagatacttccagatatttttaaactctagagaaagacaaagagaatttgtcttatcaaagtattaattttttatgtaaaccactctcataactcttcttcatttgggtaactttgtcctagtctcaaaatctgacactttcactcatttgtggaaaactacagccaaatgagaagcctaaaatatcagaattttcagctcagtttctctcccagaccattgcgtagtatgaaatggacaggagtcaggcatggtggtgtgcaccaccagctactcaagaggctgaggcaagacgatcacttgaacccatgagttcaaggctgcagtgagcactatgatcatgccactgcactttagccttggtgacagagcaagaccctgtctctaaaaaaaagaaaaaataagaaaatgggcaggtttctaacctacatgaaaaaaaaagcatgaaattgcctaaaataaaactagataagacagctgaaattagatgcttacttaatgagaattgtcccaactaatcataccacaaagtaccccattaatgaacacatttcccttctctgtaaccttaagtaaaattacaataaagacccatgaagaagaggaaaagaaaagaaaaaaaagaagagaaaaagaagagaaaggagaaaaaggaaaaaataagaaaagagactacaaatctctgtgtaattagaattgcaaagaaaatattatcaattcaattaccacacaagagtaaggataacataattttcttaggataaaagttggtctttctatgtatggccatttttcttttaaaccatcagtcaataatgaccatgatttttagtgctaaatttaaaagcttcattcaatggaagatttcaattgtgtcagcaagctaatttttcccatccatttctatacctataaggtagataaagggatttaaattcaaagagagacaggatgcttaacttgtttcatgattgtgattttcattgaatgttaatattatatgcctcacttatcaaagaaaattcacaagcacattctagaaaccagaatgaacatacttatgactttttcctactaccttaaaactgtagcactttacaaaggaagctacaaataattcctagtcaacatcaaaaacttccaatattcctgacatagatcttaagatattacattaatcgcaaaataaatagaatctaaaacttgaaaaaccaaataagacataatttttaaagttttttttcaaatgggtacacatagagtgtttcacaatgatccacgagtcactaaagggagaatgttccaaagcctccatccatgcaagcactcaaatgaacttacaaatagcgaatacccacagcacaaacattcagcttgtgacttagagagtcagacacgaaataggtaaaaaatatattgagaaagcaagaaagcgtcataaaaactaaatgttgaaaagtttaaatattaagaaaaaatacaagagaaaaatatcattgctagtttttaataaataaatctctatttgaattatgtattcctagaaaaaatactaacatactcctgggaaaataaagaatacatttgggaatttgatttctgggaaaataaagaatatatttgggaaaaatttgattttttaacaaaagctagaaaattcaaattctacaacatctaaggcatcagaatgaaggtgttgacagtaacatcagtaatataaaaaatgtatccgtagtccagagcacaaaaattaactctggctactaatggatcactcagaggaagaaagaaaacaagccagtcacacattctcagacaaaactaaaatcaaagcaaaatctaagctttctaataaattgaatacttaaattattctatttaaagagatattgctcagcctgattaatgcctatatggtacaaatatataaaaatgcaagacttatattttacactgtaagtgtattctttgaacaataaaaatgtgaaacaaaaccctagacagacctacttttaaagtattacctcacaatatcttaaatgttttattttaattttattataccaaggaaagatttaattctcagaacagttaaacaaccgtgaaaagtactctatgtgctaagtaatgtatatcatgtttcaagtggctaagggcaaaggtgagtttaaaaggatagctccagaattttcttttccactttgatgttgctctctggcaaaaggaatttgtctttctgaaggatttcctgtgctcttctcccacactggtaacaggacttgcctccaatggcaacttcccctgcaccttaaaacatgaaaatgtttttcttttgatttattatcctcctctcatcaattctacttctctccttctctagaaaactcccaaaattaataggaggcccacattactttaatttcctatccatttcccaaccttctaactgtgcccattccatgaaccagacatcctcccttactctgctctccacccagacctcctgactctctgagctctccaaagattagagctgttctagtctccgggcgcagctgcctcctcaaacagtgtgactccaacatatacctccagctcttgactctcaggaagctctaggccttgaactatcccatttaaccttaccagttttcaaactccactatttaaattaaaacctttaaaatggatccgccctcatctgacagtcaattaactgacaaaaggccaacatttccgtttctcagaaccaagcctttaggtgcccttcagttcagcctttcaatcagtcacttagcacattttactctctcaaaagtttttcctttttacctttccctcctcccagcaatcatactaacatggagtccactataaagacctaaaacggccaggcgcggtggcccacacttgtaatcccagcactctgggaggccaaggtgggcagatcacctgagggtcgggagttcgagaccagcctgaccaacatggtgaaacccccgtctctactaaaaatacaaaaattagccaggcatggtggcacgcacctgtaatcccagctacttgggaggctgaggcaggaggattgcttgaacccaggaggcagaggttgcagtgagccacaatagcaccactgcactccagcctgtgcgacacagcaagattctgtctcaaaaaaaaaaaaaaaaaaaagacagaaagaaaaagtataagaaaaaaaaagacctaaaagataatcaagaccttgtctgcatttctactcatatccaatagaactttcataatcccaccaagtcaatttccctaaagcactgctttcattaaagaccattattagtaggaagtttttaagttttttgaaataacaatccctaatgtcagtgaataggtggaaaatggacaactgatatactgctggttgaagaaaatggacaactgatactgctggttgaaattggtatgaaccttctggaagacaatgtaccaaagatgtaatgtaagctaagaaagcaatcaaatatgtataaaaagattcttataaggaattttactgcaaaattacttgtgttaaacaaactgggagcaattcagatgtccaaaaatagcagaacacttaaaaagtttatggaatatccatccgaaagaaaaataaatgctaccattcacagtcatttatatagaattcttataaattcatataaaatgttaaattgcatataagatagcatttataataaattttgttgaatcttataaaaacacacagaaaaaagggaggaaaagatatgttatataacaaaatgttaacacaggtctctgttgatttttattcctctgattttctatatttttcaaattacaaattatttttataataaaacatattctaaaatcattctaagcactttttgttgtttcctcaaagcatttaaacagttagcatttatgtaaagtgaaatgagaaaaaaaaaatgcagggctcaatgttgcctaaaatttaaaagctaaacttctcaatttagcattcaaagctccaatgcaacgcagcctgacacagtgcccacagattccatacataaattccaaacacccaatcacgacagctcacttaccccactacatctttcttcgtgcctatttctgcctccaattcccacctctctacctctccaaatactttcatgaccctcagcctctataaactgttttccgtaagagctgctcatccatggggtccccttgagtgtttttaacccaaatggctgtgttgcttcaagttctcccttccctcccctccacctcgggcgactcacataactcatcttggtattctaccatatactatctttaattattatttattattatttaactattttatgtgcatatctcttatttcacacataacaaagttagcttgttggggacagggactattttatgtttgttcagaatgttatttatttcctatacttaagcccttctcaaggccacacagtaacatatgtctaacatccaacgttcactgaataaaatcaaattagttcagatattatacacatacaatatgattttgacacatctatatatacataaagcaaatacttttttttaccccaagattccaactattaaggcgagcttcaatgtcactatcatccaaagaaacaggagattttttcgaataaacttcctgaaatacaaaagggaaaaaggaagaggagaggaaggaaagatggaagaaataaaaggaaaagatggaagagataaaagaggaaaagatagaagagataaagggaaataaagaggaaggaagtaaaaaaggaaaaaaggaagaaaggaagggatgaaaagaagggaaagagggggaagggagggagaaaaagaagagaaagaagtgggacgggagggagaaaaaaagaacaaaatacatgtcattcagcgcaatgagagttttgtgtgcttgtctggtaatgctgtattgccctcagaggaaaggattaggttacaactgaactagggttctcagttctaagtaatgactgctgagggctatgagctgccttaacaatatattcacacagcaactaaatttcaaaaaaaaaaaaattaaaaattaatccaggctcttctctttaagttcttttacaaaaagttttaattgtggtataccacagtagctttaaagtgtattgtcgggggcaggggcgacgtgaaaagatgaattattctcataaaaattagttaacagggaagttttgtgatgatgtccaagaagctctttgttcttaaattaattctcactcacacactgaacataaagataaataatctttggactcacatcataaaaacacaattatggttgggcacagtggctcacacctgtaatcccagcactttgggaggccgaggcgggcagatcacgaggtcaggagatcaagaccatcctggctaacaggctgaaaccctgtctctactaaaaatacaaaaaaattagccgggcgtggtggtgggcacctgtaatcccagctactcgggacgctgaggcaggagaatggtgtgaacccgggaggtggagcttgcagtgagccaagatcacgccactgcactccagcctgggcgacagagcgagactccgtctcaaaaaaaaaaaaaaaaaacacacacaattatggtgattcttcactttttaaaacataacaattccatgcttttttccctcctgtataatttttgtattacacatttatcagccccagatgaaaactataatgaactagagacaacctaagatctgtacccagaaattgacaatgaccagaaaaccctaaaaactaagaaaggtaagtctgtggaaaagaatggctacctgacagcccagaaagtgtattttaaaattagatttgttgatacagcattctcatgcttttagaaggcttaattgctaacaaatgtacctatttatatctatggtcatttaaattactatgaagtaatttttttaaatgcactaaaatgttcttcatattttactgagtttctacatttcttttcaatacaatactgcattattatttataatactatattaaaattcattatcacttctactagtggtcctctgctttttgtatgtttttctcatgaacaagaatttcttaaataagacaatgtacctgccttgcttattctgagtaaatataatgattgtagtttatcactatttaaaatatgctgccctttatatttttttaattccaaattatcattcgataaaatgcaatgagttatgtatatagtgctatgtgctaaaacagtcatgtgttggccgggggcagtggctcacgcctgtcatcccagcactttgggaggctgaggcgggcggatcacgaggtcaggagatcaagaccatcctgactaacacagtgaaaccccgtctctactaaaaatacaaaaaattagccaggtgtggcggcaggcgcctgtagtcccagctactcgggaggctgaggcaggagaacggcgtgaacccgggaggcggagcttgcagtgagccgagatcatgcaggtgccactgcactccagcctgggcgacagagcaagactccatcacaaaaaaacaaaaacaaaaacagtcatgtgttacacatgctttctcttgtaactaaaagtcatgtaactcaagacagccagagttaggcaataaagactggaataagcaggcacagtgtttctcttttccaagctaactggggctgggtgcagtggctcatgcctgtaatcccaacactttgggaggctgtggcgggtggatcacttgaggtcaggagttcaataccagcctggtcaacatggtgaaaccctgtctctactaaagatacaaaaattagccaggcatggtggtgcatgcctgtagtctcagctacttgggaggctgaggcaggagaatggcttgaacccgggaggcggaggttgcagtgagccaagattgcacaccactgctctccagcctgggcaacagtgagactccatctcaaaaaaaaaaaaaaaaaaaaaaaaaaaaaaaaaaaagctaactggagtgctcattagcaccttgtccaaagcaaatctatgttgaacaaatagatgcaagacagacattcttatttcaaaatatacagtttaccttcattagaaaagcagtgttccctacttcactacaagttaattccagcttcttcttaattttatgatcactgggtatataatcatttccacataaattctgaacaaagggaaaatgttattctttgacacacaggagaaacaacagattgatgaatataacacctcagaatcattgaggaagtagaagggatactacactatataccaaacaccccaccttctttaacatcaggatgttcaccagaatcatccaactttattctgttttgaagcaatcattggtacttcaacaaatgaaattaaaactttgttcagctattttaaaacaacaagcaaaaaccaaacaaaagtaaaatctaatcttacacaaatctttggggtaatattttgtccatcttctctgtgagttggactcaaggagtgtgatctcactcggagcttcccagtgtactgttccctgctaagagaccaaaataatcgcaatcacaatttggagaattcagaggacacagagtattagaatctaggattaccatttctttcccttggaactgagatgatagtttgtattaacaatgatgttccatagccgggcgtggtggcgagtgcctgtaatcccagctacttgggaggctggggcaaggagaatcacttgaacctgggaggcagaggttgcagtgagctgagattgtgccactgcactccagcctgggagacagtgcgagactcatctcaaacaacaacaacaacaacaaaaaacacacaaaaaatgatgttccacatcaaaaaaaaaaaagaaaagaaatacaagtaataacctttttatttatatttcatttcatttaaattataagaagttacataaatgccacagacttgcttatgcaaatgctatttttaagtcagactgtaataaatcacctgtatttaaatcttttctcctcctttcccatttttcccaagtgtaaaaagagagaaaatgaagcatatattctacgggaagaacattgttttaaggtcagcaaacttggttggattcatgttccacatcaacatgaagccttaaaatatataaaataacaaaaccttcatgtagtttaaagtttcaattaatttgaaagcatgtcagaaaccacagatatatcaaaatcttctatttaaaaacacaccatgttaatttaggtaaaatgtgaaatgcagagtaagtaggaaatgagtttaaatggacttcatcaaaaagactcgtctctaatataaatatcatataaaatacattcttaaatggcctcctttagcctggagtctctcttatatgattttattcaaaccacttcaatgcaagtcccatgattatgaacacctattctctgaacaactgcttcaagatatattaaatggaaaataaccattatacaatgaattaaagtcactaacattcaaccacaaaccatattaggatttccttcacaaactgtgacctacacgaagtatttctaaaagacagaatgttaattcaaaagacaatattaaaacaaatgtattttgtaattaaaactcacagaataacattccttagactagttaataagtaatgtaaaatggctgaaaaagctgttttaaagagagctgttttttttaatacccctattcagtagtacaaacatccaaatagttaaaatcaaatgagaaaaatgggcaaagttaatattttgagtataattgtaccagtcaatgtgcatcagctgatacaagcatttaaaactctatgaggagaggtaacctgatatgtcatactaagcagtggcgtattcttaagaatagattaaataatcataaaaagatctatacttaaaaattgaaaaatgcttaaatattaaaattcttctcataaaaaaatactaatttaaaaatgagcctgaaatgtttatctatttattgcacagggttgcatacataaaacgacacaccctcttgtttcacttgtagctgtccttctgtaccaacctctttaccctcacgataaattttcaaaaatgttattgggtccatgctctaacttgtcatatatttttcaatcaactacagtatgacttgcattcatcccaaaagtcctataactaaggtcatcaacagtctcctagacactcaagaaaatgagtcataatctgtccttaatttagttgatctcactaaaacattagagatagtagtttaaagatgctgcattcaatggctccataaaaccattctctggccaggtgcagtagctcacaactgtaatcccagcactttgggaggccaaggtcagcctattgcttaaactcaggagtttgagaccagcctgggcaacatgcgacaaaaagcagtcagtcgggcatggtggtacatgcctgtggtcccagctacttgggaggctgaggtaggaggatcacttgagaccagcgggaggttgaggctacagtgagctgtgattgttccactgcactccagcctgggtgacagagtgagaccctgtctaaaaacaaacgaacaaacaaaaaccatttttccatggttctcatcctatcattcagagatctccttcacaataaccttcactagctttctttgcccatcccatacatgctgtgatcccagagttctgtgtctaatttattttcattttacatgctttctctggatgatccaatgtattagtttttcaaataataagttttgcttacaaaatctacatctatagtccaaattgctcccttggcctccaaacccattacaaaacaaaatgaatagccctacttccaattcaacatgtccattattattaactaaacttactatgttacccctaatacgtgctccaatgaagcccaagtaatggagaggcattgcagaagccagcttcttgtgaaggcatttgagccaactgaaggagaaggttggtatcattgttaaaatctggctggcacaagaaaaacaggacattaggtacagatgtttcattttctgccataagactgtctccagctggaaacaacttaaactctaagtaagtacaaaggctgaaattcagtgatggcactagtggtctgagtgaacagtgaaacagaaagtgggagaaaagttcaaccttaaaagcctttttatgaataacaagtgccacacgccacacagaatagcaagtcctggtgcttataagcacaacctacaattggtacaggggacctgatcacagtgagctcataatatggtacttgtgccaagcagaaaagcggtattgtgcctcaattaatttcaggatgccaaaaccaacatggaaagaaaaaattcagtacatttgtaacattccctgacatgccctttactactcttaagccataaaactaggagaatataaattttccctttcactttttcctaatgagaaaatatttcaacaggaattcacaaacactctcaaagtatcaatgctgattcttaatactagaaaaatataaacttatccctgtacagataaagaaataaggaatgatactatatatagatatagatatagatatagatatatagatataaagcctaaaggaagaccaatcaaatgtcctcctgtaaaagaaaattactttagggggtgacgtcagatgtcagcaagactctccttctctcaatggacacataaattcaacaacaatacatagaccaaaatttcctttgtgagacatccagagaccagatgagaggctcctgtactccaggcaagcatgaaaccaaccacactgaagccagtaggaaaatttgtggaatcctcttgcgccataagcaaggttacttaagggacttgttgctgtcttgcctgaatcttagctgtgacaggaaagggtcccaggttgggaactgctgagaacgaagcctccagtttggactagtatgcagtaactgaccatagcccctcccaccagctcagaactagcaggtggaaacccccagtcccaacttctccctggggaacgaaaaagctgaagcatctgtccaacattctggcttttggaaggggctgcctaagggaccggattctgcaagtactcacaggactggtattctctaaatgcctggggaccactgagaacaaaggtggtggtttggactagtaaacactcacggccagagctcctacccctggctcagcacaattagaaaaactcatggtccacagcttctccctggggagggaaagagaaaactaaagcatatatccaacattcagactcttgggggactgcccaaggaacttgtttctgtctcatctgtcttgaagcactggtgggacgcagcataaactaagtgcctaggggcagctgaaactaaaaaagcaagtaataaccaaaaaaggattgagccagtgtgctactagctccagaaggcccatggtacaagacacagaataagaaggaacaagagattatgatctcctaaaaacagaaaccagaaaatcccactatttagaaatttacacacagaagtccagagaagacatatccacagaaaaagtttatgaggaccccagaatctctactcaggccgattcttgaaggtctgcccctgtacaaagccaatccataaagactgggagaagcggctgtttttcaaatatgcagacattaacacaaagggtcaaggaaaatgaaaaatggcccaaagaaaggaacaaaataaatctccagaaaccaaccctaaagaaatgaaggtaaatggattagctggtaagaattaaaaacaaccataatcaaaatattcaataagcttaggataaattatgcataaacaaaatgagtattttaacaaacaaaatatttttaaaaagaaaaatttgagggctgaagaatacaataactgaactaaaaacttaactaaaggggctcaacagcagccttgatcaagtacaagaaagaatcagtaaactcaaagacaggacatttgaaattatacattccacaagagcaaaaatgtttttaaaagactgaagaaaacataagaaacttatgagacactatcaagcaggccaatttacatattactaaagttagagaaagagaagagagagaaaagcagtaagcttatttaaagaactaatctgaagagaaaaatggacatccagatttatgaagctcaaagaatcccaagtaggttgaatgtaaagagatctacaccaggacacattataatcaaattgccaaaagtcaaagacaaagaattttgaaatcaaaaagagaaaagcaactcactacatacaaaggagactcataaaactgtaaaaggatttttcaacagaaactttataggccaggagagaatgggatgatatatgcaaagtactgaaagagaaaaactgccagtcaaggatattattatataccatgcaaatctgtcctttaaaaatgaaagagagatacggtcccagataaacaaaagttgaaggagttcatcaccactacacttgacttaaaagaaattctaaagggagttcttcaagttgaaatgaaaggacactagttagtagcatgaaaacacatgaaaatatgaaactcactgataaaattatatataaaatacagattactctattgatataatagtggtgcataaatcattttcaacttcaacataaaaatgaaaagatgaaagtcttaaaaataactataacagttactgaaacaccaggagtccagtctaggtcccattgctcaccgcacagaaagtcaatcaatgagatcaatgagacaatgagtattgctagggaagaaggctttatttgggcactgcagccaagcagatgggagatcagtatcaaatccatctcctcgcccaactaaaattagtttatatagcaggaagaactgtaactacctgtgggaaaacaggaattagggactggtaaggaagaggagttcgtcaacaggaagcaggtggttggtcaggcaatcatgataggtgaggggtctggcataacattgtctagatgcagtgatctggtaagtttcagttccttgatactatctgggatacctgatggttggtttccagagacaggaactcaaataagacaaacgttaagtttctccagtgttaagactgggtgggttaatttctatgtttattcaaaaaaaccataaacatccattttatgggacaacttggatggtttcataccacaaaataatttgttaatgaatacagaatattaaaaggtgaaaatcgggacattaataacaaagtgtgtgagtaaaagtattgaattttttaatgcaatcgaagttatcagcttaaaataggttgttacaactataagatgatttatgtaagccttatggtaacacaaattctttaaatatagtaagtacacaaaacataaaaaaaaagaatcaaagcaaaccacagtaacaataaacacatcatcaaatcacaaagaaatataaggaagaaatgaacaaaggaattatataacagtcagaaagcaattaacaaaatgacttattaagtccacaaatgtgtgaaaattaaacaacaaattctcatcaatcaatgagtcaaataagaaagcaaaataaaggaaattagaaaacatcttgagacaaatgaaaacaaaaacacaacataccaaaatgtgtaggattcagtgaaagcagtgctaagaggaaaatttacaactgtaaaagcttatattaaaaaagaaaaaaaactctaacaacctagatgcacaccttaaggaactaaaaaaagaacaaactaaactcaaagccagcagaaggaagtaaatattaatagtaaggattagggcagggataaaacagaaaatagaaaaacaacagagaaaatgaaactaagagttgatttattgaaatgatcaacaaaattgaaaaacctttggctacacagaataagaaaaaaggagagaagactaaacaactaaaatcagaaatgaaagataagacattacactcaatttaacagaaataaaaagaatgactgggtgcagtggctcatgcctgtaatcccaacactttgggaggctgaggcaggaggactgctggagcccaggagtacatgaccagcctcagcaacatagtgagcctcatttctacaaaaaaataaaaataataaaaattagctggatgtggtggcacacacctgaggtcccagctacttgggaggatgaggtaggattgcttcagcccaagatgtcaaggcggcagtgagcagtgattgcaccactgtgctccagtccgggtgacagagtgagaatctatctcaagagaaaaaaaaaagttataaaaagaactgtaagaaagtactatgagcaacagtatgccaatgtattggataacccagatgagatgaccaaattactcgaaatgcaaaacttaccaagattgaatcatgaagaatagaaaatatgaacagaccaataactagtaaggaaactgaatcagtaattaaaaatctcccaaccaagaaaagcccagaaccagatgacttcactggtgaattctaccaaacatttgagaagtgatgccaatcctcctcaaacccattcaaaacactgaagagggaatactcccaaattcattttacaaagccagcattaccctgataccaaaaccagacaaagacactacaataaaggaaaattacaagccaatacctgaataacatagatgcaaaaatcctcaacaaaatactagcaaactgaattccatggcacattaaaagaatcatacaccataatcaagtgggatttatccctaagatgccaggatggtacaatatatgctaaataataaatgcgataccccacattaacagaatgaagaatagagattatatgatcatttggatcgatgcagaaagagcatgacgaaattcaatatttttttatgataaaaactcaataaattcagtacagaaggaatgtacatcagaataataaaatgcatatatgacaaagcccatacctagcataatactcgaacagtgaaaagctaaaaaaagcttttcctctaagatcaagaacaaggcaagaaggctcactgtcaccacctattaaatagtacagcagtcctagccagagtagtcaggcaagagaaaggcatccaaatcagaaagtaaaaaggaaaatggtttctatttgcagatgacataattgtatatgcagaaaaccctaaagactgcattaaataactatttaaactaataaatgaattcagtaaaatttcaggatacaaaaccaacatacaaaaatcagtagcacttctttacactaacaatgaattatccaaaaagaaatcaagagagcagtcccatttactgttatttttgctcttgttgccaaggctggggtgcaatggtgcaatcttggctcactgcaacctccacctcctgggttcaagcaattctcctgcctccccgagtggctgggattacaggcacacaccaccacgcctggctaattttttttttatttttatttttagtagagttggggttttgccatgttggtcaggctggtctcaaactcctgatctcaagtgatctgcccgcctcagcctcccaaagtgctgggattacaggtgtgagccaccgtgcccagccttaagttcattctttcaggctcttttcagtataatcttgatgagcattgtgagtactacttctttattgcttctccagtttctgtttgtttcctcttggaattcatattatctctgtattggggattttgaatctatattcttcatctcttacacttccatttgttatagccatctttttattttttcctttgttttctcagaaaattttttgagctggttttctaattcactgatttgattttctgtaatatttaatctgctgttttctgtaatatttaatctgctgttttctgtttccattgtgattttcagatttagtaatcatgtttttcaattgtaagcacatttttatgatcagactgttcatccccttttcacatatgaaatgtctacttgaatcatattgaaaaaaattaaataaacattttagaaatttctctttttaaaatagtttttttcttttattgtggtaaaaatacacaacatgagatctacttaagattttaagtgtacagcacagtattgcagctataatcacagtgttgtgcagcagacttctagaacgttttcatcttctgtagctgaaattttatatgcattgaacagcaactccccattttccccgtctgtaagcccctggcagctaccattctactctcctcttctatgggtttgactactatatagtatttatcctattgtgattggctatttaactcagcaaaagtcctccagcttcatctatcttgtcacatatgatagcatttccttttattaatgttgaaaaatattctattttatgtatataccatattttgttaatccattcatttgtagatgaacatataggttgtttccacatcctgactattgtgaataatgctgcagtgaacacaggagtacagacagctttttgagatcctgatttttctttagctttacacccagaagagggatttgctggatcataaggtaattctatttttgattttttgaggaacttccacactgttttccataatggctatatcaatttatgttcctaccaacagtggacaaagattcccttttctccaaatcctggacaacacttgatatcttttgtctttttgataatagtcattctaacaggtgtgagtgatagctcatgtggttttgatttgcattttgctgatgatgcgtgatgttgaacattttatatattgtatgtccactttggagaaacgtgtattcaagttctttgcccatcttaaaattgggttgttttggggcagttgagttgagtactttatatagattgaatattaacctattattacatatgtggcttgcaaatattttatctgattctgtagcttgtctcttcactctgttgattgtttgctgtgcaggagatttttaagttgataaaatcccatttgtctatctttgctttagttgcctatgttttggggttatatctaagaaattactgcctagaccaatgtcaagaagctttccccctacgttttcttctagtcgtttacagtttcagatcttatgtttaagtctttaacgcatttctagttgatttttgtgtatggtgcaagataagggccaaattttctttttatgcttgtggacttccggttttcctaacaccatttattgaagtgattatccattaaccattgtgtgttcttggcacctctgtcaaagatcagttgactgtaaatgcgtgggtttatttctgggctctttattttgttccattggtctatatgtctgtctttacgccagtatcatactgtttcaattactatagatttgtaatacattttgaaatcaggaagtatcatttctccggctttgttcttcttgctcaagattgctttggctatttggagtcttttgtgattccatgaattttcatattttttttattgttgtgaaaaaagccgttggagttttgatagggattgcattgaaattgtagattgctttgtgtatggacattttaacaatattaattcttccaatccatgagcacaggatatctttccatttatctgtgtcttcagtttctttcactgatgttttacagttttcagtgtatagatcttttccacctttggttaaatttattcctaggtattttatttgatttttgttgccaaatggattattttagctgtgtatgaaacagaagaaatcaagagaaatgaagcagagaagacaaggctcagatttcaagcagggtccagagatatattcatatgtccaacataggatatataagatggtaaaagcaaattatttttcattctcagcttcttccactagcaaaaggctctgaaggaagaaacaatccaagggcaaagatcaaatccaaggttttgccagtaaaatatggactcaggatcaaaatttcaaggacacatctttacacacttggttaagacctcagaaagatttgggcagtgcctgaaaaaagcaaaacaaaaaggcttctaaacgtttccatgttgtacctcttagaagctctctgacagataagagggattctaagaatcataagggtgttgtactacagtatcctgattcctggaccaaaacagagaaagtctgtctcaaagaaattcgtgaatacggtgtttgtctaatggaatggattacaattcgatacacagaaaggtgcaaaatttttaaaggaattatagcttcatttgaaagagttcaaaatgaaaatatgcatttggttccccaaattcatacaaacagaaagcaggctgaaaaaactattcagctgaaagcaaattatttcttgtggtaacagaaacatagctcagagggaagagccaagatcatgaaaaacagagcaaacagccatgaagaaccactcccaagaaacagcactaagacctatcatgaaacgggcaacaaatgcctggctagatttcagaactgctataaactatcattgcaatctgcctcctatttctctgctctttgaatgggaaagtttactgcagttctccggtccctctctcaccattgttggctgtgtaggtgagtgtgtgggaaagaataatgccttcctttagttcacaggttcaggctgaaagaagccacaccatggaagacagccacacctgtacctgatttttattgtttactgaggtatagcttgcatacagtaaaaccatatccttgtaaaatgcagagtttgatgagttttgacaaaagtacacacctgtgtaaccacaataaatatacatattattttcatcacacccaaaaattctttgagcctgagagttaagagtcaacttacctcttcctccaattccagacaagcagtattttcaagagtctcatatgtatgaaattaaacagtatgtacatgtttatgtctcgcttggcctggccaagaatatttctgagatttctccatgttgttgcacgtatcaaaagtttattattggccaggtgcagtggctcatacctgtaatcccagcactttgggaggccgaggcaggcagatcacctgaggtcaagagttcaggaccagcctggccatcatcatgaaaccccatctctactaaaaatacaaaatttagccgggtatggtgctgcacacttgcagtctcagctactccagaggctgaggcaggagaattgcttgaacccaggaggtggaggttgcagtgagctgaaatcgcaccactgcactccagtgtgagcaacagagcaaggctccacctcaaaaacaaaacaaaaaaaaggttcattattgctttgtagtattccattatatacataaaccataatttgcttttctattcatgtgtttatggacatttagattgtttacccctttgggttattatgaataaagctgctatgaacattcaagtatttatgtggacatatgttttcatttctctttaccaagtatctaggaatagaattgctgggtcatatggtaagttgtcttaaaatttataagaaatagccaaactgttttccagagtggttgtgcaatattatactcccatcaacagtgtatgagactttcagcttcatcacctcaccaccatacttggttttctcagtctttataattttagccatttataaattttagtctttataatcctaaggggtatgcagtggtatcacactgtgctttataatttgcatttccctgctaaagaatgctgttggccatcttttcatgtatgtatactagccatttacatattttctcttgtgaagtgtctgtaaactcttttgcacattaactggattgtgtgctcccttaagttgtaagaatcctttatgtattctagccacaagtcctttatcagatatatgtgatgaaaatttttctcccattctgtaccctgccaggtaattttccaaatggtgccttttttaaaaaaaggtttagatagttcagtttgtaaattttttcttcattgttttgtgtttttttatatcttattttagaaatctttgcctgttccaacgtcacagagattttctgttttcttctagaaactctatacttttagcattttcatttaggcctataactcatttcagtttttccccagtggatattcagttcttacagcataatttgataaaaagaccttctttccctcaattccactgccatctttgtggaaaatcaaatgaccatgtatatgagggctcacttctggaatttctattctattctataaatccatctatcctttcaccaatactactgtcttcattactacagcttgattttaagcctaaaaatcaggaaagtgaagtcccctaactttctcttcttttctataattgctttcattcctcatggataatgaatcaggctgaggaagttcccttctattcctaatttgctgagagtttttaacatggatgagtgttgcatcttgttatatgctttttctgtatctagtgagatgattacattatatttctaaaactatgatgaaatacataaattttcaaatgttaatctcaaattattcaaaatataatattatttccatatattaatagatctgatttgataattaagaattttaaaatctatgttaataagggaatgctgctaggtaggtttctgttcttgtaaggtctttgtcttcttttggaagcagagtaatactgacctaacaaaatgacttgggaagcattccctccttctctatttcatgtaggaaaaaaaactcagggaagattgataaaatttcttccataaaagccttaaagaattcaccagtgataccatctgggcttaagagatttgtgaggtggttaattatgaattcaatttctttggtatatatagagctattcagatttcccatttcttgagtcagtatttagtttttctgtctttcaagcagtgtgtctatttcatcaacaatgtcactggtataaagtggtttataacattctcttatcttcttaacatctgtaggatctgtgtcaagtcccttctttcattcccgatattattatatcttctttttaaaatgttttattatcaattgtggtaaaatacatataacacaaaatttacagtcttaatcatttttaagcatacggttcagtggtattaagtatattcacattgttgtgcaataatctccaccatctgtctccagatttcaacctgaaaaactgaaaccctacagtcattaaacaataactccctattccctgcttcccactgcccctataaccaccattctactttccgtttctatgaatttgacaactttagagacctcatataagttaaacggtatctgtctttttgtgactggtttattcacttagcataatgtcttcaagatttatccatgttgtcccatgtgacaagactttcttcctttttagggctgaatattattcattctaaatgtaccacattttgctaatctattcatctgtagatagacatttatgttgcttctacctcctgactattgcaaataatgctgctatgaagatgaatatgcaaatatctcttcaagaccctgctttcaattcttttggatgtaaaaagaattcccagaagtgggaatgttggataatgtaattctatttttaattttttgaggactaccatgtcatttccaacagcagctgtaccattttacattcttaccaacagtgcacagggctccaatttctccacattctcaccaacactttttttttcacagtagccatcctcatggatgtaaggtaacatctcatcatagttttgatttttatttccctaatggttagtgatgttgagcaacttttcatgtgcttattggccatttttatatcatctttggagatatgtctattcaagtcctttccccatcttttaatctagttttttttattgttgttgagatgagttctttacatattcgggatattaaccccttttcaaatatatgctttgcaaatatattcttccattccattgactgctttttcactcagttgattatgtcctttgatgtacagtttttaattttgatgtagatagtttttaattttgatgtagttcaatgtatctttttttttatttgtctgtatatttggcctcatatccaaaaaagaaatcactgccaagaccaatgtcataaagcttttccctatgtcttccgtatgtttccctattatagctcttatgtttaggtctttgatccatttttagttaatttatatatgatgtaaagtgagagtccaacttaattctattgcatttggatatccttttttcccaacaccatttgtggaaatgactgtccttttcccaatgaatggtcatagcacccttatcgaaaattatgtgaccatatatgtcagggtttatttctgggctattgtattccattggtctatatatttgtctttataccagtaccacactgttttgataacagtggctttgcagcaagtttccaaatcaggaaatgtaagacctccaacttcgttttttttctaaatttgttttagctactcaatgtcccaagtgattccatgtgaacttcaggatactgtattagtctgttttcacactgctgataaagacatacccagattggggagaaaaataggtttaatggactcacaggtccacatggctggggaggccgcacaatcatggcagaaggcaaaaggcacttcttacatggaggcagcaagagaaaatgagaatcaagagaaagggtttccccttataaaaccatcagatctagtgagacttatttactaccacaagaacagtatggaggaaacagccatgattcaattatctcccactgaggccctcccacaacatgtgggaattatgggagctataattcaaggtaagatttgggtggggatacagcctaaccatatcagatgcatttttctatttctgaaaaaaatacactgttggaattttgacagagattgtatggcatctgtagattatcttgggtagtattaaccgcctaataatattaagtcttccaatccatgaatacaggatgtttttcattcattggtgtctttttagattctttcatcaaggttttgtagttctcagtgtacaagtccttcacctccttagttaggcttattcctaagtaatttattctttttgatgctattgtaaatgagattattctcttaatttgcttttcagattgttcattgttagcatataaaaatttaattaattttttgcactgattttgtatcctgcaactaagctaaatccatttgttagttctaacagcttttgtgaaatccttagggttttctacatataagatcatgtctgtgaacaaagataattttccttcttccttttcattttggatgactttttctttttctttttcttgcgaattgcctatgttgaatacacaaggcaaaagacagcatcctttctttgttcctgatcttagaggaaaagctttcagtctttcactataagaataatgtctataggctttaaatagatggcgtttattttgctgaggtaatttccttatcttcccaatttaagtttcttcttatcaaaaaagggagttaaactttgtgaaaagatttttctacctcaattaagatgattgtgtgagggttttctcctttgattctgttaatgctaatgtagtatatcacatttactgattttcatatttggaaccattcttgcaagttacgaataaatctcatttggtcatgatgtgtaaacctttaatgtgctgttgaattcagtttacaagtattttcctgaggcctttgcagcaaatatttgtcaggatattggcctatagttttctttccttgtaccacatttgtctagttttagtatcaacttaatgctggcctcacgtgataaatttagaagtgtttcctcttcaatgtttttgaaaagtttgaagagggattggcattaattcttctttaaatgtttggtaaattcaccaatgaagccacctggtcctgagtttttgtctgttgagaggtttttgattattgattcaatctgcttactaaaggtctgttcagatattctattcttcataatttagtcttggtaggtcatgtgttgtgagaaatttgttcatttcacctaggttatcaaatatattgacatatggttgctcatagtcctctcttacaaccctttttctttgtgttaaatttctctctgattttagttaatgagtcttgtttctttttttcttacccatgtagttaaaagtttgctcattttgctgatcttttcaaaaacccaactcttagtttcattttctctactgtttttctgtttcatattttatttccttccttctgttagctttaggtttagtttgttctttttctagttccttaaggtgtaaatttagggtttttttttttgtttgtttgtttttttttttttttttttttgagatggagtctcactctgtctcctaggctggagtacagtggtgtgatctctcagctcactgcaacctctgcctcccaggttcaagtgattctcctgcctcggcctcccgagtagctggcactacgggcgcatgctatcatgcccagctaattttttttttttttttttttaagtagagacaaggtttcacccggttagccaggatggtctcgatctctcgacctcatgatccgcccacctcggcctcccaaagtactgggattacaggcgtgagccaccgcgcccggccttttttttttttttttaagatggagtctcactgtgtcacccaggctggagtgcagtggcacgatcttggctcactgttagctccacctcccaagctccagcaattcttgtgactcagcctcccaaggagatgggactacagacatgtgccaccatgcccagctaatttttttttgttatttttacaatacaaaatacagtacaatacccctagtagagacggggtttcaccattttggcgaggctggtcttgaactcctgacctcaagcgatctgcctgcctcatcctcccaaactgctgggattataggcgtgagccatcgcacccagccactggagtgttctttatgtctgttaggttcaactggtctattgaattgttcaagtcctctgtttagtaaccttctgtcatttgttctatccggcgtattgaagttccccacactggagtatgtgcattctacagttattggatggggtattttataaatgtcaattaggctgtggtagttcagagtattcctcaaatcttctacatcctttttgactttttggtcaagttgctccatcaattcccaagaaaaggaataataaatgcaataatgtttatgcatttgtctgtttttccctttggtactattagtttttgcttcatgtatttttgaagctcttttgtttgctaaatacacatttataatcattacatcatgcttatgaatagactctttaccattacaaaatgactatttgtcttataatttttccttgttgtgaaagtctattttatctgatattcagtatagccattccagcttttttatgcttattgtttccatgatacatctctttgcatccttttactttcaagctatttatctttgtatttaaagtatgtctcttataaataatataaagttggctcttgctttttttatccaatccaaaaagcactgtctttggcttccagtgttgagttcatttatatttaatgtaattatttatggttctatttagtctgtcattttgctattggttttgtcacagctcttctttgctcctcgtttttccttccctgccttattttatgttcactgaatattttatagtattccattttaatccttctagttacacatccttctagctatacctagctatatgtcttttcattatatgcttagtatttgttctaagtatgtgctaggcaacatctaagatggctcccaattttccccaactcctggtatgcatgcccatgtggtatgtcctttcccttgagtatagtctggacctagaaacttgcttttaataaacagaatccgacaaaagtgataagctataatttccaagattagcttacaaaaagattctagcttccatcatgcttacctctctcttgctctcttacttgtccactttgatggaagccagctgccatgctgtaggctatcctatagagaggcccaaataggaaaaaactgagagaaacttttggatgacagccagcaaagactgacgccctcagagcaataccccagcaaggacctgaatcctattaaccatatgagtgagaatagaagtggattctcccccaatctagacttcagctgggaccacaaccccagtcaatactttgtttgcaaccttataggagaacctaagccagaaaacccagctaagccatgtccatgagaaaaaaattaaaaaattttaaaaaaattaaaaaataaatgttgctttaagctgctaagatttagagtaatttgtaatggaatttctcttagatgttgcctagcacatacttagaacaaatactaagcatataatgaaaacacgtatagctaggtatagctagaaagacatgcaatagataactgcagatatctgtattatagataatacagattttggtatctgaaagtaaagtacagcctaagaatatggaaacatctttgtgtgtagtgtgctaaagacaaagttgatttgaagaggtcattagtaggaatctggaatttgaggatattgccagtggggctcaagaggaagtaagaaatctgttatcggaaatgagaagaagggggatcctttttacatagagatagaaagctataccatcatcttcagtaacacaaaaattagaaaatatgcttgaggaactaagtgagtaatatagctaagaagatttacaaagtatttgctattgctttaagtgctgtcgctcttaggtgcaagagtagagtaaaattgagtcaaggaaagttaaagaaaatggaactaagacttcatggttttaaaaattctcagcctctctagatggcaaaatatcctaaattaagaaagtccaagcaaactttggacactgcatagacataaagccaagggtataaatgtaaaatattttgtgaagatcgaaaagataaaagatggtatatctcagagtactatgcattcatccacagatccccttaaaaagattaagagtatgcctgacagatcctctcaatcaaacaagagggcctctacaaaacttaagaatgacttaactaagaaaattccactacttgcctatctggatttcagaattgttatgaactagtgactttttagaaatgtctgtggaggttatcctctgcttggcccattgtatgttgggtgtgttaggagcagataactattagaacagacatttcttcaaagaagatatacaaatggctaataagcacatgacaagatgctcagtgtcattagtcactgggggaatgcaaattaaaaccacaatgagataccactgcataccaactaaaatgcacaaaatcaaagccactgacaataccaagagttgatgaggacgtgaagagacgagaatactcatgtgaagagactggaatattggtaatggggatacaaaatggaacagccagtttggaaaagagtttgatgattttttaagttaaaaataaatttaccacacaacccactcttagatatccatccaaaagaaatgaaaaacatatgtccgaataaaaatttgcaatgaacttccaaaacagcaacattcataatagccaaatactgaaaacaatccaaatatccattaactggtgaatggataaacaaaatgtggtatactcatcaatgaaataccactcaggaacacgaaggaatgaactactgatacaagaaacaatatgaacttcaaaaacaatattgtaagtggaagaactagatacataggactacgtattacccatgaaatttctagaaaaggccaaaaaaaaaaaaaaaaaagataattgcttgcctggggctctgggtataagtccatattataaagatatcaattcttcttaatttatctatagattcaatgcattcataataaaatatctcaacatgcacgcacacatgcacacatcacatttatatgcaagtaaaaactggtgagctaatcctgaaatgtatatggaaatgcaaagaaccaagaatagccaaggcaatcttgaggaagaaaaagaaagctggaggacctacactacactataaaatatcaagatttattttaaagctacagtattaaggcagtgtagtattagcacatagataaacaggccaatgaaagaaactagagaccagaaaaaacccacacaaacaagatctcctggtttacacaaatggtgccaagggccgggtgtggtggctcacacctgtaatcccagtactttgggaggcagaggtgggtggactgcttgaggtcaggagttcgagaccagcctgaccaacagaatgaaaccctatctctactaagaaaaaaaaaaaaaaaaaatacaaaaatcagccaggtgtggtggcacatgcctgtagtcccacctattcaggaggctgaggcaggagaatctcttgaacatgggaggtggaggttgcagtgagccaagatcacgccactgcactccagcctagcaacagagtgagactccgtctcaaaaaaaagggggggccaactacagcagtgtgaatgacatttaaaaataatgctaggctgggcacggtggctcatgtctttaatcacagcactttggaaggccgagatgggcagatcacttgaggtcaagagttcaagactagcctggttaacatggtgaaaccccgtctctactaaaaatacaaaaattagctgggtgtgggggggggagcctgtaatctcagctactcagaaggctgaggcaggagaatcacttaagcccgggaggcagaggttgcagtgagccaagatcgtgccactgcactccagtctaggtgacagagcgagactctgtgtagaaaaaataaataaaataaaataaaaataatgctagatcaaacacatatccattgtgatagacagagggaattagccatgacccctacctcacttcatacataaaaatcaattccagatgtaccacatacctaaatgagaaaggtaaaataagaagcttctagaaaataacatagatgagtactctctgatcttgtaacaggcgaggtaagaaatctcaaacaggaaacaaaaaaaaacaacagagtcaactgacaaaactatattaaaattaataacattcaacagaagataccagttgctatggtttctctgctccaaaactcatatttaaatttaattgccattataacaatattaagaggtgtgacctttaagaggtagttaggccatgaaggctttgccctcataaacaattattgccaaagtggattagttatagaagggctagttaggcccacttctctttctccctccctccctctctctctctcttctcactttctgccataggatgatacaacaagaaggtcctcatcagatgccagcaccttgattctggatttctcagcctccagaactgtgagtcagggccaaatagaaacagctccagtcaggagctcccagtgaaatcaatgcagaaggcaggtgatttctgcatttccaactgaggtacccggctaatctcactgggactggttagacagtgggtgcagcccacagagggcgagccgaagcagggtggggtgatgcctcacacaggaagtacaaggggtcagggaactccctcccctagccaacagaagccatgagggactgtgccgtgagggacagtgcattctgacccagttactagacttttcccatggtcttcacaacccacagaccaggagattcccttaggtgcctacaccaccagggccctgggtttcaagcacaaaactgggtggctgtttgggcagacatcgagatagctgtaggaggttttttttttttcataccccagtggcacctggaatgccagcgagacagaaccgttcactcccctggaaagggggctgaagccagggagccaagtggtctagttcactggatcccacccccacagagcccaacaagctaagatccaacggcttgaaattctcactgccagcacagcagtctgaagtcgacctgggatgcttgagcttggttgggggagaggcatccgccattactgaggcttgagtagccgggtttcccctcacaatgggcaagttcgaactgggcaaagcccactgcagctcagcaaagtcaatgtaaccagactgcctctctagattcctcctctctgggcagggcatctctgaaagaaaggcagcagccccagtcaggggcttatagataaaactcccatctccctgggacagagcacctgggggaaggggcggctgtgggcgcagctccagaagacttaaaccttccttcctgttggctctgaagagagcagtggatctcccagcacagtgtttgagctctgctaagggacaggctgcctcctcaagtgggtccctgactcccatgcctcctgactgggagataactcccagcaggggtcgacagaaacctcatacaggagagctccggctggcatctggcggatgcccctctgggacaaagcttccagaggaaggaacagacagcaatctttgctgttctgcagcctccactggcgatacccaggcaaacagggtctgaagtggacctccagaaaactccagcagacctgcagcagaggggcctattagaaggaaaactaacaaatagaaaggaatagcatcaacatcaacaaaaagggtgtccacacagaaaccccatctgaaggtcaccaacatcaaagaccaaaggtagataaagccatgaagatgaggaaaaaccagcacaaaaaggctgaaaattccaaaaaccagaacgcctcttctcctccaaaggatcacaactccttgccagcaagggaacaaagctggacagagaatgagtttgacgaatttacagaagtaggcttcagaaggtgggtaataacaaactcctctgagctaaaggagcatgttctaacccaatgcaaggaagctaagaatcttgaaaaaggttagaggaattgctgactagaataaccagtttagagaagaacataaatgacctgatggagctgaaaaacgcagcacgagaacttcgtgaagcatacgcaagtatcaatagccaaattgatcaagcggaagaaaggatatcagagattaaagatcaacttaatgaaattaagtgtgaagacaagattagagaaaaagaatgaaaaggaacaaagtctccaagaaatatgggactatgtgaaaagaccaaatttacgtctgattggtgtacctgaaagtgacggggagaatggaaccaagttggaaaacactcttcaggatattatccaggcaaacttccccaacctggcaagacaaaccaatattcaaattcaggaaatacagagagcactacaaagacactcctcaagaagagcaaccccaagacacataattgtcagattcaccaaggttgcaatgaaggaaaaaatgttaagggcagccagagagaaaggtcacgttacccacaaagggaagcccatcagactaacatcggatctcttggcagaaaccctacaagccagaagagagtgggggccaatattcaacattcttaaagaaaagaattttcaatccagaatttcatatccagccaaactaagcttcataagtgaaggagaaataaaatcctttacagacgagcaaatgttgagagattttgtcaccaccaggcctgccttacaagagctcctgaaggaaacactaaatatggaaacgaaaaaccagtaccagccactgcaaaaacataccaaattataaaaaccatcgacactatgaagaaactgcatcaactaacaggcaaaataaccagctagcatcataatgacaggatcaaattcacacataacaatattaaccttaaatgtaaatggactaaatgccccagttaaaagacacggactgggaaattggataaagagtcaagacccatcagtgtgctgtattcaggagacccatctcacatgcaaagacacaaataggctcaaaataaagagatggaggaatatttaccaagcaaatggaaagcaaaaaaaaaaaaaaaaagcaggggttgcaatcctagtctctgataaaacagactttaaagcaacaaaaatcaaaaaagacaaagaagggcattacataatagtaaagggatcaatgcaataagaagagctaagtatcctaagtatatatgcacccaatacaggagcatccaggttcataaagcaagtttttagagacctacaaagagacttagactcccacacaagaatagtgggagactttaacagcccactgtcaatatcagccagatcaacaagacagaaaattaacaaggagattcaggacttgaactcagctctggaccaaatggacctaacagacatctacagaactctccaccccaaatcaacagaatatacattcttcttagcaccatatcacacttattctaaaatcgtccacataattggaagtaaaacactcctcagcaaatgcaaaagaacagaaatcataataaacagtctctcagaccacagtgtaatcaaattagaactcaggattaagaaactcactcaaaaccgcacaactacatgcaaactgaacaacctgctcctgaatgactactgggtaaataacaaaattaaggcagaaataaagatattcttggctgggcacagtagctcacacctgtaatcccagcactttgggaggccgagggaggcggatcatgaggtcaggagatcgagatcatcctggctaacacagtgaaaacccatctctactaaaaatacaaaaaatgagccgggcgtggtggtgggcgcctgtagtcccagctacacaggaggctgagacaggagaatggcgtgaacccaggaggtggagcttgcagtcagccgagatcgcgccactgcactccagcctggatgacagagcgagactccatctcaaaaaaataaaaaaagaaataaagttgttctttgaaaccaatgagaacaaacacacaatgtaccagattctctgggacacagctaaagcagcgtttagagggaaatttatagcaccaaatgcccacaggaaaaagcaggaaagatctaaaattgacaccctaacatcacaattaaaagaactagagaagcaagagcaaacaaaatcaaaagctagcagaagacaagaaataactaagatcagagcagaactgaaggagatagagacataaaaaacccttcaaaaaatcaatgaatccaggagctggttttttgaaaagattaacaaaatagatagatcactagccagactaataaagaagaaaagagaagaatcaaatagacacaataaaaaatgataaaggggatatcaccactgatcacacagaaatacaaactatcatcagagaatactataaacacctctatgcaaataaactagaagatctagaagaaatggataaattcctggacacatacaccctcccaagactaaaccaggaagaagtcaaaaccctgaatagaccaataacaagttctgaaattgaggcagtaattaatagcctaccaaccaaaaaaagcccaggtccagatggattcacagccgaattctaccataggtgcaaagaggagctgttaccattccttctgaaactattccaaacaatagaaaaagagggactcctccctaactcattttacgaggccagagttatcctgataccaaaacctggcagagacacaaccaaaaaagaaaatttcagaccaatatccctgatgaacatcgatgcaaaaatcgtcaataaaatactggcaaaccgaatccaacagcacatcaaaaagtttatccaccacaatcaagttggcttcatcactgggatgcaaggctggttcaacatatgcaaatcaataaatgtaatccatcacataaatagaaccaatgacaaaaaccacatgattatctcaatagatgcagaaaaggccttcaataaaaattcaacaccccttcatgctaaaaactctcaataaactaggtattgatggaatgtacctcaaaatagtaagagctatttatgataaatacatagctaatatcatactgaaagggcaaaagctgcaagtattccctttgaaaaccggcataagacaagatgacctctctcaccactcctattcaacatagtattgtaagttctggccagggcaatcaggcaagagaaagaaataaagggtattcaaataggaagagaggaagtcaaattgtctctgacatgactgtatatttagaaaaccccattgtctcggcgcaaaaactacttaaggtgataagcaacttcagcaaagtctcaggatacaaaaatcagtgtgcaaaaatcacaagcattcctatacaccaataacagacaaacagagagccaaatcatgagtgaattcccattcacaattgctacaaagagaataaaatatctaggaatgcaacttataaggaatctgagggacctcttcaaggagaactacaaaccactgcccaaggaaatcagagaggacacaaacaaatggaaaaacagtccatgctcatggataggaggaatcaatacagtgaaaatggccatactatccaaagtaatttatggattcaatgctatccccatcaagccaccactgactttcttcacagaattagaaaaaactactttaaatttcatatggaaccaaaaaagagcccacatagccaagacaatcctaagcaaaaagaacaaagctggaggcatcatgctacctgacttcagactatactacaaggctacaataaccaaaacagcatggtactggtaccaaaacagatatataaaccaatggaacagaacagaggcctcagaaataacagcacacatctacaaccatctgatctttgacaaacctgacaaaaacaagcaatggggaaaggatttcctattaaatggtgttgggaaaactggctagccatatgcagaaaactgaaacttgaccccttccttacatcttatacaaaaattaactcaagaaggattaaagatttaaacataagacctaaaaccataaaaaccctagaagaaaacctaggcaatatcattcaggacataggtatgggcaaaggcttcatgattaaaacaccaaaagcaatggaaacaaaagccaaaattgacaaatggaatctaattaaactaaagagcttctgcctagcaaaagaagctatcataagagtgaacagacaacctacagaatgggagaaaatgtttgcaatctatccatctgacacaagactaatatccagaatccacaaggaacttaaagaaatttacaagaaaaaaaaaacatcaaaaagtgggcaaaggatatgaatagacacttctcaaaagaaggtatttatgccaccaacaaacatacgaaaaaaagctcatcatcactggttattagagaaatgcaaatcaaaaccacaatgagataccatctcacaccagttagaatggcaatcactaaaaagtcaagaaacaacagatgctggagaggatgtgaagaaataggaatgcttttacactgttggtgggagtgtaaattagttcaaccattgcagaagacagtgtggaaattcctcaaggatctagaaccagaaataccatttgacctagtaatctcattactgggtatatacccaaaggatataaatcattctactataaagatacatgcacacgtatgtttatttctgcactgttcacaatagcaaagaattggaaccaacccaaatgcccatcaataatagaccggataaagaaaatgtggcacatatacaccatggaatactatgcagccataaaaaaaaggatgagttcatgtcctttgcagggacacggatgaagctggaaaccatcattcttagcaaactaacacaagaacagaaaaccaaacaccgcatgttctcactcataagtgggagttgaacatgagaacacatggacacagggaggggaacatcacacaccgggtctgtcaggggattgggggctaggggagggatagcactaggagaaatacataatgtagattatgggttgatgggtgcagcaaaccaccgtggcatgtgtatacctatgtaacaaacctgcacattctacacatgtatcccagaacttaaagtatattaaaaaaaagaataaaaaaactctgcacgaatttaaaaataagtaaatacatatcacattacactgtaaaaaaaaaacttaaagtataattttcttaaaaatcagatgcagaactgtgagtcaataaattctgttcattataaattacccaatctcaggtattctcttacggcagcacgaaatggaccaagacacaagtgaaagtgaaaatgcaagccacagagtgaaaaaagatatttgcaatacatatattcaacacagaattagtatccagaatatacaaagacaaatcgacagtgaaaagacagacaaaccattttttccatacttaaaaaagatcaaagactcaaccagaaacttcacataagaggatatccaaatcatcgataaacattaaaaaagatcttgatatcattagtcatgaaggaaaatgcaaattcaaactatacatctgccataccagaattgctaaaattattaaaaacttacaaaccgagtttcagcaaggatggagagccatgggaactttcaatcttgctagtggaaatgtaaactggtacagccactttgagaaattttatcagcagtgcctactatgattacacttctaagtcaacactcaaaaaaatgtgtatacttgtgtactaagagacatgtaaaagagtattcacagtagaatcacttgtaatgtcaaaaaccaaaagtccaaccatggtacaatggatatataaattgtgatatattcatacaataattttaaaaatccattgctaaatgcaacaacatggatcaatctcacaacataatgttgagcaaaagaagacagaaacaaaagggaacacgctttatgaatcaaaaacaatgaaaacgaatctatggtaacataatacagaatagtggttccttcttcaagaggtgataaatgactgggagagagcaagaaagagtttctggggaggtagctatattctctatcttgacctggaaagagatttcacagatatatacattttgtaaaacttcatcaagctttacactttgatgtgtcttgttgtatgtgtgttgtattttgattttaacattttaccaaaagacaaagaatgaactatagctatatttattaacatggataaatctgaaaaatatgatgagttaaaggagcaagtctcaaaataatatatacagtatgattccacttacatgaaattcaaaatagagaggtaaataactgattaacacaaaatacaggacagtaatttcctctcaagcaaagggaagaggcaatcggagaagggtacccagcggtcttctggagaactgtaatatactatttattggctaggttgaaagtatagaaatgcttatcttctagtggctctttaaagtgtacctatgcactgtacatgttttttgcatgcatgctatgtttcacagctgtaaaatattttaagagtaatacaactactgaattacaaattatcagaaaaccaaaatgagaacttctgattttctgtcttttcatttatctgagcagcaggtaatattgttatataccatctgcagaacagtcttctttgggtatattactaaatatacttatgaaacataaaaataaataacaattaataatccagtaaagtatcaaataatgctgaaaattaaaaaatgaaaataacttccaaaaatccacaacatacttattttaatttttcaaaaagaactttattagaaagaaaaagaaaactaaatgaaaaaaaatgagatgcttaacaaaactagaaaaaggtgagcacagatccataaacactttaagacttcgtatttccaactacttactttaaaatggcacacttgattttaaaacttaaaaataaaaacaaatttaaaaatcgtacatttaaatcattgtttattaatatatctctgacttagaacactcaatatttaaatttcattaaaattaaatgttaaaatataagctgttatccatttttgtttattaaaaaggacaacccaaactgttcaatattacctgacaaacagaaacttgtgaaattaaaagatgtcattacaaagcctcactcattaaaagaaagaaaaagagaaatgtgactaaattgtcagaaagctgacttactgggggagaaaaaagcctaaatggcccaaggaccattattttcaaagctgctccatcccagttacaaatagttgccacttggcctcatcttagtaaatacctaagagtgacatttaattagcacattaatgttgaaaattaatgagtagctaagaggttttatatgtgtgaaatgttgtattttattgtgtactctaacaagcagttttcacttctcatttatgtagcagtcctatttctagagtacaaggttaagtgtctatcagcaagtgtccattgtataaaagattgtcaaattagtcagatttggccaggcacagtggctcacgcctgtaatcccagcactttgggaggccaaggcgggaggaccatttgaggtcaagagttggagcccaccctggccaacatagcaagaccccgtctctaccaaaaatacaaaaattagccaggcgtggtggcgggcacctgtaatcccagctactcgggaggctggggcaggagaatcactgaacccaggaggcagaggttgcagtgaggggagatcgcgccactgcactccagcctgggcgacagtgcgaaactctatctcaaaaaaaaaaaaaaaaaaatggccagcatggtagctcatgcctgtaatcccagcactttgggaggccgaggcatatggatcacaacgtcaggcattcaagaccagcctggccaagatggtaaagccccgtctctactaaaaatacaaaaattagttgggcgtggtggcaggcgcccgtaatcccagctattcaggaggctgaggcagagaattgcttgaacacagaaggcagaggttgtggtgagccgagatcgtgccattgcactccagcctgggcaacaaagtgaaactccatctcaaaaaaaatatatatatatatacacacatatatgtgtgtgtgtgtgtgtgtgtgtgtgtgtgtgtgtatatttatttataaacagtttcttttttgttagtaggagctcctctgacagcagaaattgaccaagagcaactagatgttgatcatgggtgatcatcaccaaaaaagggagctgcccgtgaaatgcaagtaagcacagaagaaaggtctcccatgtggcagagccagtttctatgcaccagcacccaagccctagtccccattcctaccccacatccccaccgagacagagaacaggccaccagctctccatctggtcagtcaggttttgcaatggccaagcagaagattcggatctggtactgttctgcccaacacagtagcccctaatcacatgtggctatttaagttaattaaaattagaaattcagtttttcaatcacaccagccacatttcaagtgttcaatagtcacgtttactggtggcgactgtattggacagtgccgcctatagaacattaccatcagaaagttctattgaacagtactgctgtagaacacatatctgcccaaacatcagggttattcacaaataaaatgaatgtacttttggcaggtaatatttaagaaggttttactaagaaggaaaggtattgattggctccttgctaaattatccaacaatttcaggaggagcaatttataatgttatatagtatcatttacatataaaagtggagtttaacaaagtaaaaagattcttttgcatgcccagactaaaaaattaaatcaatatttttaaagtgaaaaatgtttgctcacatagattaacttcttcaaccacaagtgggttttcattatacttgatcaccatctgctggccatgttattaaactgcacacacaaatgaaatgctagctatattggggtaagacatacagaatcccagctttttgccacaatgcattcctggaaaaccatatcataaagaggatcattataaagcaagtcacattttccataagggcaggaccataattagaatcttcattccaaactaaaatctagcatcaaataacccatggcaaaatctcattaaagcaaagatgtaaaaactatagtcctctataattatttaaaataggataattattctccaagttctttcttacaggtatgaacacatgtattatttagatgacccaacatgagttaaaagataaatataatttatataaaattagcctaaatctgatatggtaaaaatagtaggtagttaataataattatttgcactctcctagaaatcctaagcaatctggtgtaggctcctaataaaatggcacctaattaaatgccttctttttcatcaataaattcctctcaaataagcagaagcaacgtgtttcttccattgtaaagcagtgtttaaaggtcagggtttatttaacattactcctcttcaccctaccctaacttttaatcaaagttttcagtaaaaataataagtgctattaaatcatttttttacatctttccctatcccagaacctcactgcactttggtgataagctaccagaccacgtatacttcactgaaaagacataaaattactacaagccattaacaagaagcttcaaaacatttttcacagaattgtaaagcaagaatacaacctattacttttgtgttctttgagataaagcatgaagaatatatagatgatgtgaactaaaatcaaaatattagttaccagccgagcacggtggctcacacctgtaatcccagcactttgggaggccgagggagggggatcacctgaggtcaggagttcgagaccagcctggccagcacgatgaaacctcgtgtctactaaaaataaaaataaaaaaattagccaggcgtggtggcacacgcctgtaatcccagctactcaggaggctgaggcagaagaatcgcttgaacccgggaggcagaggttgcagtgagccgagatcgtgccactgcactccagcctgggtgacagagcaagactccatctcaaaaaaaaaaaaaaaaaaacacacagttacttaggcagcttcaaatatatggcgtgaaaaaatgtaaacaatgaggccagccactgtgtgttccttctatccttgaaaaagaggcctattacattgtttaaagattcctataaagcctcttttaaaatagaattaccattctttattttgatattgtgcaggattcatacttacaatcataacctttctgcagagtcataatttatttttctcagggaatacaaaatgacttttagtaactgaaaataattaatgaccaacagactttaagataataccctttgggaggattagtaattagggaagcaaaagcatggtcaaacaatctaacaagcaaggccctgatgaactattacaataatgatcaccataccagtgatgatggtggtagccgcagctaacacttaacaggccctctgtcaagggctctacacgtcttatttcactttgtccttacaactccatttgcaaatggagatagtggtagtactaaccccgaagttagtactaccactatctccatttacgagtgatgaaactggggtttagagaaattaagtaacttgcctgaggacagatggttgccaagtgtcagaagtggaatgtgaacaaaggcaaactgctttctttcagctcaacctagaaataaccaaaaacaaaggtatagctgcccaggattgctgacgcagcacaagtggaaaaaaacagataaaactgaaatttccatatttgctgcataaagtacttatgcctatatgatacactagaaagaacatgggtgtgaaatcataaggccctgcattccaatattggatccatcactggaaaagtcactggactttcctgaagctgttatcttgtctataaatacaaaagggcaatgatgtcagcctcactggactatagagaggattcaatctgatgacttggaaaagatttctagaacagtacctagcatgcagtaggagatccataaatggtatgacttgcctcacttggcctctgctttcacaaattagaaatacaagtggaatccacaaacatttatttactagaaaattttttatttttatgtttaaatgtatatatatctgttatacaaatttattaatttgcaatgtgtatgcacaaacattttaacaagatgatatttcagaaggcaactgaacagtatctatcaaaataagagtgtgattattagaaataccatagacacattttttttacaagaacgtttttaaatgtacactccaaactagtccaaatccctaaagctaaccacctttaacagtttcatgtgtggtacccagaaagattccctgcacacgaacacatatgtatccacagagcctctaaaacacatatacacaaacacaaacggaagcttcctatactttatgtacttctttttaactttatcctattagatcttgccataataacctatatatatgtgtgtgtatatatatgtgtatatgtgtgtgtgtgtgtatatatatgtatatatatgtgtgtgtatatatgtatatgtgtgtgtatatatgtatatatgtgtgtgtgtatatatatgtatatatgtgtgtgtatatatatgtatatatgtgtgtgtgtgtgtatatatatatatatttttaaccattgcacaagatgttgaaccaactaataactccaccaacaaagcaatttctcacctaggagtccataatagcccaaaacagatgcaggcatataataatccttcttgatattctaactgataatttggcatcttgaaatcatggaccaaactaacagccaaagttgtccacatccttaccattcctgtctttttgtgggcacttggaaattatattacaaaccctccaactacaaaccccaacatcggtatttcactttctgtccaatagggaacatcccaccactatataaaaaggctctcacccatgcttctccttgctacttctgcctcctgaccaacccttgtgcttctccacatggcctgcatggtgtggcatgcctccctcctcttggaaactgtgagaaataaactcttctttcaaaggcaacttgtctctatgtctgtcatcgtataatgtctgattaaaacaaaccctgggtgcatttttaaataaggtgcctgatgatggattactaggatgtaaactcaggcattctttataacaataaaaaattaaaagcagaagagacagattaaattatagtatatccacattatggattatctgtaattgagaagtccacatgatacaggtttaagacatagctgagtaaaaaaaagagcaagtctcagaacagtatgtacattatgagccaatttttaatttcttctttttttttttttttttttgagacagagtctcactctgtcacccaggctggaatgcagtggtgcaatctcagctcactacatcctctggctcctgggttcaagcgattctcctgcctcggcctcccgagtagctgggactacaggcacccaccaccatgcccagctaatttttttgtatttttagtagagacggggtttcaccatattggccaagctggtatcgaactcctgaccttgtgatccgcccgccctggcctcccaaagagctgggattacaggcataagccaccgcacccggcctgtaatttcttaattatataggtgtggatgtctattgtaaaatgatatgcacaaaattgttaatggtgattaccactccaaagtgggataaagaggacacagaaggattgtgactttttactctaaatatttctatattgaggtttttataaacatgtattatatatatagattgcatacttttccaaaatgaggataaagactgtactagtcatctattgctttataacaaattattacaaatttaacagctttaaacaacacacataaatgttctcatgtttctgcaggtcagaagtccaggcacagctgaactgggtcttctgtttagggccacaaaaggctgcaatcatgattggaccagacctgggttctcatctagaggctcaactagggaaggattcacttcccgacttgtgtggatgtcagcagcattccgttccttatggctatctgattcatgtatgatttgtggcagctgcattttccaaaaccagcaaacggaatgacagcaagtctactggcaagatgaagtaatgtaatcctgggaataatatcccattaccattgccataatctattggttagaagcaagtcacaggacctgcccacactcaaggggaggggattatataagggtatgaacaccagaaggaggatcatgaagaccaccaacaagacaattaaggtctttatcagacctccatggtaagtatctgaaggctgatcagaaagataatatatattgatatagctcatgattgtagatctaaatgaaattaaccaaactatacatgcatgagatctaagtctatggtctccttagtaacattttctaaagtcatgctccaaactcaaatataactaaaatatttcattgtcaagaaaataggcagataggccaggcatggtggctcatgcctgtaatcccagcactttgagaggccaaggtgggcatatcacttaaggtcaggaattcgagaccagcctggccaacatggtgaaaccatgtctctaccaaacacaaaaattagccaggcatggtggtacgcacctgtaatcccagctactctggaggctgaggcagaagaatcgcttgaacctgggaggcagaggttgcagtgagccaagactgtgccactgtactctagcctgggtgacagagtaagactctatctcaaaaagaaaaaaaaaagaaaaagaaaataggcagatatttgacataaaaatgcagtaacagatatataatagcaatgcaatgtggaacagtagtttttcttatagaaaatatgggcaataagattatcttaaaccaagaaatatgaaaaatgaaagcaaagaagagaaccaggacaggactactagctaagtgttgaagctgtttggtgtgaaatgctaagtacactagtatataatgtatacttggtggaaaaaataaagcgtgagaataagccagatggagtatgacctcaccatacttctaacaagtttggaacaagactatataccatatcctacaggaagaataaaagtaaaggaaaggtgccatctctactgaatagagagtcctaacaaaaaggcttcaaaaggactctgcatctttaataatataaaaaggctaggacacaaacagcatcatctaaaatgccattagaaatacttcacatacaaaaaggtctaagtaaagcaggattttataaagtgatcaaaaaagaaacactaagggggaaaaatcttttaagattaaagaggtttttcaaaggacaagttgaagtggctgtaaaatttatgaggcagcattaaacttcagttctaagtaacaataaattattcaccataaaaacatacatgtgtcaaatattataagcctcttaaactttttaaaacaatttcttgcagaactgattagatatattaagtcaagattagcagatactaactttttcattagcatactatgatcactcagagtaaaggaggaaatttagaaaagaaataagacagaaccatcaatagtcgattcaccaccaaatgtgatctgatgtcacacatgatacatatttcaccttaagattagtttccttggctttagctaaagtaaatgttagttttatttttaaatgtcttcatgtatgtaaaaactacaaatatctgttaactaatgtaaatcaaattaaaattgtaaaaataatcaagttaaaactattaaattaaaagaaacataagataccctgagatattttgttttggcagccctaattgaccttagtgattctgacatttgacagaggatattttaagcatgtcctttccagctccttcattgtcattcctcacagtgtgtgaagggaatcgctataaactacatctaagcttccctctatattttctaaaatttatgcttccctcaacgttttctgaaatgttaaaaagaaaaaaaaatccttttaggccatttcctctgtcacaatatacccgtttcaaagggattttgtacagattaaattaaatatgtggcagtgtctaacacaatctacttgttcatgaatgcattcactgttgaatatagatacttacagaattcctaacacgttccttcccagtgctaggggctggaaatatagcaaatacagcaaacagcaaaaacacaagttcctacctcatgaaatttacaatctagcacacaggacagatagtaagcctctacacatgggatgaaggcagcaaagaaacacagagtactaaaggagtaaatggcggggtcgcctaaactgccctgggatatcagataaggcttttttcacgttgcaatctctgaaggatgggtaggactcaccagagtgcctgcttttcccattacttattatataactgacaacgaatgcctcatactctagcaatccttttgcattaaaacacctttaataataggtgaccaacaaagagaattaagttattttttacaattgtggggattttactatggttccatttctcaaaaaagtcaatggctaatagttgaaggatattctcattgtattttctcaaactttatcctgtattccaaagaagaaaaaaatctattcacccggactccctggaaatctcaagtctatttcctaccctgaacccttctcttatacacacctgaatccttgcaaatacttccatgactaagcatagccactgcactgaaactatccatgtgctcatctttctcccccactcatctaaaacaatggttataaatcaaaagtctggaggacttaacagatgagtgattatactaccagatataaggatatccttcacttctacaaagacatagtgtctgtctctccccttctgttttttgttcacagatgaggtctcaccctattgctcacgctggcctcacactcctgggcccaagctaacctcctgctcccacctcttgaatagctaggaccacagacgcacaggctgtgcccaatcctctccccttcttaaatcacatgatccctcttttctacctttcttctttcacttgatagaacataaaaatagaaaaacaaatacttcattttcctcttaaccctacttaaaggggaaaaaaaacctcaagctcaataacagatgcaatagacatcaaatttggtgtcaggaattagaaggaaatcatgaaggcatatgctaaggggggtaaccaagcactacttagctccaacatatggctgtctcttagaaagatttctaggtgtccagttttaaagagaagccagaaagttgggcttttatatgaaattccccaaatgttaattttgacaactcatttaaaattgttaaagacattgtttaagtccaaccaagcaaatctacccacacgattcattcagtccaggaagatcacatatttttaaactatgctctaagctctaagatacaggaaactactttagttcacctttatactgtaaactccacattcattacatctagaaagaaacccagaatttagctggactcttagcagatattttggcaaacaactgatgtattttgcagctaaactaagaatcgtatttttctttgtatacagaccacaatctctttatacctccatataaaaagattgcttcaaaggctacaaaaattctacaattacacctcttctaattgtaattctcctatgaatgtaaaaataagtattttaacaccacacttcctacagactcatctattcatttctttttactcttctgaatatgcccttaattatttcacctcttcctttttgcctccccattctgtttctcctttctactgaaataattttatatggactggatctctcacttttatttatctttttcttttcttttttttgagacagactcgccctatcgcccaggctggagtgcagtagtggaatctcggctcactgcaagctccgcctcctgggttcatgccattctcctgcctcagcctcctgagtagctgggactacaggcacccgccaccacgcctggctaattttttgtatttttagtagaggtggggtttcaccatgttagccaggatggtctcgatctcctgacctcgtgatccgcccgcctcagcctcccaaagtgctgggatgacaggcgtgagccaccatgcccggcctgtttatctttttcgaccataatatctcaggtctgaaaaacatataaacagactacatcaactgtggagacatttcaaattactaataacatttctatatctgtttaaggaataaaccaaaaaaattatagtggacaagaaagattatactgttaacagaaacagatttctaaaattaaaattaccaagagaatggtgaggaaggaattataaagtatggtacatggtaattgacactgtcctatattttactaaaacatttcaaggaataaggccaaacagaaaagtaaaaatttgataaaagtccaaatttaaatctatcccttccctaaagccaaaaactatgctaccacaataatggcctttttgaacatttcaaaaatttggaaatttatttttatttgcactaaaaaaacctatttaagtttaatactctagtaagaaagcacagtctaatggggtttacgcttacattcattatatcattaagtgaaaacaaatattgttcaaggtggatttgcaggatattttgttcaagttattgataatgcttttaatgtatgcttgtcataaaggaaaatacataattgtgtcatttaaagatgctcagggaccacttgtcaagcaatcaaaaatatatatgaagttaacaggtatctattaaatggctaaaaatataaaataatcttgaatgtgcagttaagggaaaagtaaactacttccattataaaaaaaaggaaaaacagaatgtataaatcagttccaaagacagactaaatgatgaaacacattcaaaatcccattctctttacatacctgtagacatcagttggcgactgtactaaagtgttatcttctccagaagagagtttccatgattcatttaatttgtgttcacttgtctccagctcacccagtacccaggctggtaatccctctgggcttgaaccttttgctcgtgctggatttggttcatcaaaatagatggactgattttttaaaattagaaaaattattctttcaaaatgtactataataaaccactaaaatttccatcaagtttcaagtttgaaaacagcctttcaaatactcaaattcaattacattcaaacatttaaaaaattaaatgtacattgaattatgagatattaaaatacattaagtgataacatatttacattttagttgcactctactgtctaagaaatacaataaacagaagtacataacagataaatctgatagtaatgtttatattactaaaggaatattagttaaatatgaaaagttaaatacaaagtttttaattatgtgccatcctatctctttctgtaatcactaactactttacatacacaaaaaaagaaatcagtgggatgagaaacacaaacagtgcaacccaggaattaaaattaggaatcccttgataaggtgggaacagcagagtgaaaaacctgggatttagttctggccacactgctaactagctgggaaacccaagagagttctctaaactttcacattattattatttgttaaataaagcccttccctttgattctatgaaattaagtgtgaatgggaaaacatgatacaatgtactcatatcttcacatctagatgtgcttcataaaatgttctacctttacacgtttctaaagaaaactctgcattgactgcacacctctgcaacaattctcccaatcctacagacagaatcctcaaggcactgttctttagggaggatgacacaagaccctccactccatatgggacatgcacagaaatttctttttaaatgacatagtcattaaaacttttggcattgtgccatggaaaacaggaattattctctaatgttcagcgtgccacttgactaaattgtgctttaagtaaactaataaaagttttaaaatacatgacacaagaattctgcagttcattaaaaaaatacatatatatcctaacagcaactatcaaagctaccaatacctagtactccagatttcttaagtacaggcactcaaataccaaacaaaccaaggtatattttatggttacaaggaccagggcagtgacaatttatccaccaagcataataataactgcctttgcaataaagctgattttgacaatgaaattaatttaagtacagaaaatgactttcaaactccattactgtcattttattagagtaaaaaggaacttttacaaatcatgcactccaacctctcataaacgtttaaataatatatatgaaagagtttaaaaactagaatttactgaattacgtaaaaattaccattacaatccagtgaaaattagcaaaaagtaaagctcaatataaaaaatttcgttttcagttttttagaaatactgttgaatactgaggcataactaaatcaataaggatactccccttataagcaatacatgtattttattaaaggtggaaaaaaattgaatcaggaagaaaaaaaacaattttaatatattatctagcacatacaacctaatagtattaccattccccaaagggatgataacttgacgcttttttttaaatgaaactaatatataccttttgttcattgatacctaccatgtatgaaggtagaatttttagtgtcccgggttcaggtcggtgtgtaaaagggccttcaagcgcacctcgtttaagcatatgcaataacaattttgcatacaggttccgattcttcctccccattattcctgcacctgttcctgaaggttcgcacagctttctaatccaaagagcacacctctgccgttctataaatacagaagaactattagaaattttattttttataaaatgaaacattcaattacaaagacctataatagcacctgctttagtctaaaagaaggaccaacaaaccttttctgttaaaggccagagagtatatactttaggcttcacaggccatatgatctctggcataactactctgccactgtagcatgaaagcactcagagaccataagtaaacaaatggcatgactatgttccaataaaacctggcaaaaaaagactgtgggcaggagttggcccatgggccattgtctgctaactcctggtctacaatttcactttattaggtaattggtaaatgagaaagacaaatgcaaagaaatattttctcaaaaataaaatctctagattatcattaaataactttaatttttaattattgtgagtacacagtagatatatatatttaggcagtacatgagatattttgatacaggcatgtaatgtataatagtcgcatcaggataaatcgggtatctatccatcacttcaagcatgtatcctctgtgttacaaacaatccaattatactcttagttatttttaaatatgccattaaattattagtgactgtagtcactctgttgtgctgtcaaatactaggtcgcattcactctatgtttttgtacccattaaccatccctacttcctccccacccatccttcccaccctctggaaaccatccttctatctccatgagttcagttgtcttaatttttagctcccacaaattagtaagaatatatgaagattgtctttctgtgcccagcttatttcacttaacataatgtcccccagttccagccatgttgttgcaaatgacagggtctcattatcttttatggctgaatagtactccattgtgtacatatatcacattttctttatccatttgtctgttgatggacacttaggttgcttccaaatcttggctattgtgaacagtgctgccacaaacatgggagtgcagatatctcttggatacactgatttcctttctttggggtatataactagcagtgggattgctggatcacatggtagctctattttctagtttttctgaggaacctcaaactcttctccgtagtcactccactaatttgcattaacaccaaaagtgtaggagagttaccttttctccacatccttgccagtgtttgttattgcctgtctttggataaaagccattttaactggggtgaaataatatctcactgcagtttttatctgcgttgctctgatgatcagtgatgttgaacatcttgtcacatgcctgtttgccatttgtatgtcttctattgagaaatgtctatttagatcttttgcccatttttaaatcagattatttgatttttttgtatagagttgtttgagctccttatatattctggttattcccttgtcagatgaatagtttgaaaagattttctctcattctctggattgtctcttcactttgttgatcgtttcctttgcagaagctttttaacatgatgagatcccatttgtccattgtcgctttggttgcctgtgcttttggagtattactcaagaaatctctgcccagaccactaccctggagattttccccaatgttttcttttagcagtttccttgtttgaggtcttagatttcagtctttaatccatttttatttttgtatatggtgggagacaagggtctagtttcattcttctgtatacggatattgaaaacttgatatccgtatacagaagaatgcctttaaaaatgtttgcatttttgctgtgaaaattacgtaatcacagaacaaactaatgaaatatcaggattactttgtacaagaagatacaaaagtgaaactgataaacttaagtaaatggcaccatttattgaagagactgtcatttccccagtgtaagtccttcacacctttgtcaaaaatgaaattcctgtaaatgtacggatttgtatctgagtttttaattctgctccataggtccatgtgattgtttttacgccagtaccatgatggtttggttacaattgctctgtagtataatttgaagtcaggtaatgtaattcctccagttttattatttttgctcaggataactttggctattctgggtcttttgtggttccacataaattttaaggttgtttttttctatttctgtgaagaatgtcattggtattttgatagggattgcactgaatctgcagattggtttgggtagtatggacattttaacaatattgattattccaatccatgaacatagggtatctttctgtttttttgtgtcttcttcaatttctttcattaatgttttatagttttcattatagagatctttcacttctttggttaattcctaggtattttattttatttgtagcaattggaaatgagattactttcttgatttctttttcagattgtttgctgttggcatatagacatgttactgatttttgtatgttgattttgtaccctgcatctttactgaatttgtttatctgttttaataggtttttgggggagtctttaggtatttccaatataagatcatagcatctttaaacaagcataatttgacttcttcctttccaatttcgatgccctttatttctttctcttgcctgactgctctagctaggacttccaatactatgctgaataacagcggtgaaagtggtcaaccttgttgtattccagatcttaaaggaaaggctttcagtttttccccatccagtacaatactagctatgggtctgtcatatatgaattttattatgttgaggactgttactttgatacccagttttttttagggtttttatcataaagggatgttgaattttatcaaatgcttttccagcattaattgaaatgatcatacagtttttgtccaccattgtgttatgatttatcacatggattgatttgcatctgttgaaccatccttgcatccctgggataaatcctagttggtcatgatgaatgatctttttaatatattgttgaattctgcttgcaagtattttgctgaggatttttgcattaatgttcatcagggatactggcctgtagttttctttctttgatgtatctttgtctggttttggtatcagggtaatactggcctcgcagaatgactttgaaaatattcctccctcctctatttttttgaatagtttgagtaagattggtattagttattatttaaatgtttagtaaaattcatcagtgaagccatcaggtccagggctttcctttgctgggagactttttataaataaaattctgtgataaaattttgttataattttgcatctctaaaataattttagatatattgaaaaatctttctataattttaattatgtaaaccttgaaagagataaaatgcaatctctgatttatctaagcattttcaacttactctaaaattaaatcttgaatgttttatttatgaaatccaataatacccagggatttgtagctgattgattgagggttttaacatctttaaaaataattgagcactactgacatgtcattttgtgaaataattattcttttcaaaatctacctaaaaatcacagcacagtttaatctacatataatggtctatattatcttgccatgacacaggattgttttaggtctcaggaaaactattctggtattaattttttatcagtctaagtcaatttgaggattatatatctaatgcaaatcataaatctgctctaatcttttagtttacaaaggtcatattcatttattgttttacctacaaaaatacactaagaccggatttactatggtgcaaacatcatttcaggttggaaacttatgcctttaaaattttttgtattttttgatatgaaaattatataatcataaaataaacttcatgaaatattgggaacactttgaacaagaagaaaatacaaaagtgaaactgataaacttaagtaaatagtttttcaatctacatactttccacatcccatagcaaactgaaatctatataatattctaatgtccagaatttagtacaatttggttaatgaaagcattcctctatgtaaaataatgggaaaacccattatcacaagttgaatttagcaataagatgtaatttattatgaatttctagttcttgtttaagatgtgagtttcagattgcttattataaactaattaaataaaagaatgccatagatgtaccaatactgacaatgtgtcaaggaatcaaagattataattaatgaattctatgtacctaacttttttttttcttttgagatggagtctcgctctgtcgcccaggctggagtgcagtggcgtgatcttggctcactgcaagctctgcctcccgagttcacgccattctcctgcctcagcctcccaagtagctgggactgcaggtgcccaccaacacgcccatctaattttgtgtgtgtgtgtgtatttttagtagagtcgggctttcaccatgttagccaggatggtcttgatctcctgacttcatgatccacccgcctcagcctcccaaagtactcggattacaggcatgagccaccgcgcttggcccctaaaatctttttttaaagaagataaaatatggggatggtttgatttgaaatacatttacaatgagaaattttaatacaaatgtttcctaatcagcaaatctaagacaaaaagaaaaaatgtagtgaatatcagaagaggatgcaatataaaaatatcattagatatcattcaaataatcatgaacaagtcataggacatgaaatagtcatttgaaaaatagcagaggaagaaagaagaggttaaagcctgacaaggtcaagagcagaaggcagaggaggaggtcttcaagggaagaccatggcaacttacccaggactaggaaaggttgaaggccctagaacaataagtgaacacggaatgcataatttatatatcatactcccttctcctaacacagctccctggaataaatgcaacagtctccacttatccatggtttcgctttcctctgtttcagttacctacactcgaatgcagtccaaaaataggtgagcacaatacaataagatattttgaaagaaagagggaaattactttcacacaatttttgttacattatattgttataattgttctattttattattagctattgctgttaatctcatactgtacctaactgataaactaaatttaatcatcagtgtgtatgtataggaaaagacagagcatatataggttttagtactatcagctgtttcaggcagcctctgggggtcttggaatgtattcctcaagattaagggggattgctatatttaatactgagtcagttcctcactgaatatagagtctactcagacaccttagggaaacaggcaacttacagaaagtaaaagccatagtttcttggtcccactccaaacctaccactcaaaagctaccaagtcatatttacctttacagacaatctcacacctactacgccttagagaatcttcccagtccccaaaattctccccaattgttctctagtgtcttaagttacatgaaaattctctaacttgagaaaaagactttcattccataattagaaataacaggccaggaattggagacaagatagcaacaaaactttattcacactggattttgttctgccaacaaataagcataaaaaaccaatagattattttctgctttgatagacagggccggagaacaggagaacactaggctcctcctgtctctggccctttccatagaaagaagaaaaatttgcaagaaaaatttccatagagaaaagaaaaagatgcaagaaaaaaggttgtagctaactttagagatccatgtgctataagttcatgacatgtgagacgaggcatcacaataagatctttccacagtttggcaggacattatcactgaatgtctatctacccttgaacaactcagtgtaaacagtcctatgtcaatggcaaaaattgttactagagaaattcagtttttcttccatgttgatagttcattggtttgactaaataatataaagaaaaaaattaatcttaagaatctaatcttcaaacataatcttacctgtcctatgaggtaattttagaacaaagggcttcatatcaaccacaaagtgatcaaattctgcatccagcttctcccatttttcttcttcacttcccacttccataatccaatctgtaaaagattttaaatcaaaatattaaggatttgtatgctgaaaactacaaaactctgatgagaaagataaaaaaaactcttaagtgttagatatcagttctccccaaattgacctgtagatttaatgcaactcccatcaaaacccagccgtattatttgtagagataagcttaattctaaaatttacatgaaaaagtaaaggaactaaagagcccaaacaattttgagaaagtacaaagttggagaactcacattaccagattttaagatgtactccaaagccacagtagtcaagacaattggtattggtgaaaggatagacagatcagtggaaaagattagagagtccagaaaccagaccaaaacaaacataaacaactgattttcaacaaaggtgtgatccatgaagaaatgacagttattacaacaaatgatgtcataacaattggatatccatatacaaaaaaaaaagaacttcaacctaaacttcatcctgtatataaaaattaactcaatatgaatcacagacctaagtgtaaaaatgtaaaactatacaactcttacaagaaagcatgggaggaaatctttgcaaacttgagtaaggctaagatttcttatatacaacattaaaagcactatccacaaaaggaaaaactgaccaggcatgatagctcatgcctgtaatcccagaactttgggagtcccaggcaggaggaatgcttgagctcaggagttaaagaccaccctgggcaatttggtgagaccccatctctacaaaacaaaaaaaaaattaaaaattagccaggtgtagtggcacgtacctgtagtcccagctacttgggatgctgaggtgggagaattgtttgaaagtgtgagaggtaaaggctgcagtgggccatgatcgcaccactaaactctagcctcggtgacagagcaagaccctatctcaaaaataaaaaagaaagctgacatattgaacttcacaaaaaaaaactgtcctgcaaaggacgttgttaaggaattgagaagataagccacagaccagaacaaaatatttgcaaatcatacatctcatacgagacttgtatcaagaatacataaggactctcaaaattcaacaatcagaaaacaaactaccccgataatcagcaaaaaaaattagtccctttaccaaagaagaaatacagatggcaagtaagcacatgacaagatgctcaatatcattacagaaatgcaaattaaaactatactgagataccactaacattaaaaatgcaaacaataccaagtgctggtgaggatggacaacaacagaaactctcatgcattgctggtagaaatacaaaatagtacaggcactctggaaaacagtttggcagtttcttacaaaaataaacatacactcagcctatgacccagaaatcccactcccaagtatttagctaagtgaaaagaaaaatctatatacacaaaaaaatccaaatgtgattttttttaaataaccaccaaacaactgaaaacagcccaaatgtccctcaaatggtgactagataaactgtggcatatccacacaataacatagtactcagcaacagaaaggaatgaactgctgatacacacaaaacatggaaacttcaaatccttatgctaagtgaaagaagcccttctcaaaaggctgcatactaattccatttgtgtgacattctagaaaaggcaaacaatataggcataaagaacagatcagcagctcatggggatagcagtgggggcagagtctcaacacaaagggatggcacaaagaaacgatttggcatgttggaatttttctgtacactatctatgtaggaagttataagaacctacagtggcaagaactatatgccaaaaaaagtgcatttgctgtatataagttaaaaaaaattttttttgagacagagtcttgctctgttctccaggctatggagtgcaatggcacaatcttggctcactgcaacctccgcctcctgggttcaagtgattctcctgcctcagactcctgagtagctgggattacaggcacacaccaccatgcccggctaacttttctatttttagtagagatggggtttcaccatgttggtcaggctggtctcgaactcctgacctcgtgatccatccacctcagcctcccaaagtgctggcattacaggcatgagccactgcgccccgccaaatttaaactttttaatcctttttaaaaactgtaaaatattggtcatcatacttccttctaattaacaagaaaaacactgaatacaaagggggtgaatcccaaaaatcaaaagtgtaggttttgacaaaatttgttaagttaaaaatacatacacacactacatgttcctttaaactgtgaaatgtcctgatagggatgtgcgctacctttacattatgaatagtgccaatttgtcatttattccatttacaaattctatattcggtgaaaagctttgttctgcctcataagctatcttgctccacaaactgccctctatctgctaaaccagcttctaatatttaccacattatcaaatggtttccatcatttcatcattaacaacctcttcatagaaagttctctctaccctgtctctgtaagtaaatcgtagcttttacttgctgactttactttcctcagtcattagaggtaagccaaggtctctcataatctctctcattctctctctctctctctctctccccacccgctctctcatgcatcctctgtagtctttcactttctccactcaaccatgcaatggaaggaaaacacttaccaagatccatcctgccacttcccaactactgctcttcctccctcagccccaaaatccctcatgaggctcaacgctccaaccatctgactaccatgtactcccctttctcatctctgtcatcttgcaaagaaacccgtctgaaactagcctcttgtcctcttttttcttttcgtttcgtttatttctttcgttttttgagacagaatctcactttgtaacccaggctggagtgtagtggcacgatctcggctcactgcaacctccacctcccgggttcaagggattctcctgcctcagcctcccgagtaggcacccgccaccacgcccagataatttttcgtatttttagtagagacggcgtttcaccgtgttagccaggctggtcttgatctcctgacctcgtgatccgcctgcctcggcctcccaaagtgctgggattacaggcatgagccaccatgcccagctgcctcttgtcctcttaaatgctctcttcttattccactagatctttcctttctacttggcaaggctgcaatcccttgatgccctccttcatgctctacagggttgctgggaaaaaatggcactgccttatagtcagatggcttccaacattacctgaaccctcaggagtcttgctatttcctactccacaaagcaactttaaaacttttcccaaatatcctacagccccttgaataactccagcttctcctaactctcaatttaaaaatcataaatcttgcttcagggaaaaaataatagtcaggtggtaccaccccaagatgttattcctcccacctctcaacttacctctcagagaaaacactcttccacctctgctcctgtatcagacgcagtaactctccctctacctgtcctctatcaattgcctatttgctatgtaaaattttccatctccactcactccttcccctctgatggcagctgagaaatatctcaaaatctgcctgcttctctattctcactgccacgatctcagatagaggcctgcccaccacttaacttgaactactgtggcagcctcatcatctgtctccctactgtcagttttctctacttgagtccattttcctcacctgttccagaatgagtttcctaatgacaaagctaagtctatcacttcctgtttaaaaatctcccctcattctagcattccattcgccaaatccacttactttctccacttcatcaacttctatccagatctcaccccctgtatattacctcttctatctccatcatggtagcaaaaatctttcaaagttcaccagtgatccactaattgccaaatccaaagggctgtcttcagtttgcatcctatttgacatctccacagcatcttccacttctgacaactccctgctcctaagaaactcttctttgacttcagtggttccattcactgctggctcccctactgcctcagatcattccttctcggtctctcaatggctctggcttctccagtcaatatggactctccagtgctctttccttagtctccttttgatctgacttttcacactcgcatagtgattgtattcagtaccatcgcttcaagtattcgtttcatgccattcacccttaaattttatttcaaactccagcctctctttgcaactccagactcatttacaatagctcctggacctattcactaatgtcctgtttattatctagatttatatgtccaagaaaacaatccttgatgtttttctccataaatctatgatgtactctgcttgatgacatcatcatctacttcatctcccaagctagaagtttcaatgttcccatcctctgaacccccataaaccaatacatcaataaatgctgagaaatatctcaaaatctgcctgcttccctattctcactgccacgatctcagatagaggcctgcctaccacttatttgaactactgcggcagcctcatcatctgtctccctactgtcagttttctctacttgagtccattttcctcacctgctccagaatgagtttcctaatgacaaagctaagcctatagcttcctgtttaaaaatctctcgtgactgcctaaaacagaatactatccaaacccaaagttaggcatacaagtacctttgcatttaggcctgtctctcacaccacacacacaaacacacacacacacacacacacacacacacacacacacactttgcctaactacaccaacccacaaatgcccacttccctcttgccacaatgaactcctcaccatggtcaaacccccccccacccccgagcccttatctaatcccacccccttttcataggctattccctccacctggagtcaggtaaatgcagctcaaatgtcacctgagtgaagctggcccccccttgccctagactggctgttgctctgttctcagtgtaaactgttcacatctgtgtacagcatttatcatgctgtttttttttttttttacacatctgtgtattattatgcatacatcttccattatctgtgagaagctcctagaaggcagggaccatgatttacacatcttagtaagtacctagcttattacctggtactcatcattttttgtttggttggttttgttttacatgtatacaatatattccatcagttatgcacgtggtaacagaaggctatgataccagtgctggatgtgagatcataatgttgaaaagcaacaattcaaatagatgaacaaaccaatggaaaatcataaacccagagttttaaagcacagctctggcctagatgtactccggggcttaaagactatatactgcccacgtactcaaacatttgcctgagaacatctatagctaaagcaaaataaaaaagattcctcctaatcactaattctcaataaatcctttgacatgggcaggaaatgttagtgtttaacattagaggaaactaaaattcaaccattaaatgactaactcaaaatcatgaaatcaagcacaaagctcagattaaaattctgaaacctctagccctcagatttattatattggccatttacatataagtgagcaatatctccaactaattaaaaagtattttgaaggccaggcgcgttggctcacacctgtaatcccagcacgttgggaagctgaggcaggcggataacttgaggtcaggagttcaagaccagcctggccaacatggtgaaaccccgtctctactaaaaataccaaaaaaattagctgggcaaagtggcacacacctgtattcccagctactagggaggctgaagcaggagaatcgcttgaacccgggaggcggagtttgcagtgagctgagatggtgccactgcactcaacctgtgtgacacagcaaaactctgtctcaaaaaaaaaaaaaaaagtattttgaaaagtagaaaggcaattggaattgctatattgacatgcaatattgaagtatacatttaaaaaaaaaactaaagaatcaaagtaacatttggtaaaaactaaaaatctgcttcttcttatcccttaatttttctccaaaaaaataaagaaatggaaaaagaaacaaaaaaactaacatttcaaaccttcaaggaattattgctatacaaattacatcttattggccaggtgtggtggctcacatctgtaatccaaacacttcgggaggccaaggtgagtggatcatttgatcccaggagttcaagaccagcctgggcaacatagtgagaccctgtctctacaaaaaaatacaaaaattagccaagcatggtagcatgcatctgtagtcccagctactcgggagactgaggtgggaggatcacttgagcccaagaggtcaaggctgcaatgagccaagatcacaccactgcactccagcctgagcaataaagtgagaccctgtctcaaaaaacctgaaaatggaacgggtgcagtggctcacacctgtaatcccagcactttgggaggccgaggcgggagggtcacctgaggtcaggagttcgagacaagcctggccaattaaaaacacaaaaattagccgggcatggtggcaggcacctgtaatcccagctactcaggaagctgaggcaggagaatcgcttgaacctgggaggcagaggttgcagtgagctgaaatcatgccactgcactccagcctgggtgacaagagcaaagctccgtctcaaaaaaaaaaaaattgaaaatgaaaaataaataatttaaaaacaaattacatcatattcacaaattgtatctaagttccaacttatcaaaagtttcataccatttatcagaattgaaaatttaaattactggaattgaaaaataagtaaagcaacatctttggcttaggcttagagtaattatagtgtgcctatcagttatataaattatttcaaaggtaacccaggtgacggacgttgcagtgagcgtgagctgagtttgcaccactgcactccagcctgggccacagagcaagactgtctcaaaaaaataaataattccaaaggtaaaaaagaagtaaattgggtgactcttgcttatagctacaatctatatttggatcatgtcttttattaaactcacccatgctgcctttttttaaacttctttttggacagctacaaaatgggcttacctaccctacagtcagcaaacataaccaaaccacaagtattaaaaggtctgggaaaaaaaggagtcacaactgccaagcaaagaatacacttcattcatatcacactccttgccaaacaaaacaaacgttcttggaagttgtgtaaaacccattttgttcaatcaaatcatattttaaatatattgtgggtcattaaagaaaactggaaacgtcgacaaattaaaaaggattagaggtgcacgttttctctggcttacacgtgtggatgttttgacaagagccttccctgactctacccgtagctcagtgtgtgctttagaaacaaatctcagtttattctctggcccggccctaccatttccgcaccatttccatggtcatttcacagaggaagaaggaagctgaggcttaagtgaggtgaagtcactgacctaggttcttagtggacagtgacagctgggcctgaacactgcacaaattattaataccatgcattccactaagctgcagcctgaccactgtggagaggctcatggaatttaatgtgccttttctatcttattttgactcatcttaaaatattaaaaacaaataaaagtagccgtgcaatgatcagaaaagctgttcacatttacttatgtcgttctcttgaacacttaaaaataattaactcagaaacacagggtagcatcctacatgcggcggtgctgggcttgggcctctccaagcggcctatgactttctgcaaaccaaccagcgccctggttctgtccccgcaaatccagctgattgttctgagactcttttctgggacggaattgaaaactccagcggtgccgttcctggcagtcccttcctcggcccgccgaggcccaggcccaggccgcgctcctaccttgtccaggacacagatttcctctcccagtcgcaaacccttgggtcagactcttggaccacgtcagaccgatcaaaccggctgatcaaactttacttagaactttcccaagtcgtcccggcctggatcgcgctctgcctgccggggacaccacagcgggcagcgccgggaccccaggggcgcgcgccccccaggcccggagaacgggcccagggcctgagggcgacgccccttcccgaacgggcccgcaagggcggggcggcagccaccggcgcaaaattccactcaagaacctggtgggaggggcgggggaaggaaattcagaaaaaaacgagaacctggcaccaccacacgcaagctttccgctcggccgctgccgccaacgccgccgccaccgccgcccctgccaaacggtttcaaatccttgcgggccgctgggtcgccgccgcccagcagcccgggggcggggactttcgcgctcgcatttccccgccccctactccacccctctagcctgcggtgcggttgccatggcgacgttcccggcggcggcgaccaccggcgccccaggctgggggcggagacttccgcgcgggcatttctccacccacaggtggcggcgtgcgcgcggccccgttgccatggcgacgctcctgctggcccagcaaccgccagactcgcaccccagcttgtgggccccttggcgggtccccagtcgaagcttccgggataacccgaccacagtttgaatgctgctgccctcccgcatcccgcgcagagtcgcttatgatcaccttaggggccgtggcgaaaaaataagggcacagaaaatggggcggctggaggatgttcacaaaaggggtgatccgttatgtggacagacatcagagttgaatgggtctcaagtgaaaatttcctcactctctgatatatcaaaacccaagtcaaattcttcaaaaggttctttttaaaacctatctcactggaagtaaacaccaacagctagctcttccttgtctcaaagacaaatcatgctaaggaaaataaagggtacagaatgcttttaagaatgtttagttttcaaaagcatacttgaacatgtttataactagggaatgatatataatccagataattagtactgagaatcaaggatgcaaaatcaagcatgcaattgcaggaatttaaccagtcagttaatacattcaagatagataaactggccgggcggggtggctcacgtctgtaatcccagtactttgggaggccaaggtgggcggatcaggaggtcaggagatcgagaccatccgggctaacacggtgaaaccctgtctctcctaaaaatacaaaaaattagccaggcgtggtggcacacggctgtaatcccagttactcgggaggctgaggcaggagaattgcttgaacccgggaagcaaaggttgcagtgagccgagattgcgctactgcactctagcctgggcgacagagcgagactcaaaaaaaaaaaaaaagataaactaccctactccagcctcaggaggaggaggacattggtcaaaggaaacaaaatttaagttagattggaggaataagtctaagcgatctattttacaacgtggtgaccatagtaaatgataatgtattgtgttcttgaaaattgctaaaagagtacatcttaagtgttctcatcacaaaattaataagtatgtgaagcaacgcttatgttaattagcttgacttagtcatttcacaatgttgtgcataataaatatatgcaatttttagaatcataaactgcattgctgaaagaatatgaaatgaatttgacaaatggtgtctaaataaacatgaaaagaaaaatagaagataaataaatagaagataaatcaaagaaaaaatgtaacaagctcaagctcatctcagaggaaataactatagcagaaaaatataactgaaaatgaaaaatgtctttaaatatttcctctacttaggtgaaaataagatgagtagatctcccttcccgcttttaagaacaagctgattgtcatttttttcatttatatatatcattttcatttatatatttttcattcatatatacacacacatgcaaataaaaatattaagatatgcatagagagttttattatttatgttatatgtatataacatgaaagggataccagcttgagcctgagctgtgttcaccttagaactcaagcctacatgtcatgtttagacgactggtaggcaagtttcacttggaaactccttacctgagaaccaaggaacctcctagaaattaagtcatcctggctgagcatggtggctcatgcctgtaatcccagcacttcgggaggctgaggcaggtggatcatgaggtcaggagttcaagaccagcctggccaatatggtgaaaccccgtctctactaaaaatacaaaaattagcaggtgtggtggcagacgcctgtgatcccagctactcaggaggctgaggcaggagaaccgcttgaacccaggaggtggaggttgcagtgagccaagatcacgccactgcactctagcctgggtaacagagtgagactctatctcgaaaaaaaaaagaaaaagtaagtcatcctaaagagatctggttcaatggcaatatgcaaaattgaaggggaaagtgatgatgcatgaagcaaagtgttggccgtgagttgcccttcatgtagcatcttcctctttgtataagagagtgattcctaatcttacagtgtaaagaacttcctttgagaattttcttttttctttttttagaggcagagcctggctctgtcacctaggctggagtgcagtggcatgatcatagctcactacagcctccaactcctgagctcaagcaatcctcccacctcagcctcccaagtagctcagtcagagacagagcactatgatagggtagttccatcatacacagagcacccatgtgactcaccctggggacctctacaaatatttgggaagaaattgctgaactcagagcctattcaggaacctcaaggatgaagccaggtaaatattctcttgtcggccaggcgtggtggctcacgcctgtaatcccagcactttgggaggccgaggcaggcggatcacgaggtcaggagatcgagacccgcctggctaacacggtgaaaccccatctctactaaaaatacaaaaaagaaaattagcaggcgtggtggtgggcgcctgtagtcccagctacttgggaggctgaggcaggagaatggcatgaacccgggaggcagagcttgcagtgagtcaagatcgtgccactgcactccagcctgggcgacatagcgagactctgtctcaaaaaaaaaaatatatatatatatatatatatattctcttgtcactgttgtagtgtagctccaggcttatgtggcctaaaaaatgcagtgtcttataaatgttttatggccaaacacctatggtaatcaatgaattttccttctacgtctagttactgcataaagataataatcttccaactcaatgtacatttattgaacatcaggtatatgcaggcatattaagggaatgtttcctccactggaaatgctatgacactttgctcttcaccttagcttaaatatcagtacctcagagaggccttcactgattctcaaaccagcccttatttcctttcaaatcccctggttctcttttcttcattgcatttatcaaaatttgtcatcaaatattaattagtggaatctatttatttatttatttatttatttgagacggagtctcgctctgtcgtccagactggagtgcagtggtgtgatctcagctcactgcaacttccacctcccgggttcaaacaattctactgcttcagccttcagagtagctgggattacaggcgcgtgccaccacacccagctaattttttatatttttggtagagatggggtttcaccatgttggccaggctgatcttgaactcctgacctcaagtgatccacccacctctgcctcctaaagtgttgggattacaggtgtgagccactgcacccaacccaggtgtaatcttttaaaaatgcctatagtttccaaaagaatgaagacgatacctgttaggttcaccattgcacagacagcaccttgcagggtacctaccatatagaaacaatccataaatgttcactgaatcaccaaatgaatgaacattaattttcgtgcttttctctgcacatgtggtagaatatgaccaccctatgcataaagcttccagtctagaaacccggaagactaacttttctgaatataaatctcttgctacggagagtgaaactgagtgatctaatttgaatcaggtaagcacaattagtccaatgagatatggccaggagatagggcatcctattgtataaacatgactttcttagctcatctttgcactttggggagagggtttggggttattttctcagaggactgaactgatgggtaaacccaaatggttctaactacaacaaagattctggacttatgagaaaaaagataagtctctaccctccaaaaatttatgagatagtaggaggtaataagacaaataccaaataaccacatttcaactcagattatgtcacctggcttaaaaggtatataaataatgcagctgggcgcgatggctcacgcctataatcccagcactttgggaggccgaggtgggcggatcacaagctcaggagttcgagaccagactgaccaacatggtgaaacccccatctctactaaaaatacaaaaattagccaggcttggtggtgggcacctgtaatcccagctactcaggaagctgaggcaggagaattgcttgaacccaggaggcagacattgcagtgagccaagatcgcaccaccgcactgcagcctgggtgacagagtgagactctgtctcaaaaaaaaaaaaaaaagatataaatcacgttttgggatagagaggaaataaagaaaacaccgtgctgtgcttataaagtcagcataggaaaatatatacagaaccttgttttatctttgataaaaagagagtgacattgaaacactatttctattgaaaatattgtttcctaacagctacaaatgacttaaatgaaagtaggtttgtttcaaaaacaaatgacatcttatctcaatttttaaaaatcaaatggtgacattgttgataatggtagtacaaagaggaccctaaaaataattgtttttattttctgtgtgggaagataactgtgctatacttcccatgttgaaagggatctgcttattttcaaaatataaacttaagaattagtctagatgacattgaacaatgtgaattcaattattctctacagaaaaaatcaataggaaaatgtgagcttttattaattagaaagataattattcgtctgtaatttgaactaatctgtatcttgaaggattaaatctgatgatctgtatagatatgtatgtgtgtatatatatatatatatatatttttttttttttttttttgagacagagttttgctcttgttgcccaggctggagtgcaatggcgtgcttactgcaaactccgcctcccagcttcaagcgattctcctacctcagcctccccagtagctggaattacaggcatgtgccaccacacccgactaattttttgtatttttagtagagacagggtttctccatgttggtcgggctggtctcgaactcccgacctcaggtgatccacccgccttggcctcccaaagtgctgggattacaggcatgagctaccgcacccggccaatctgtataatttaaactcttgctccataaaattaaagtaactatagtgggagacctagagattaccgttgtttgtttaagccactgttatttgggttttttgttttgctgagggaagaagagcctgggcctgatggagccccagggaaatcactaccgctgccggtgtttgcaggtagcagggagccaggcctgggcgaggtgtgtctcgatgccagagctggtagtacagaaggtggtgggccatccccggtgctgctcagcgtggtggatcatttcaaccgaatcggcaaggttggaatccagaaatgcgtcattggtctgttttgggggtcatggcaaaagaaagtacttgatgtattgaacagttttgcagttccttttgatgaagatgacaaagacaattctatgtggtttttagaccatgattatttggaaaacatgtatggaatgtttaagaaagtcaatgccagagaaagaatagttggctggtaccacacaggcctgaaaatacacaagaatggcattaccatcaatgaactcatgaaaagatactatcctaactcggtattgatcattattgacgtgaatccaaaggacctagggctgcccacagaagcatacatttcagtggaagaaatccaagatgatggaactccaaccttgaaaacatttgaacatgtgaccagtgaaattggagcagagtaagctgaggaagttggagttgaacacttgttacgagacatcaaagacacaacacaacggtgggcactctgtcccagcggatcacaaaccgggtccatggtttgaagggaccgaactccaagcttctggatatcaggagctacctggaaaaagtagccacaggcaagctgcgcatcaaccaccagatcatctacgagctgcaggacgtcttcaacctgctgccagatgttagcctgcaggagcctattaaagccttttacctgaggaccaatgaccagatggtggtagtgtacttggcctcactgatccattctgtgggcctcactgatccattctgtggtcgccctgcacaacctcatcaacaacaagattgccaaccaggatggagacaagaaagaagggcaggagaaaaaagagagcaaaaagatagaaaagctgacaaggggaaagataaagataaggaaaagagtgatgtaaagaaagagcagaaaaagtaaaacgtgtattaaatagcttttttatgcctgtaatcccaacattttaggaggccagggcgagtggatcacccaaggtcgggagctcgagaccagcctgaccaacatggagaaaccccgtctccactaaaaatacaaaattcgctgggcatggtggcacatgcctgtaatccagctacccaggaggctgaggccagagaatcgcttgaacctgggaggcatagtttgaagtgagccaagatcacaccattgcactccagcctgggcaacaagagcgaaactccgtctcaaaaagataaataaataaaattaaaaattaaaagtaaaaagttttcatggtttcaaagtttcatttcccttataaggaaattgaaaaatactggaaagtttaaagaagaaaagacttatgtgcaatcctgccattaagtaataactactattaacatttgtatatatttactcaaatttttatatctatattatcatttttaatatctacttattatgtcatcatatggatatgataattttctcaattactctcctgtgtttaccaattcttgcccttataaataatgttgcaatgaatgcctttgattatatacatcttggttgaaattttagctctctccataaaagatattcttatgggcattataaaagcattaaggcttttgatcagtactgccaaatcacttactggaagtatttttcaaattgcaacttcactcaatggtctgtgcgaatgactgtctcacattaatggttttttagatctgtgctaattgtgtgtaaaaaaaaaaagcatccctttttactttgcatttttcactattagagaagttgaaatatttaaatatctctattagtcttttattcttctgcaaagtatctcttttgtcctttatctatttttgtggaactttatatatagttatatggatatattagacagatataagtatcttccatatttttaatttattgtttcaaaattagcaatatgcataagctaacattcaaagcaatcaaatttccgtgattcaccattttgcattattaagatactccatcattagagtgaaaaatgtaaatgacttttagctatctagatggaaaacaatttgtaaataccaagaattgtaattattatataaacacattagagacaaatatgaaaacaatcctgtacctggtaaattccttaaactgaatggtaagtaatgcagaactttctatttacagaccacagaagtatagattataccacaaatgaatgcattataggccaggcacagcggctcacgcctgtaatcctaacactgtgggaggccgaggaaggcagattacttgagcccaggagtttcagaccagcctaagcaacatagcgagaccctgtctctatttttttaatagaataaataaataaatacagtataaagattgcagaaactaagaatgaggaggcatattttctttttttcactactaagaaaagagtcactgcctttagcacagtgactttggatttcttccttatgctagaactaagcaatattcaccatttcattcctccttctgctgctttttctatcttagcctcttgggcaattcatgctataggatattaacagagataaactggctactctttctcccttcccttcagtgatatacatattgccataatgccctagccagtatccataaaaactagcaacctaggatacttccaagccttgaatatacaacaatcttttctaccaacttgtttcaggagtaggctgtaaaactccaactttagaatgcaaatatttccaggaagctactgggaaaaatcatagcttaactagcagtataaaaatggtacgaaagaaatcattctgaagtttagatatctggttctgtcatttattagctttgtgacctcggtaaactaagttacataatcttcctgagcttcagtttatttattttccttatgggatgattggggagattgaattaacagaggtgagatatgtagaaaaatgtacccagtgcctgacacaggaaacttcaatatgagggcttcttttctttcccaactgttttgccagcactttggaaaggaatagatgccactaggaggcagcaatggcacacaaagaactaattatcatgtgcacgtgcatgcgcagacacacacacacacacacacacacactcacatgcatacgcatgggcacatacacaaagcacacacactcaaaccacatacacaaatccacatgcatgccacacataccacatatatactcacactcacacaaaagcaacaaatatttgcacagcaaccacatacacacccacacacaggcatactggcacacacatgcacacagctcaagttgttttctttccttttctttctttcttttatctttttaatcttttattgagagattaaagcagggaatgatcctcaggttaatagataggaaatgtcactgaggaatagtacttattattaagtttggggcacaggaaagagatcctatatattgaaagattggtccatgtattagaaacgagagaattatgttataaacttcttgcagaaatatagcataagagatacgtgaaaacattgattcctttgcatttagaacgccgtcctgccataaaccaagagaaaaaagacggtcattgagaagcaccttcagggaccaacttgtcttggaagaagacctccctagccatgtgcatttatagagtgtatagttatatagttatatgcatttgtagagttacagttatatagtatagagttcatttagtctatgattgctaggtgagtaatattactttgggaagattcagttcaactgtgcaaaaatagaggatgggcggggcgcagtggctcacgcctgtaatctcagcactttgggaggccgaggcgggcggatcgtgaggtcaggagatcaagaccatcctggctaacacggtgaaaccccgtctctactaaaaatacaaaaaattagctgggcgtggtggcgggcacctgtagtcccagctactcgggaggctgaggcaggagaatggcgtgaacccgggaggcggagcttgcagtgagccgagattgcgccactgcattccagcctgggagacagagcgagactccatctcaaaaaaaaaaaaaaaaaagga

SEQ ID NO: 463 - DNA, 410306 bp, Homo sapiens
tggtaattagactgtgtgctgtaggaactggggagcagccagggttctggagcctcctagctttccaccagcagcgtggcctgaccactctctactcgccccaggtgcctcccatccgccgtttctctgccttggggctccactcctggctgacctcctggcatctggtcagatccatgcccattgccctctgctgctttatcttggtatctcttggcttaaatcctttatggatgggctaaatgcccaagagtgccttttcatggtggctactctacaggtgtctggtgggctgaggatggcccagccttggatgaagcggccttctcagctgacctgccccagcccaggggatggggacatcacacatgtaggcaccacctggaaggcacttgtcatggcagatacggtggcctttctgtccaggacaagcaacaattgtttttgtaataaggaggagagaacaaaagagagagtgcgagagagagagggagagcgagagagagagagagaccttgtagaagataaaagcaagagggagacattatttttcaggtatgtgggtgatcaagagattggtagtaacatagggttctgctaaaaaccaaacaacaacaaatcacagtgagcggaggtggagcccacattgtgtgggctgttcattaagaatgtcccgacgcagtgacaaacctgcaggcttttgtccaccctgtggcttaggcacggccctgtctgggggtggtgtgatggagcccaccttctctggaattctgctgcttctggaatcctctgaggccatctggggatctctgaagtggttctgtgcaagccccacttcacatggtccgggagctttcccagacggcaccttgttgggatgtgggcttgtcttggagggagaaggaagcatctggaatcagtggggcaacagagtgctggcactcatttctgctacagatgcaccagctcctggcttaagcaagagttagaattaaatctgaaaggcagcgtgagagtcaaaccctattcgattgccctggagaaactcaatacatggagagctctctcgtgtatcacttagaaagctcatccgtggatgtctgcagggcttcaggcaggactgagtaactctgtagcactgagtatctttgagcagtctggacacagtccacaggtaatgacggttgttctaagggggacggaaacgaaggaaaagagaatggactatctgcatgggagaaggggatgaacgtagtgggccacagggacgtctgagatgggctggggtagagggagggatgaatcagccatcaaggtgccctccctccctcaggtcctgggcaggaagtgtaccaggctcactgtgggcagacactccattcatttatgaatgatctgttgggaacctactgtgcgctggggctatctgttgagactctaccatgttctgggaaagtcagccagcacagcttcctcctgcctttcctggctctttctctccactgctgcctctctactctcttctggtcacaccctcacatctccctcttacatcagtttttcacaaaccacccaagcccaataagacttcacctggctggggtttaggatagagtctttctcagaagcatgttcagtttaatgggggacttctgaaaaccctagggccacaaaagccacagaaagggcaacataatggtggactttgggggagatctcagctcaagaggcccacagactgtgctgtaggaactggggagcagccaggtttctggagcctcctagctttccaccagtagcctggcctgaccactctctactcgccccaggtgcttcccgtctgccgtttctctgccttggggctccactcctggctgacctcctggcatctggtcagatccatgcccgttgccctctgcttctttatcttggtatctcttggcttaaatcctttatggatggactaagtgcccaagagtgccttttcatggtggctactctacaggtgtctggtgggctgaggatggcccagccttggatcaaacagccccctcagctgacctgccccagcccaggggatgggggcatcacacatataggtaccacctggaaggcactcgccgtggcagatacggtggcctttctgtccaggacaagcaacaattgtttttgtaataaggaggagagaacaaaagagagactgcgagagagagagggagagcgagagagagaaagagagagagagagagagagcttgtagaagataaaagctctctgcaccagagaggatgttcccatcctgcctccctcgcttcctgccttaactcattctacacacactgactgagcgccctccatgttctgggacctgattcagctactcttcctagtccactgtggtcttgtgaggtcagcgcttggtcaagattaggagaaaaactgcagggctgcagagacctctctgtccaacatctccctacgtgggcactactctgctgtgagctctgggtggacaccaggcatgatttacaatccctttcagggaattattgctgctaatgggcagagccaatttatgcttcccaagggggagggcaaaatcaattaatggagagcctgacatggccaggcctgatgacagagtgtggcctgacatccggaggtgataagggactttctgaggctgaactaataaggagattggggaaaaagaagaaaaacaacaccccctccccatctgcccaatcgatttggtgtacaatgggcagagaatgcagagtaaacagagcagctgggcacgagcctctttccatctgaacgagcctggagataaggactggacaggccgcccatcccaccatcaacataggtattcgctatggagcccctcaatagacatatccatatgggtgaaaaaggacactttccaaaccagaacacaggggagaagataaggcccacctgccccaggtgtgtgccttgtagtagaaagggcaagtggagacagagagcactggttttagatgccagctccctaactgtgccccccagatagtttgcaccacgtggctggagcggcaagctttcgatgtgggagcctgggctcccggagtctcccccacagcgtcctacgtggaggcggcggtggcgcgggtttgtaggggtctttgtgtgtcctcgtgagtatgatctcagaggtgggccagctcgtgctgtgaccagcagacagaccagggaaagctgaagggtgattcaaggtaaagccttgaaacagacaaacaaacacacctgttactaattttgctcagaaactgcatctttcttttttttaaggagcaggattcctcttgcacatgaaatctttcccagagccccaatctgaagcctacttaagagtggagctctggttgaagtaggggcagagggctcccatttccaccagcccagagagtgtgatttcaagagcccttacccgtaattctgaaatggatgcccttgtctaagttggacttccctcagcgcaggtcccaagacacaatgcgggtgtgcgtggttcatctgggacctgatccaggatgcgcaagcaggggagtggggaacagaaggcagtcgattcagggtgtgttttcgcacaggtgactgttgcgggcaactggggccccatcccgctggggacctctgggagactgtgcagaacacactgtagagttgttccacagagtggcaaggaagctggggtgtttatctaccaactcttgtcccttgttaattgaagattgctcctggggaggttaactcctgcactgccagcctgccctgcctgtgggctgagagcactcctgcggccagagagtccctgtgggtagaaagatgcaggtgcttaggacagaatgctactggtatagatggaggctttccacaagtgctgcatgtgacctccaggcgggctggggggatctggcagagtactgacactgtctgtcacaggctctagttctccactcctttgtctgggtcactgtggttttgtcattcctgcagggaaattgctcttctgtgaaccttaatgaaggggtggtcagcttgtcctggcatattaggccggtgcccttggaagcatgacaagagtgggaagaccataccctcatctcttgatggccactcaaattgaaaaaagaaattgtttttattgatttatttattttgagatggagtctcactctgtcgcccaggctggagtgcagtggcgcgatctcagctcactgcaacctctgcctcccgggttcaagcagttctctgccttagcctcccaagtagctgggattataggcagccgccaccatgcctggctaatttttgtattttaagtagagatggggtttcaccatcttgtccaggctggtcttgaactcctgacctcatgatccaccctcctcagcctcccaaagtgctgggattacaggcgtgagccactgtgcccggccatgaaagatattgttaaaagatctgctggccatcccctgttaatgaatctccctacatcccctcacctcttcagactataagaaaaacccatagctttgagagtcattggagctgcagcagcagcaagaagcctgggctgctgtgagccaggatgtagatgaggggtgccgctgagacagggaggagcagagcgtccccagggcctgggagagatactgagcccagaaaccagaggagagacagggccagctgctcttggtgtgtgagggtcctggcaaatatttttttgtggatggacccctgtgtgtataaacaatttgatgaaaaaaacttagtaccaaattcatgagcccatgtgaggtataatgattgatttgtgtagatttagaataatgacagagaagaggcacttaggcatttgtttattgtctaattggttcacatgacgattctttgtcctatgatgttaagagtccatcaaatcagcatgttagcgcaggtctggtggcccaatcccaggtagtgccataaaagaaatgccacaccagccagcgggaatgatctcctcatcaggctgctttcctggaaccagggactgactaggaagccctaaaacagcttcataggcataagtcctagagcaccttgggacatctggtcaaccctatgcatgcactggagaacttcctgaaagaagaaaagggaactgagacccacatgaggcctggactatgttaggggtggcctgcatggatgacgttgttggtcatggctggtcccagcaccagagggagacttagaaagtttttagcaaagcatgtcaaagcacaggttacccccaaaacatggggctgaaggcatggggactgcttgcctcagtctaaagacagtgatggaaaagacaaacccaggagatgtttcggagaaaagaaaacaacaacatcccacacctggggccagaaggggaggggtgctggcctggggaggggctgccctcctgagatcaggagctgagtgaatggagagggaagagtaccagctggcatgctgcttgctctttgctgagttccctctcagtgtgggtgaaactggctcagccctgctggctggcacgaggccatggaaaacccaaataaagcagttaactctgaaaaggttgctgcttcctcctattccttgggagatgcattcagggctacactcagaggccacttttcgcaaggtgaggaggagcttgtattcaaggaaacactgctttttcctcccacatttgacacatatgttttcaacatccaacattcacagccaacctctctacacctgctctgcctcggagccctggcagtccctggacacgtgttatggaaggaacactgtctcccccacatgctcacatggcccaaatccccacaagtcccctttttgccaagctccacgtcctttgcctcttcccatcacccaatacccaacctgccatcattgtcctaagcttcccttccctgcttctctctttgcaccttgccgggttctcacactcccacccaccttgatagtgagtccaagcccatcctaccccacccccaactccttcttctttttctgagacagggtcttgctctgtcatccaggctggagtgcagtggtgtgatcacagctcactgcagccttaacctcctgggttcaaggatcctcccacctcagcctcccgagtagctgagactacaggcgcttgctaccatgcccagctaaccccaactccttcttaatcagattgtcttgcttacttgtttattgtccctctctttttttttttttcagagaaggagtctcgctcttgttgcccaggttggagtgcagtggcacgatctcagctcactgcaaactctgcctccagggttcaagtgattgtcctgcctcagcctccagagtagctgggattacaggtgcgcaccaccacacccagctaatttttgtatttttagtagcgatggggtttcgccatgttggccaggttggtctcaaactcctgacctcgtgatccgccagcctcagtctcccaaagtgttgggattacaggcgtgagccaccatgcctggcttgtccctctccttcgttagaaggttccaagaatgctggcactttctctgtctctgtcacctctgactcctcagaacttagcacaatggatggcacatccttgtcaaaacaatgaccagatgaatgagacatgcttatgtttaaggaattacaaggagcattttttctgcctagatttgaaacacacacccattgcattttaaaaaatgtttctgtctatttactctatcaactgtgccatgcctggggctgtttctatttgttttttcttttttttttttttgagacagagtttcactcttgttgcccaagctggagtgcaatggcacaatttcggctcactgtaacctctgcctcctgggctcaagcaattctcctgcctcagcctctgagtagctgggattacaggtacgcaacaccatgcccggctattttttgtatttttagtagagacggggtttccccatgttgaacaggctgttcttgaactcctgacctcaggtgatcctcctgcctcggcctcccaaagtgctgggattataggagtgagccaccacacccggcctctatttctattgatggttttttctcctctcatggcccatattttcctgcttctttgcatgcctgattattttttaatggacaccagacattgtggattctatattgttggatgctggtttctttttggtttgtttttcatattcctttagatattttgaagctttgttttgggactcattgaagttacttggaaacttactggaaacaatttgactcctttggggctggctttttaagctttgttaggtgggaccagagcaatctatcatctaggactaatttggccccacttctgaggcagtaccttatgtgtctctatacaatgactgttttgggaggtttctccactctggctgttggaaacatgaactcttcccaacacagtgttatctcaggaaattattccacctgcttcctcctggtggttctttcccctgccttgggtaatttcttcacatgcagatgttgatcggtagttagctgaagactcaagggtaaccctctgaagatctccagagcatgctctctctctttctctctcttttttctcctctctctctccttctctctctctcatccctgggactctgccttgcaaatttaagccactttgtcctccctggattcccagctccatttcctcaactcagggaaaccactgggctctacctggttcccccttcctgggctgcagcctgaaaactcactgcaggcagtaagttggagcaatcatagggctcccctcacttgtttcccttctcttgcggatcaatcataccctatattgcttgttatccaatggctgaaaaccattggtttgtatagaggattttgtctcatttttagtcatttaaagcaggagggtaaatcaggtccttgttgcttcatcatggctgtaggtggtggtcctgcttttccatatacaggatgctctcagtgcctttccacaggctgcatggagagacaatgaactctgcactgagaaatcctagatccagtcatatactgtctctgggttccaatttctgtgccagtctgctattgctacaattaatgctatataacaaaccactctaaacctcagtggtttatgacaagcagcatatattctcatgccaataggtctttgggtgagccatagttcagctgatctgggctgggcttgcctgggaggctctgctccaggctgtagactgggctcaggtctgctctctggatgttccaggctgaaggggcagcagctacccatggcatgttcatcccaagagagatcactggagcaagaggcaagctcaaccatgagagcacaattcaagcctctgcctggatcaggtttgccaacaccacattagtcaaagtgggccatgacaaagctttggatgtgtaattctatactggtggtgaagaattaaaatgatgtattcagtataccacaatttctctatctgctttctaaaactcctttttagcaagatctgggcaagctacattttaacttccctcctccaacctccgtccaccctacttcttgtcaagggattggtagagccagttgaattctagcagggactgggctggagtcactggctaggctgctttccagaaaatgtttttgaaaatcccacattttggcctagagtgaactcagatacttcttgtcatccgtggctccactgatcccaggtggattgctggaaagtcttttcaaaacattgcatcaatttctcccatttgcagaggccagtgaactctgggaaggtgcactgctgtcaagcatgtgtccatatcaaaggctgggcttccattaggggatgttcggagcaaaaggccccttggccagttgctgcacacactttgcatatgctctggacaccagtggccccagatcccatgttgtgtgtttttctgtcttcatttcctttcctgtcttagtgattgccccaggaggctggttcacaccccgcatggggccatgccacacatctctgtcagtaaggcctttggatccaggagatgatgtctcagtgggagatctaatgttgaaagactctggcagggtatgtggctcatgcctgcaatcccagcactttgggaggccaaggcgggagcatcgcttaaggccaggaatttgagaccatcctgagccacacagtgagaccctgtctctacaaaaaatttaaaacgagctaggtgtggtggtgcatgcctgtagttccagctactttggaggctgaggtgagaggatcgcttgagcccaggagttggaggctgagtatggcttgagcccaggagttggaggctgactagtgaggtatggtcgcaccactgcaccccagcctggctgacagagaccccccccatctcaaaaaataaataaaagaaagtaaaaataaaagaaaataaaagttagtagactctacccagctctagagggctgagggcactaaggcatgccaagaatactgctgctgctacataggggactggggcaaatgccatgccatcttcagggctcttgagagtgtgtgtgtgtatgtgtgtgtgtgtgtgcagttacatgtgtgttccatggactcttggggaggcttctagaatcagaatttggtcttcctctggttctacagactttacagagggcttactatgttccattgaactgtgagggccaggagtggaccagagatgctggcccctgtcccgatgggattcagtcagagcctgggggaagtcagagtgacaccagcctgagaaacacatctgggttctggctcgtctactcatgaactgaaggaccgtttactgaacagcgactctgtgcttgggacacagcaatgagcaagacaaacaggtccctgttgcattggagctcttagtattatggggggttgcaggtatttcaaaaataggcaagttcggaaggataacatgtcagatagtgatgcagaaaaaatggtaatgggataggggataactagggggtgactcgagatggagtggtcaggggaagccccctgaagaggggacatttgtcagtggcatagaacagcaagctgaatctccccttcactctggccttctaattatataaaataggggtgtggattagaggagctcgatgggcctgcctagcttagaaatgtaatggtttaatcttctcctgcatgatcctgttacccagtcctaaaaaacgaaaaagaaaatcaagccaattatactatattaccactctgctcccctccagggtcatcaggtcctgtatttataggacagagacaccaggagcagtggaccagcacttttatccagttagcttcatttccaggtgccactcctgctcaccctccgctgcccctccctggctgcagctgggttggaaccccctggcccagggggcagttcttcaagaacctccttgagggctgcccaccttcccttggatctgtcatggagagggcccatggagacaagacccccaggcagctatgtttttccctgtggaagtggggagtgtcagcccaaatcctcccaagtggctgggtgaaggttgtgaggcccaaggtacccacactgccctctctcaagctctcagcagagcccctgggagctgcccactgttctctgggtgctatgatgtccttagaccctgcagggcagatggctccctggagacacagctgttcaggcactgcctccaggtcatcctggccaagaggctgatggtgaaagatgtggtctgggagatcaggattggccttcaggatgccctgcattccactgccttgcctgtggctgggacatcctgcctggacctgtcatggccatttctgggcttccaaaccagagcacgggccaagggagagagctggcaaatcgttaaaaataaaaatattccccccacattccactggtgtgagcatcctctgacattatattttgatggtgctatttcacattctcaaaagcttataaagatctacacaaaacgtcactacaacagtgagctgaagccttcaccctgcccctagcactctggccttgcctggccctgccagcagctccagcaaccacaggaaggatgttgtggtcagccccagccccagcctctcggtggcctccaggtcagcatccttaaagaaacacagtcccctccatgggaatcaaagtcactagttgctcccagcagcccatagttcacttctgaagccagagcaagtgaggggcgctgccttcatctgtgcttcattcttgctggcataattcatggatggatatttcctggaaattcaattgcttcccaaacctgaaagggagacaggatgcttttggttaggctgtgcatgcagacactgacttttcccaggattgaatcggggggaggggaggccaccagccactccccctgggtcttgggcactgcatctgtgtcttgcctcccaggagctgcatttataccccaagctctgaaggaagaggccccctttgccctttgcagaagctccatctccctaggctgagactgacgcctgttttcctaccccaccgttttctttccttttctttctttcttttttttgatggagtctcgctctgtcaccgaggctggagtcttgtcttttccttccttcctttcttctgtccttccttcccttccttccctttcttccctttcttccctttctcttctttctttctttttctttctctttcttctctttcattctttctctctttctctccccttctttccttcctttcttccctccctccctcccttccttcctttcttttccttccttcctttttctttctttctttctttctctttcctttctttccttctttcctttctttcttctttcttctctttctttctttctttcctccttccttccttcctttctctttcttttctttctttccttccttctttctttctttctttctttctttctttctttctttctttctttctttctttctttctttctttttctttcttttctttccctccctccctccagcctcccctcccttcccctcttccttccttccttccttctttctttttctttcttttctttctggacggagtcttgctctgttacccaggctggagtgcagtggcacaatctcggctcactgcaacctctgcctccggggttcaagtgattctcctgcctcagcctcccaagtatctggaattacaggcacccaccaccacgtctggctaatttttgtatttttactagagatggggtttcaccatgttgtccaggctggtctcaaattcctgagcttaagtgatccttcacctcagcctcccaaagtgctgggattacaggtgtgagctaccacacctggacaaccccatggttttcattgatgctcctacctaatcctcagattctctccttgctttttcctccagatattaattatattccaggatggctcctcctgaccatgtggcccctatcctgtcatctcccatggctgggcatggagagggttctctggattgagaaccagggcccttgcgttctagccaggacagtccccaacccacggtgtgactttgggcaagtcatgtcagttctctgggcctaacatttctctttgctggagcagatgagatacctggaaaaagcaaggtggcttcttgcttcacaaaatgtggtccatggaccagcagtgctggcatttccagggagcttgttaagaaaggcagagtctaagacatggtccaccctggacttactggatcagaatctacagtttgacaaaacctgtcgattcattagcacattaaaatgtgagaactggtaagagtgatatgcagttattttgcttaaagtttggctaatttagtaagagcaagagagaatttctgagattcttggatgaagtaataaatacaatgtttaaaaaaatttcagtggacagagagcctgaggggtgaggctgctcagggaacaggtgagcaggcagctgcagccctccaggttcggccacaggaacctggtactgggtgacgagtgttagcttggttggcttgatattgctgtggaagaaagggtaattcttggtgatacattgaatggccagctagtgcggaggaagagattggaaataattcacggctgtgagcccttggtctttcagttctaattctgtgtgcaagacctctggcaggccttgctgtttaattaaacaaatatggtccttatttttaagacattctgatctgtctgaattgaattctagaacgggaagtaagaagacaagtacaccgagcctatgatggtcatgtgttcctgtcactctggacttgtggttcccagctctgctacacaacggaaatctctggagaatctctagacatcctggtgcccagaccacagcccagaaccattcagtcaggatcactggggtgggtccaggtgattctgaggcatggccatggctgaaactcactgcttttgtctctctagtacaaggactggcagggcaagagctgggggcccgtgggcacgtggctgctgatgagatctgggctctgatgtttctgctgcactgttgaaatgcagcctgggccaggattgtgaacgctgccggtggtagggagcatggagtctgagccatctcccacccaggatggtctctgagcccctcacacacttgcatgcagtaatgacagggggtgggtggggtggggcctgggaagaaatgctacagaataggggggagagcacgctctgccccaagacatagctccttacatgcacagacctcaacacaaaaggcaccatttcaaactcattcactttatgggccccagttaagtgatgaagctctgtctgtattggggttttgattaccgtgggctcccagaaaggagggcacactacagatgtaccattaagaaaaagcaaaatcacacctcatggtgttgggccagctctcaccacagaggccacttccctgttaataattccttggtgcttgggagttgataagggactttaatggagattatctgggaaaggatcagagcctgggcaagggtggaatctgtacatgacagacagtgagagggaggcttggggaggtgacctgcccagtgtcacgcagagcagagatggccttggaatttccgccttttccctcccagctcggggctctttctctttccctgggagggtttctgaacacagaagagagctggagggtttctctgagtggggctggagggctgggagaggcaggacctcttcctaacacctcttggagaagacagacttgtggttatgggggtcgcaccatggttcctttccagatgggaatacttccaaactcagggattaagcaagattaaaaacaaaaaggccctctagaaaggggttaacctcatttcctcagacataaaaactgtccttggcagttggaaacagcagagttgactccacggatgactgatgccccttacgggtgttatatacctgtccacgcctgcccctggcagggatttaaacattccatgctgttccatgaatcctaaatcaaatagattcatcctggcccttggtgaagcctaagagctggcgaggcttatgttaaattgccctctctgggctcctgctcctgagctgacagtcacaaattccccttaatgagcactcctgaagtaaccaaggcagcgctgtgagctaaattaagattcgagagcccaggcagggagagggaggtgtttgctttggctgagaaggtgcctgggccccggcctgtgtgtttgcctgggtgccctgataagtgggctgcatattaagtgccacatggtgggaccagaaccatctgctgtatgtctgagaggtcacgcctgctggccctttgggacctggtggcagagggaccccgtgtcaacctgtctttggcttcctttgtggccccgtggtcactgaaaagccagaatgaatattcttcctttcggaataaaaattgagctgtggaagttttgtttgctttgatgaattacttccaggctgctgtttatttggagagcaaagctccccagctgcagggtgggtagaggctgcggtcactcccctcgtcaatgctggttcctgttcctgaggccgagagaactcctgacagcagagtgggcatatcttggtagttgcagcttttcaagacagtgtggcccagtggggagagagcagaaaacctgggttatgctggctctgccatttatcagctgtgtaaccttgggcaagtgatacaacctctgtgtgcctcagtttcctttcctcacctgtccacaggggatcataatcttggccctgcatgccttacaggagcgttaagagcatcaaatgaaacaataaaaatgaaaacatttataaatggtagtttgccatacatattttaataaaagtgcctgcccttcaatccagctctctgcactgcctggggacagtgttagcaggaggacaccactctgacagggacctggacttccgcctcttctgtttggagagagttagatgatcacatctcttatatgtacaaaagcttagtgaatgtaacttaaagatattgcttgcttgtaggcttcttgaggggaggaatgatggttggtttctatggatttgttacaggggaagggatatctcagctcaaaggatatcctgcgtatccaagccttcctccacttgtgccccacacactgtcccctctactttctcaaggaagtttttcctgcagctctgctcccctctcccaccacagcatcagtttccctctctatgcatgtttcagcacgtgagcatgtcttaaagcatccctctgggctcctgcttccctttagctccagcccagttctctgctcctgtcactgctcaaccccctggaggggttgtatctgctcactgcctcagcctctttcccttccaccctctccccagccactcccagtcccctggctaaatggtgcttgtccatgatcaccctgacatgcaaaatggccagtggtccacattccatcctgccacactctactggcccgtctccccttggagcttgtgcttctccagcttgtgcttctccagcttgtgcctgaggccatacccacttatctgctgttccttttcgcaccctggcagtgccttctcagcatctctgcttcctctctctccgcaactgttggagaaccccagggggctgttctcagcaatttgaatacctccatctctggtcttcagaggacattgtactcagtcctgtggcttcagacaccaaccagacatgatgacttgcatatttctttttctagcttagactttctctctgagctccactgatgctcacctgtctactcgacacctcctcttggacatcaaatgtcatctgaaacttcaaaaagggcagccagaactctccatccctccagctccttgcctctgatggtcatgcctccctgcctttctcatttcagtaaatggcactgccattctcttcgctgctcagatcaaaagcccaggaggtgccctgactctcctctttctcttgcatctcatatttggtctactggtgagtccaagccacaatcatcccttgctggcactttcatggtagcctggtaactggtctacccttggcccctacaatctacactacatgtgacagacaaagtgagctttttaaagcatcaatcacatcatatcactccatggttaaaattattcagtgggcttccactctatccagaataaaatccaaatctctttcccctgtgcataaggctggtgtgacttggcccttgtgctcttgctccctgccctccagccactctagcttccttcccaccctgtggccaagcaaagcttccccttcaggcttctcgctttccgctctgtctgctaggactgtgcattcccagaacgcggcgtagctgctccattctcatgatgcagctgtcagtttaaagttatcttctccagcaaggcctccccaacctacccagctaaaagcagtcttcccagttactgtctacaacattacatagtttagctatttcatagcacttattatcccctcaaacaatcttacgtatttgtcgacgtgttcattgtctgtctccttcctccccctagaatgtcagtttctcacgtgctgggttctgtcttgttctctgctgtagcaccagcactagtagtagtgcctggcataagaaggcacccaacatatacagtgtttgctgactgattggctgttcattgctgttcagtgcctgatacctatcatcagagtatttggggcatagatggggacttggagatcactgaatccagttttttatttttttttatttttttttatttttttttatttttagacaaggaaactgagaatgagacaagatcacagcagaggtggggctgtctcaggcttaagaaaggacctgacagtgttgctgaggctgctggtcctggtggtgaagagaggatagtaaataagcaggctggcggccaagcaaggcgagtacaggaccaaggccggctctcagttgcggcgctccatccatgcacaaacctcttcctgcccaaactgcacacggctggtggagaagctgagtgcaggcgccacagggcaggcatcagtcattatacatcgaatctgccagcccataccatcacggtgggggcgcctttctggcaatgtgaaggcaatgttaagcctgcctagtagcctttgggttatggggaggaggctaagacaaaatgcaggcctggggtaaggggccctggggcttgccctgtgggtgtgttggggatggaaggcagaaagagaaaaggcccagccacagcagatgggagatgggcagctgccaagaggacggggctgggggtggagggggcagtgatgcagaccaagaagagccttcttctcttcctgttgtctgacacgccactcttacttcctctgtgattgttatggtgtcctcgggcctgggccttcaagcagtgtttacactcacagctctttggcaagaaccacactctgataggggagtgagactttaagccaggggttcaacgagttaccaaaacatcactcagccccttcctgtttgtagaagcctgagcagaggagacagctgactttgggaacagagaacaaaggagctgaagatctggaagagacagagagcaagctctgccaagagggacaggagcacctgggccgcccacccacttgggcctgtcttggtgtttctgatgctgccccttgaggctttctcgagaaggaatcagaggctgggcacatgtgactgacaggcaggccagtcctgtggcttcaggaatatgcaggaaactccctactcccctcccacctcactgtgtgctccccacaagtgttggtgacctgctgcccaggaggagccaccgagggaggtgcacttacattgcttctgcagaatgctctgtctggccttgatgaaggcgatgatgtccgagtccgtctggctgtctccggtgagagggatggacgacactggcctcttggggatgctggaggcaaccacgtgtcacattttactacactttacaactggactcaccacttatatttccaaaatgcttttccattttaggtgactgatctcactcagaaagctacatgacacggctggcctgcttctcactccctcctaccttctctgtgtggcagccacactaagcctcttgtcatgcaaattgggtcaagtcattccctgccatagaccctgatatggtttggctgtgtcctcacccaaatctcatcttgaactgtagctcccataatttccacgtgttgtgggagggaccaggtgggagataactgaatcatggggacggtttcctccatactgttctcgtggtagtgaataagtctcatgagatctgatgttttcatacgaggtttcccctctcacttggctttcattctgtcttggctgccaccatgtaagacgtgcctttcaccatgattgtgaggcctccccagtgacatgaactgtgagtccattaaatctctttttctttataaattacccagtctcaggtatgtctttatcagaagtgtgaaaacagactaatacagaccctttagtggcttttcaccactcatggaataaaacttaaactctgtcccatgacctaccaggctgtgtatgatatgaccccgggtcaggggctccagctgcccccttttctttcagtgacttgcatttaccaagccacttccagcctcagggcctttgctctgatgcttcctctccctggactgccctccccaccacccgtcacatggcggctgtgctttctctcgctgccttctctatcctcttaccaccaccactcttgtcctcccatccctgatttacccaaaccagcaccccttaacctggggcccatcaacttctgtgcccagcttagatgtcatatcattcagtgctgtgtcctcagagcaccctcattccccacgtggcttagctagttgacctcaaggcagagattactgttctcctgtctctccttaaaaacagaatcatatttagctaagttgccacaactaaaaaaactacctttcccagactcctttgctgcgatgtgtggccgggtgaccaggtgctggccaatgagatttgtaagtagaagtgttgtgtgggaatctccttagaaagggagggctgtgtgtgccctcccccatccccttttccatccagcttctccatatagcattccccttcagcaaactcagagcagtacacttgcctggccttgccaactttccgtccatcctcacccctgtgcctctgcacagcaggaggtggtagccacttccttagaaggcagtaaggacggtatgtaacaaggggctggccattcccgcaggtagtttgggtgttggctttcccgctgcaggccagccggaagcactaaagcagagtccaggcaggcagggcagaggctgtgctggtgaaagaggctgagcagccattctagccggaggatacaaatgcccatggtgctgatcaactctggtaagcctggaagcaaatgctgctgggtcttcaggccaggcttgtcagctccctgctctgctctgtggtggggctgccctgggctggctctttccctttctggcccccaggtacgtctattcacaagaagatatgaaacaactctgcccaacacagggccctggtgactgtgggagaaaacctccccgctttgagttggcctgtgtgagagattccagggaattcccaggggaccagggcagaggccagacctgggttctgtctgtgtggctactggacgaggggctttttcggggagtagactggagatggaggcccactccgcccactgcaggggctgtcacaggcataacaggagaagaccacagacctgtcttccagtggggtgctggtgctgctctgtttctggctgtgtggactggggcaaggcgagggcaggattttcctggcattcacatcactgcaaaacacaaacaaacaaaagcaaaaggaatgggggcaaatttatagaaggaaattcagggtttatatctaggagctgttatggactgaatgtgtcctctcaaaatccctatgtggacaccctaattcccagtgtgatggcattgggcagtggggcctttgggaggtgaatagatttagatgaggtcctgagggtagggcccctgcactgggattagtgtccttataggtataagaggaggatgagaaactacagtgctctctctctctctctctctctctctctctctctctcccccccctctccctccccccctccctctccctctccctccctctccctctctctctctctctctctctctctctctttctctcctatgtgagcacacaataagaaggaggtgccagcaagcgaggaaggaagccctcagcaggaactaaatctgctgtgctacggactggaggtttgtgtccctgaaaagtcatgtgttgaacctaatctccaatgtaatggtagtagaggtggggcctttgggtggtgattaagtcatgaaggtagaactctcatgaatgggattagagtccttataaaagagacattggagagctcccttgccccttccaccatgtgaggatgcgtcgagaagacagctgtctatgaaccgggaagggggtcctcaccagacatcgaatctgccagtgccttgatcttggacttcccagcctccagaactgtgaaaaataaacgtttgttgtttgagccactcagtctatagtattttgttatagcagcctgagcagactaagacaagagccaagagtcctgtcttggatggtttacacagtaattttctttttttctttttttttgagatggagtttcactcttgttgcccaagctggagtgcagtggcatgatcttggctcactgcaacctccgcttcctgggtttgagcaatccttctgcctcagccatccaagtagctgggattacaagcatgcatcacaacacctggctaattttttgtatttttagtagagatggggtttcaccatattggccaggctggtcttgaactcctgacctcaggtgatccacccaccttggcctcccaaagtgctgggattacaggcgtgagccactgtgcccggcctacacagtaattttcattgttagagcatgcatctgttggctgtagcagctgaacaacaaacgatggccacaactgtcattgatagacacgccaggcttcgtgaaagtgctctgcaaatatcatgccatttaatcctctcaatgacctaagaggtagatgtcatcgtctccattttatacatgagaaaactgaggcttagacagattaaagaaattctaaagttatccagctggtaagtggcagaatcgggaactactcaggattctttgaggcttcagaacctgtgctctcagccacaatgccttctaactgggcttgactctgtggcattctaggaacacacgctggcctacccctgaccacactgcctgcccctgggacctagcttcatgctgagagaggagtcagatccaacagctcattagatgcagctgtgcctgctcacctaggctgctgacatgtgcgccttgccttggattcctggccaagtgcagtggaacccagaagctcctcttgggaggtgaagaggcgcgtggacacggctggttggaggccagtgtattccacatgcctgtggttacaaggtccttactctaagttgtgctgtaaggagatcttcctcgcttcctgcctggagacaacctcagagctggaagaggcctaagaagtcacctgggtacaaccctccttttacactctggggacacttgggctgagaggcaggctagggttagagacaggtgagccggctccgcggagtctgcatcttcagtccaaggtactctacagacctgacaaactgcgtgtctcactcatgagtatggccccttccccggctctggccttccgccttccgatctcagccaatggcaaggctgcttccataggtcacgactgtggtcaaacaagcaagaaaagacaccagagcctggggaagccccccctcacccaccaatgtccatttcctagcagtggagagactttccacgaggtgcccttcatggtgggaaagcagagatccctgtgctgggtctagtgaggaccgatgtaggaccagaggtagccaccaggtggcaggctctgcacgcttttcttcagagaacagtaaccaattctcaaggctcctgctgagtggttcctggtgcagcctggagaagggaaggagaaagggctttccatcctgcaagtgctttcatgacaacgggtcaaggtcagtttggaagctgtagcaaatttgcaagaccaaggcactggcacaaaaatggctcattcactcagtggcttcccagtggagccttggctcaggttccagggagagttcacaggtgccaaactattgaaaggtgggagggggtggaagaggatggagagatggatggggcagggtagaagggcacgatcacaccgtggccaataggggcatctagtactctttgcggaggcccagctgccccacctcatgcaggagggcagtgcaatggaaggctgggggctctcgagggaaatgactcctcaaacctgtaagctgctcaagcatcctgttcctggatgccacagcttggtttctgtaattctggggatgatgccataaatgacctctgccctctccctttgcccaaccagcctttgacaccgaattaatttctcatgttgacgcccctctggagagagaacataccagccatcagaatgaagtatcttccttaataaggattaataagccatattaatagtaattaggccttctgggttgccaatcagagtgtttagtgggatcagcttccaggacctgagcatccctggggaagtgatgaatcaggtttctttcagaacctgatgagcagaagaccagcgccccgctacccccagttccccacctgcggcaattctcaggagcagccgctctggagctcgggcagcaacagccgctgggccctcgctctctcaccctggcggctctgaccgggcactgaccgggcaacatttatctgctcacagagtgaccgtgtcggagggacctttgcacatcttacagatgaggcaagggaatcccaaagtggggagctggcttgcccgagggtgtgctgtcggaggggccatgactgggattcatgtgattcaaatctcaataaaggggacttgttggaggtggtcaataatgacgtgacacacacctttgaagtccagggttctcgactgcagggttaaaggtctctaggcaagcacatccaggaatcatcttaagttggaatacctaaggaatctccaggaatgcccaaggccaagacaaggtggaaggagcactattctgatgggtggcacagcagacagtccctggaggccttgcccaggggctactccttagacctattccaccatggactctctcggagatgccggcggataaaggctggcagcggcatgatcaacaaacaagcagtaaagaggcagccctggctgcaagggagtatgacaaagggaatgaggcagagaggaggaagaaaaggagaagggggatgtaaggcaggaatagagataggcagagctgacagtggagggagggatgggagaagaggcgagtggaggagggaaggaggcaggcagagggcagggggagcagtgggtggaaggaagaaaaggcacttgccatggagtgtgaaggtctaggtttaatttgtggctcttttttttttttttttttttttttttttttgagacagggtcttgctctgtctccaggctagagtgctgtggtgtgatctcagctcactgcaacctctacctcctgggttcaagcgattcttctgcctccgcctcctgagtagctgggactacaggcacgcaccaccatggctggctaattatttttgtctttttagtagagatgagggttcaccatattggccaaggctggtcttgaactcctgacctcgtgatccacccaccttggcctcccaaagtgctgggattacaggtgtgagccatcatccctggcctaatttgtggctctttgtgttattaactacagagttaaagcatctcattccctttcggggcctcagtgtcctcatttacagaatggggaggctgaactctgggtttctcagctgaaatggcaagggccagtcacagggaattctgggtttccacaccttagaaggttggccttttaaggaaacacagctttaccctttaaaaatcctggcctcttgggaaaatcagacggtgtggacacattggaagagcggataccccaggcaggaggatctggtggtgggaagcacataaagaaagcgccttgtacaaaatattacaaaatgtgggctggtaaatgccaacacctactagataacattatggacatgtgtccctaaaaggcagtcattgatcctaaacacaactgctgtgaggaatgaggggagtgcacgactccgacaggcctgggtttgagttcaccactgattagctggtgaccctgggcaagctacttcatctctctgagcctgaattttttcacctgtaaagtgggggaccatgatagtaggcacagtgctcatgtattttgcacctggcccaggagggccctctacaaaggctacgagatattattgccgtcagaggagaaggccagtgctgtctcccttgggaacgtgggaatgccaacagcgaatccttcacgtgagatgttcacagggaatgtctgagacgccatgatggcctgagacagggttccctacctggcttaccgtggcagagttctgtaggcccgttactaccagcatctaaagcaagtggcaaggatttctttgtcagaggtggagcccctagagctcttcctttccagtctctggcggggttacttttcctctcacctgcctagtgtgaccgtcccatccaggaatgctggcactccaacaactgttggaggaggaaatatggggcagccagccactcaagttgaggtgttttaacaaacactgttcaggacactcagtgatctctgcccaggaattagagcatccaaccagctcgccggcagcaaccacaggggacagggctgaacagcgctctagggctggctgagagccatcttccccaagacccttctgccagcagtcaccgaaggggcttggggtgggggtggggactctgggagcaggatttttggaaaagctcctgtgggtgatctgatgcacacctttcaaattcaaggttctgaacactaggattaaacttttttttttttttttttttgcaagcacagtgtatttcttttctttcttttttttttctctttttcagacagggtctcgctctgtcacccagactagagtgcagtggtgcagatcttggctcactacagccttgaccttctgggctcaaaagatcctaccatctcagcctcctgagtagctgcgactacaggcatgtgccaccacgcccggctatggatttgtggggaggtaaggatattttcatattttgttgtagagacggggtttcaccttgttgcccaggctggtgttgaactcctggctcaagcgatccaccggctttagcctcccaaagtactgggattacaggcatgaaccactgtccctgggcaagcatagtgtatttctaccttgcatctgtcgggccccttgctgacacacctgcccctctctctctctctcacacacacacacatgcacatgtacacacttcaatgtctttgaagccaaaggaaaaatgagagacagggctttctactcgctgagcaggatattgctaccagtagaagctacccaagagatcagaaaagagggtacagaaatagccaggggttctgagcctcacagctgaaaggagagcttattctcatggggcagatacacaagggctcagcacagagccagagcaatgattgaggaagctgaatcctcctcgttgtgtttttcagatgtgctgtgtggagtcctggagtttcagcgagagggctccgtgtgtggaaggtgcaggtatacaggggttggaattcaaatttactggcctctagaggttggcaggtgcccaggtgaatgcatggagtgggccaggtgcagggcacaaatgctaagctgcctgcattgccatggcatagtgcagctgcctagttattctgcttctgcagttttaaaaatcaatagactattatttagagaagttttaagtttacagaaaattgagcagatagtacagagaattcccttatactcctcttccccacctttcagttttccttattattaacattttgtattagtgtgataaatttgttataactggtgaatgaatatagatacattattatgaactaaagtccatggtttatgcaggggttcactctttgtgctgtacagctctatggattttgacaaatgcatgacatcatctatgcaacattacaatatcatacagaatagtttcactgcccccaaaattccctgtgctccatctattcatcctttcctccctacaagtccatgacaaccactgactatttcactgtgtccataattttgcctgttccagaatgttatatagttggaatcatataatacatagtcttttcatatgagcatctttcactaagcaatatgcattgcaggttcatcacttttcatggcctgatagctctttttttttttttttgagatggagtcttgctctgtcacccaggctggagtgcagtggcttgatctcggctcactgcaacctctgcctcctcggttcaagcgattctcctgcctcagccttccaagtagctgggattacacgtgcatgccaatatccttggcaaatttttgtatttttagtagaggttgggtttcaccatgttggccaggctgctcttgaattcctgacctcaagtgatccacccaccttggcctcccaaagtgctgggataacaggcctgagccactgcacccagacttgatagctgaataatattccacggtttgtttattcattcactttttggaggacatcttggtggctttcagttttgggcaattataaataattatacaaaaagctactatgaacaatcatattctgtttttttttgtggacataagttttcacctcaattaggtaaataactaaaatgcaattgctggattgtatggtaagatcatatttagctttgcaagaatccatcaaactgtcttccaaagtggctgtgggagtgcaaaaccattttgcattccctctagcaatgaacgagagttcctattgctcaacatcctcactggcatttggaattgtcattttttgttttattttagccattctaatatgtatgtagtggtatctcattgttgttctaatttgtatttccctgtgtgacacaggatgttgtgtaccttgtcatgtacttatttgccatctgtatctcttctttggtgaagtggctgttcagatcttttgcccacttttaaactgagtggtttattttcttattgttgaatttttagagctctttgtatacttcagatacaagtcctttatcagatatatgttttgcaaatattttctcccagtctgtagcttgtcttttaattcttttaaaaatatcttttgcagagtggtgttttaattttaaataaagtccaacatcaattttttctttcatgaatctgcattgtcttccaaaacaccaggctagccaaacaaaacacatcatgtcagttattgaccctgggctcaggggctcacataggagatgtgtcctaaaaccagaatgtgaggcagtgagagggcactgggtctgggatggcggtgctgtagccctgggcagatggacccagtggctccttccctagtgcggtgtccggcatgcagcagatgctggagagatggacttcaggatggcactatgccagccacaatgggcactatgctgtgtgccagttcctactgctaagtggagctaagtgtgatgcccagacccatgggggtgccactgctctgcagcaggactgctactgagggcacactgacattgcatggcctctgttttcacatgggtccaagcccagattgatagatgacgatggcaatgaccagcctacataaggctcctgagaacggtcacgtggacatttgctccctcctgttgcaacatagcttagccctgaaggccatctgggatggaaggcatggctagcatgtgacctgctgccctgcaacggtgacctgctggctagctgagttgccaccctcctgtctcaggctgcccttgcagggtacacagaccaggtttttaagcccccatcttgttcagcatccatactgcagggcaggaaactgaggctagaagacccagggagacccccagtctggccactgtggaagcaagggagtaggtttggtggggctgaaagtgtttaggcttggacagatgatcatatcccaaactggctcacatgggacatctatccatttggaaaaaagaagttatgtccttacctcatcccatatgcaaagacacaatgcaagattaaagatctaaatgtaaaaacacacaatgatgtaggaactagaagaaaatatggaataggtgacaaaagctgctttctagctgaatgaccttggtacaagtcatttgacctacttctccgttgcctcatctggaagctgagaatggttataatagggcctggcctcaaagtcatggtggtcactaattgggtaagcattgggaaagcccttgagagagtggcccacagcaagcagcctaggacaggacccgctgccccaccatgcaatcagcacttgctgctataccatgatttcattaatttcaacagtctgataggtagaaaagtgctactgccttgttttagtttgcattgctaatgactagtgaagttgagcacctgtcttccatgaactgcctgcccatgcccatttaaaaaatgttggccaggtgtggtgctcacacctgcaatcccagcactttgagaggccaaggtgggaggatcacttgagccaagaaattcaagaccagcctgggcaacatggtgagactcttcctctacaaacaatatctatatttttaaattagccatgtatggtggcacgtgcctgtaatcccaactactcaggaggctgaggcaggaggattgcctgagcccaggaggtcgaggctgcagtgagccgtgatcacactgctgtactccagcatgagtgagagtgaaaccctgtctcaaagaaaaaaagaatgtttttcatttcattgatccataggagttgtttatattctgcatattgatctgttttatatatatacacatatatatgtatctatatacattaaacattttttttctttaagtataaaaacaaagtcactccaaaaagttagaatacaggctgaagtgctggcaccaacagccagattggaggatctgggaaagtccaaggaaaatctcaacctggttggtgttgagggctcactggctggccttttaattttaagaagtcttttttttttttttttttttttgaggcagagtctcgctctgtcgcccaggctggagtgcagtggtgcgatctcggctcactgcaacctccacctcttgggttccagcgattctcctgcctcagcctcccgagtggctgagattacaggcatgcaccaccacacctggtatttttgtatttttagtagagatggggtttcaccatgttggccaggctggtcttgaactcctgacctcaggtgatccgcccgtctcagcctcccaaaatgctgggattacaagcatgagccaccacgcctggacaatagttgttttttaagaatactttttttttttttttaaagaatagttttacatttacagaaaagttggaaagatagtgcatggagatcccatgtagcctgtacccagcttcccctatcgggcagttttaccttagtgtggttcatttgccacaatcactgaaccgatattgatacattgttattaactaaaggccatactttactggacttttcttagtttttccctaaagcctttttctgttccaggctcccacccaggacgccactttacatctcggtggtgtgtctccctaggctcctcttggctgtgaccgagtctcacacttggtttttggggaccttgacaatttgaggcatgctagtcagtattttgtagagtgtccttccattgggatgtgtctgatgttttcctcattctttgactgatgttatgggtttctgagagaaaggccacagaggtagagtgccactcttatcacatcatatcatggggactgtctgacaccttcttcttttttttttttgagacggagtctctgtcgcccaggctggagtgcagtggcacgatctcagctcactacaacctctgcctcctgggttcaagtgattctcctgcctcagccccccaagtagctgggattacaggcgtgtgccaccgcacctggctaatttttgtatttttagtagagacaggcttccccatgttggtcaggctagtcttgaactcctgacctcaggtgatccacccaccttggcctcccaaagtgctgggattacaggcatgagccaccgtgcccggccctctgacaccttttttaaagccctattttatatttctaatgtgagggctcagcaccccttcaaacccaaaggattgctccttggtggcagagacggaggccccacacatactatcctggcctctggcatcagatggacaatggcaggaggcgtgcttcctcggtgctaccccctgggttgtgtggttggaaagagacaataacatggttgtggggaagtagagtccctgctggtcatcccatcatgtagggagactggctctgggccatcctcatgtggtgtttttggaggctacctggatcctggctaggacgaagagctcccctgtgtctcagtaggcgggctacccactgtcccaccaccactgtcccccaaacccccttctcccatgctatgaccctgttccattcctgccaatcccttcttcccactcaggaggcaggaccagggcttgattgtgaaacctcttgtctcttgttaccatggcagtaggtctactggctgtcagagtgagggactgaaggggtgtgcactccaaccaacttgaaagccactgtcttgagtatctacgactaattaaacagtaaaaggaattaatcctgctggatcatatggcttatcaagagacatgagagccacaggaataggttaaacagaaaggtagggagccttttctgggaactctaacacctccggtgagttctcaccttaccttttgttagagaggagttgggaccattcatgctgggagtcagatgtctggagaaatggcttcgtgtgatcgagtgaattcactgctggagaatttacctgttggccccagaaggagtttcacagtgttagcttgaatctaatgacataggaagatgtttttgatgtaattcttttttttttttttttttgagatggagtctcgctctgttgcccaggctggagtgcagtggcgcgatctcagctcactgcaacctctgccttctgggttcaagcaattctcctgcctcagcctcccgagtagctgggattataggcacccgccatcatgcccggcaaatttttgtatttatagtagagacggtgttttgccatgttggccaggctggtctcgaactcctgacctcagttgatctgctcaccttggcctcccaaagtgctgggattacaggcatgagccaccatacccggccttgatgtaattcttaaggggaacaagccagctataaaagttagtgtacacaaggtgtatggccaaaaacaaatctagacatggtaatgaccataatgatggcttcaacatattgtctagggatggtaaagaattatgggtaatgtttaatttattctttatgctttcctgtgctttccaagttttccacgttgaacatgtattcctttttaaagataggaaaaaattgtttaaaatgttatcttcattcttcaaaaatactttctggttttgcttctccttgtcccaaagaccccctactaaagtcaggagacatccaccgagcactttgtgtaggggaacagctctgcaagctgcatgtccccacataggcctcaagagcaaggcatagatcacagctggtctaagtcttggcagaatgccctgtaagcctcctggaacgtgagtgcatacaggaagcttgtgagtggttgctactaggttatttcccacttgcttccctatcctcccagaaggctatcctagaagtttcttgtcacctctcttgttctaatgaggtttggagctttctgcctctgcccactgagggtacagctgcaggctatagaactgctcaggggcagcatggaattggcccctctgtaccagtgtatcccaccatcccccttgctgtcatctggtcccttttgtttcagtgacatcctgtggggcaggggacacatggagctgacacccttgcctactctggctttcgctgtctctgtaagtcatacactgtctgaatgtgtcagctttgcctggacacttcctgagtttcgctggtatgacccttgtcgaccggtcagtggtggactccctcgggcaccagctggggaaggcctcattcactgatgaacttgccaggaagggctcttaacctggagtccacagacagaatccaggggctctgccaatgtggatgggagccaatcacagctgcatttcccctagctgctacctgaaattatttctttcagtgataaatgcagacaagaaaccacaaaagtattagcaatacctgtgactttgtcaccaacggaaatcaagcatattttcatatcacctgacagttggtgtagagatcttgaaatattgtgtcatttcatcatgactttgaagttatgataaatattgggcctacacctagatcttattaattagtgcgttttaaaagtggtacatgtattactataccataactcaaaatattttgataaccgtatttcattctaactagttttctttgttatctcgtgtatttaattttatccaaatattcttctccattgtcctgccgcgtggccacttgctatcacactggttattgcttggctatgtccttggcaaatcatcttctctggctctcagttttcttgtccttaaaatgaagggatcagcctgtcagataatcagtaagcattctgccagccagaaaagggatctgattgtgcgtattttagcacttccgctgtgccacaactgaggtgttacatgaggaaaactgaaactgggattttgtgctaacacttatggaaaggtcattttagccttcatcaaacagaaaacttctaagaatttgtctaggaaatatgcaaaaaattatctgcaaatatgttttgagtaaaaaactagaaacaacctaaatattcagcgataggagattaaaacatatttacatgatggaacagtaacagccattaaaacaacgctgtaggataataacatgaaaaagtagccatgctatacaattaatttttaaaagccatttgcgatacttgaacagctatgtgatttattattattattattattattttgagacagggccttgctcagtcacccaggctggagtgcagtgggtctatcactgctcactgcagcctcgacctcccaggctcaagcactctgcccatctcagactcccaggtagctgagactataggcacatactaccacataattagcctggctaattatttttatgttcattttggtagagacagggtcttgccatgttaaccaggctggtcttgaactcctgggctcaggtgatcagccttctgaagtgctgggattacaggcatgagccaccgtgcccagcctgattctatttgtacaaaaacatatggatatatatgcatagaaatcaaggtaaaagaatataatcaaacatgttaatatcaattacatttaagtagaggaattatggtgatttttactttcttctttgtgtttttctgcctagtaaaatttctataattcatattcacatatatatgactatgataagaaaaacaataaatgtcagtaggaaatcagtggagaatatcacacaaagcattggtggcaaacccactgatttttgggagctgcatcttttatccctaatttttccattaatcaggcagaattttaggcatgacagcaaggaaacaatgaacccctgcccttttgtcatccttgttactacagtgagcacctgcttcatgagcaggggctgagaccatgggggcctgtgggtcaaagcccccactgtgtctcttgacagccccagtggggctgcatgactggcccctccccagcttccctgatgttccccaggccatacctgcaggttggtggcctcctctgcccaccagacttcaaactctttctgtagcttcaccttggctttgtccatgagcagctgcaagtgctcgatctccaccttcagggctttcaggcgagtgaacattgttttatacctgcggtggaatcggggaagagtcagggcactgctgtcttgaaagcacggcatggatgcagggctgtaaatgaatggggcccgtgcctcagaatcccgtcagagctgccctggtgctcagggactgggaccctataggagcttcggaggccaggctatggcaccagggtttgagtccatcacagagaagcagacggagacattttggtccagtaggcccatgggaatctgtgtgtgagatgaatagcctctcccccaagaatgagaactgccatttgctgagcacttactaagggataagcattgctgcaggcactcaacatatataaactcatttaattctcctcacaaccctatgaaggagatactatgattatcacctccattttacagattcggaacctgagacaggtatgaagaggttatataacttgctctatgggacagagataactgaggagccaggatttgaacccaggtggtctggttctagaaccacagtcttaactgcctcaccattccgctggctcaccttcatgctgaggaccaaaagtaacactgtgcttatgaacgcatacatatattggttttgagaatgctataatgaatcagaaattgtccaataggaaacagtccaatagccaggccgaagagataagttggcctctaaggtgacactgagattggaaatgtgggccaaggggacaagatgaagatggagtagagacacaagaagaatgggttggaggctgggtgtggtggttcacacctgtaatcccagcactttgggaggctgaggcgggtggatcacctgaggtcaggagtttgagaccaacctgagcctacatggtgaaaccgtgtttctactaaaaatacacaattagctgggtgttgtggtgcgtggctgtaatcccagctactcaagaggctgaggcacgagaactgcttgaacccgggagatggagtttgcagtgagccaagatcacaccactgcactgcagcctgggaaacaaagtgaggctccatctcaaaaaaaaaaaaaaaaaaaaaagcggggggtgttggaaagaaactaaggaaaatgaacagagcgagggagaaggtggacgactggcgagggccccaagggagtggagagcgacagcagcgtgtgtgctcaggtagacttctgtaggaagacacctgcacatctgccaggagcgacctgaagaccagcgcctggggctttgatctcctgggtgtgcgtcggggggcaggggcggtggtgcatgccaggtcagctgggggttggggtggggcagggagtgtgctgcagtgacaccaccagctccttgaggcagggaagatgactgtagtctctccagagcctacccatggcatggaggagatagcacacatgtgctaaatgcatcaatgaatgagtggatgcagcttgatcagcatgtggagcaagattcggtgaccatgctgtatatcaggaatggctacatgcctgtttatgcttgaggctcctcactctgtaagtgaagtcgtttggagaccccaaatgcctgcggctgcgtgagagtatgacgttctcaggactcggagggaagtggacttcagccataggcacgcggaaaaccaccgtggtcatatttcttggctcccgtaggtggcagcagtggacaagcccagctgcttcccgggcctggcttggcttgttctgcattctaacctcacactgcctggggtcctgcctttcacacctgcctgctcaaaggcagcccctcctcctcctgctgttctaggatccagctgctggacccacatccctgagtagctgcagccctgggaagctccaggacgacactgagaccctgggaggctgggctcggactgtgtgtggctaaaaggaagggcaccttctcttttcttcctccagttgtgatcgcagcttctcctcctgctggtctggcatcagaggcacggccatgttttccgagattcctgtagaaggaaggtgccaatgggatggtgagaaagaagggtaaaaggaagagtgtgatatttgggcagatgacagagttcaagggcaccccaagaagaaaggagcctctgtgagttccttctggggcctcttggtggcaacctctgctcagctgaaagccctgagaggagcagcttccagggttattgtccctctgctgtccctcccactgccaacatctgtcactggaagggaatcttcctctgtgtctactaatccttttactattgagctcattcatttcctgttgagtttccagggaagacgcaaaatagcatttccccatcctctgataaagagcccttcagggccaggcacagtggctcacgcttgtaatcccagcactttgggaagccgaggcaggaggatcacctgaggttaggagttcgagactggcctggccaacatggtcaaaccccgtctctactaaaaatacaaaaattagctgggcgtggtggcgggcgcctataatcccagctactcgggaggctgaggcaggagaattgcttgaacatgggaggcggaggttgcagtgagccgagatcatgccattgcactccagcttgggcaacaagagagaaactccatctcaaacaaacaaacaaaaacaaacagataaacaaaaacaaaagcccttcacaaaaaaaggaaacctctctaaaccatctgacatctttctctgcacaagtggaggtgcttaatttccagcctcagaatcgtgtctcctgtttttcactccctctgcagcagtggttctcaagcctgatgaacgcaggccatgttaattcacaaccagggatgagcccaagccttggcgatgggaccatcatgaggcccaggggagggctgagcacgtcagcagggatcagctgctgcgtgtgtctgcgtccctgctgatgccgacctctgtcttcccccacatgactgccactggtgcctggttgcctgctctggctagtgtgctcatctgaagctggctgtctcctagcccagagtgtggggactttttattcttctaggagtctcttcgtggttgccctgcttttctgagctccacagacaacatcctagaagtcgtacagccctgctttttactctatgtagggaagactctgctacagtccatgtgcttccagacatgctcagactgaatccttatagcatttatttgtggtaagtgttattatgcccattttacagataaggatattgaggttcaaagagggtaaactgcccaagttatgtggctaacttcaggaaacttggattcaaaaatccctcgtataacatttctgacagagggtcatctgctttctgctcaaatacttgcagggatgaggagctcactactttgcagggtagtgcatttcatggcggacagctctgtttcctcctacttttgagccaagacatttcccgctaacttcttttcacctctactttggctctttggagcagtgtagcatatctttcttcttaatctgatggtcccttaaatatctgaacaacaacatcaaaatatcacatgtgtctggaacttttttttttttttgagatggagtctcgcactgtcaccaggctagagtgcagcagcgcgatctccactgactgcaacctctgcctcccaggttcaagcgattctcctgcctcagcctcctgagtagctgggatgtagtccatcccagggtggtgtggtagtggtatggtgcacaccaccacgcccagctaatttttgtatttttagtagagatggggtttcaccatgttggccaggatggtctcgatctcttgacctcatgatccacccacctcggcctcctaaagtgttgggattacaggtgtgagccaccgcgcccagcccccttttttttcttagactgactcctgctcaatccctcacctgaagtctcagtgacctggttactttcccatttatcttaagtgtgaaggctaggtcttgacataatacttccatgggtctgaaaggtatagagtagagtagggctcctcttaccttttaaaaatttaagctctatatttttgtagtaggtgaattactaacaatgaccatttactggggactttctatgttctaagttctgccaaattctactaggcactgggctaggtcctccatgtaccctattgctaattctcaaaataacccttcaaggatggcattgccatcttctttcagctagattcttggtctcagagagggccatggataactcaaggttacatagctactaaatagcagagctgggatgtgaacccatttgtttttttctgattccaaggagctaaatgtttctaccagacagcctccccaacactgcttatgatttttagcagctctgtcgtggttggcccctattaagcttgtggtcagttttaaaacttgcattttttaaaaataagtgattgttaaaatgcgtcctgtttcagtgtgattgtccttttgatcccaaaggcaacacttcacatttattggcagcctagtctgctgagaggtccttattctgtcacgccattattcttcccctttgactcccttacccatttgttacctgtgtcttttgtgtcattagcttactgataactatgctaactggatcacgattctgtctgtcatcttccaggtgccattgaccccccttttccttatgtcaattgccaactttaaatcgacaggcagagcaagtgtcttatttcattatctaaacacaggacatgcagataccatcaacatcccacctgaagtccacactgtcatctgtgttggtgcaatttattggctcagatgaggcagcccgcctgtccacatcacccacagccccccaagtctcaggcacaggaagccctcaagggcagagattggggtcctcctgctcttagtgtcttcccccagtgctgtgttcagactccatgagtcactccatgagggtgactcagtgcctcgcatgtttgctggccttgccttctttgaaagtcatcagacatgataaactgaaggaagtatcttaatatgaaaccgacaatggtaggactttcaatggacaaacaattcctttttaaaaagtttcagaaatgggcccaggtatcttccagcctgctaaaaaagtaacactgtgaatttccttcctccttttaacacttttgtccccaccccaaggacacccccaagaaattcagtgaagccccactctgcggtgactggctagacgtcctgctgcaagcccagtacgtgagagactgctggaggcgggcggaggaagggctgctggactcacacagggccatctcacccggccagaagaggcagtctccaggccttggtgaacagacagcagaaggtaggggggacggccagggcggcctgcttttccatttaaaggctgcggtcaccccatgtgaacgcagagcccctctgtaggaggcaggctcttgcctcagcccatgactggttgtcttttccttgggcatcttgcaggttccctggcaggtcacagagtctcaggtgccctggaagtgtgtggggtgctcgggagccttaggcaaggagcacattctgaatgcagctgacacaagcacagaatgataacatcaacgccatctggggagtcgcttgagcccattccctgcgcaacaccactttcattctcaccacctcagctggcagacatgatcacctctgcttcacaatcaggaagaccaaggcttagggtgactgggtggcttgtgcgatgccacaaagctaccaaatagcagcgccaggctttggatccaagtctagtcactcatccgcttatttaacaaatgtttatcgagcattgactatgtgcctgcccctgttctagggggattccagtggggaagacagacactaaaaccacaaacaattgagtctgcaacatcatgctggggatcggaaggtgctatgaggaaagacaaagctgggtaaaaagacaggatgacagggtggaagactgccatgctaggtagggtgggtgagggcctctaagtggggggacatttgagcagtgacctgaatggaggaagggaacaggcatgcagaaatcggggcacagaatgtgcaacagtaagtgcaaaaggcctgaggtgtgagcctgcttgctgcatctaacaacaatgagaaggccaggagcggttgggaagggaaatcgtggtgggagctgaagtcagtgaagaaactgaggccagaccctggaggatcttgggagccatggtaaggacactggctttgagagagatgggagtattttgaggagaggaatgggctcgatctattcctttgaaagctaagttgagcattttttttttttttgctgatcaagacaaagctactccaaattgaacaacagttaatgtggaggtggcgccaggaagccgggagtctgttgaaagggtctgggaaagaaagctggggcaagggaccttgggaagccagaatgagggcacagcacactccacgacacaaactacccacgttgtcatgacaaccaaatgggcctgctgcccaaggtgatgtctgcttggtgaaatgcattgcagcctcaccaggagacagcctctggctgcttctgatatgttctgaggcttggctcatcagtaacctctgaagagaaataggggctgggaactcaaagggaaccaaataaaagccactgagcaagaacagaagaagagggagtaactacaaagggcatttgagttttgtaggtctccatccccacggggactctggccagggacagagcctcccatcacctgacaggaggcacagggagccctcctttcaaggacaggattctggctgggacagcagcacaggagctcacagtgccgagtggcctgcgaggtcacactgttcatctgtggggaggcagctgcctccaaagcagtacaaaagcaagagaagggtttcactcagtggctgtaggtctgaatggcacacaggaagaagccctgagcagtcaaacagtaactgaagcttcaagttgggaggacgcacagacgcacagtcccaggctgaccttatctctgaagtcacgggtgttttggaattagccgtgcaaggaccagaggggctcttgctgggaaggccagtcaagatgtggaccccctccttcctgacataatttctactggaaagatctctgcaactccttgtcccacttccccatgccctcctctcaaacgctctctctcccacgcagttatctgatatttgaaatgtgcagaatagtttttttggttcaatggttctcaactgggggtgcacatcagaatcacttaaggagcttgtaaaagcacacagacagctgggccctactccagacctactgagttaaaatttgtcaatagggtcccctggtgattccaatgctcaccccttgttaagaaacactgcttatggcttcaagcccagtttcaatgcaagtactctgtgcagaagttactgagaatacaggccctacagaagtttagataggatggtgtgtaggagccagcacgtcccctacatgcctgcctgctttccagacatttgggagccactgtgataaaagtaaatagggcttcaggggtttgcaaccaggaaagcacactctctgtaaggttgaaactgcctgcatcgggcccttgtaggtgcttgataaaatctgaataaccataaccatcgcacagctgctacatgggttaggaacttcatatgtattgtcttgtataatctacaactcccactccaagtggggaaactgagctttgatagaggaagtaatcgcccaggatggcactgctggtaagcagagctagtgggagaactggctctgtccgatttcaaagctggtgctctttcctctgtaagtgattccaataatgaaggaagccacagggcagattattgaagtctgtattgactcgtcgttggtatttgaaggtgttgctcttttccatgaatgcctttcagatctggggctggggctgagagacagtcttagtgtcttcccctggtgctggcctgtgaagtctgccctttaataaccgaaatccatgacctgtgccccaatcccatatggcatttgcagcttgcctgctaggtgtgaggagctatatacccactctccagggtcagcccacagaatgcccacagccagcctgttccatgcccttggctggactaggaatcctaaagaagatgatgttgaaatttccaagcattcaccaaagccaaaaggggccctctgggcctctgtagagcaaaggctgtggggcccacatggctgtcacctaaccagtgccctgcgtgggaaggggaagtgagttatgtggctctaccatggcagacaagacatcagagccaggaggcattccaggtggtcgtcttggccatccaactacccaactaatgattcatttgctgaatacccactctgggcctccttggggctcagctgtctcacacaaccatagatcacttcagcctcaccttgtttgagaagacaaagtgtctattcttacggagattgatggtgttcatagctcaattaccacaatggtcagcagctcagaggcaaagattctggcttcccaatcagaccatttcctgtttaatggctcaaatttactgtcagctggagccgtcacatgccgacgggtgctcagtgctgccatccatcctggtgctgattttgtaacaccttagcggacccaagcatgcccagatttaagggtgtgctgaatgaccctgcggacacatggctgtacctgataatttcttgggcacactcacccccactgccacagaccctgcgctcactgccactgccttcccctcaggaagagcagggcactctgtgagaagataaatggctgtactttattacaatcagaaacgtgccagatgcctgcttgtagcaaaacccaggccctgacagtcccctcatagaaggccatccaccatctcttcctgtgtgagtaatcttccctgctacgactgtgggcctctctgtccaaggttgtcccccagggatggcggcctctctccttcagatctgctccttctcaccagcatgttctctgtggaggaggcagactgtaaagtcagagggtcagcgtgtactagggtcagtcggcaatataaaggagaccctagggccatacaccatacacagggaagacattcctaatcttattactgcttgaacttggcatggatcctattcatggtcacctctgttcaaatgggagctctctctcatctctctccacgactccttctgctggaaccccagatccatcttttggttactggtctgcatttctcttatcaccaccactaagagcctggctcggtgatttctgggtctgacccacaaggttcccctttttccctggtgcacagcacctctcccagcctacccctccaggggcagccttccagtccactgtgactttctctctcctccattggaagtgtgcctgaagttctgaactcaggtttctctcaaagctctgagtaccttggcagttctccctcctgtcacttaagcctcatggactcgtggtgaccatatggctcagtgcagtggcttcttagagacattagtaggaaacttggcatgcctacagtccagctgcatctttattgcactggaccagccagggggcagtgttctcaggatgcatatgatcttttggggagagcagtttttcttgcacctataagagccagcacaggcattcttcctatgaaaacctctaatgaagatggttagtagggttccattgattctcttgactggctaattagagaaatttcaggagttttaaaaattgagttgtggatccttcatcaagctgtctccctcttcttttggaaaacatacctgctactagccaatttgtaaattaatcctttcatttggcaataatttatcatatattggagtcaaaagtgagttctgagacagaccacacagtagaactggcacattttcaaagtgaaatggcgagagctggctagacaacccaaacactcacatcagcatttgaaaagggccaaaataaatgtttgacaagaattcctttaaaaagagctagcagtttgcctaagcctacctcctctccctccttgggggtggtgtgtgtggagatgcttcttcctccctcaggggcagtgaaggagcccgagagaccacgcagaaagtttgctgagaattctcggggatctgtgtgggtgctgggggtggggggcaagaaggccagagtgcactactgtcgatttttattcaggagctctagagggtggggcatgggctgatgatctgctagtggcaagagcagggttactactgtgtttctgttgacccaacatgggctataagcacagaagagagggaggttaggggcattttggatcagtggtgtgctggtaagtgtttaacaaccagctctctggaagaaaaaagccctgattttcagtgtttgccaatttttggggtacaaatattcctgttcagtctaccaacatgatgttcctgaatttggagttgggaaaaaatgtacacgatcagcccttgtgagccagtgggagctggctccagcacgcctctgagctcctctaccacaacacttgacacttacattctttctcacggggccacctagaggggcaatgggaatgcaggagaaggaaacctggaggcgggcaacctgggggtggtatgctgggcctattcctagctcattgacttctccaccctcttttaccttccttacaccctctgccttctgtctgggctcctccagtggggaacagcagcaagtaactggagggtaggaggagagagaggccaagctgtttcttcatgggagacttctctgcgggggtcacaagctggacacatggcttgactgaaggtcacagctcgtatcagatggccagggcctttctgcacagccctgacagtctttaaattctagtaacttttccctgtcttgtccaggcctagggacagcaatgcttcctgccttgctgcagtgactatctctggggtgctctcccttgcagtttccctacactctgcttatgcctctgtagataggtctttatccaattctcttcacaacgtctcatctgagtgctgacatctgcttcttgttaggaccctgacccatatagattcaaattgggtaaggaaccgcccaataaggcacattccctcaagttaagggacctgctggtgagggatctccagagacccatgaaaccaccccaaattaggaagagtctgctttgaatatctaccaggcccagagagtccaaggccacattacagcagaaccattcaagtgagattttaccaatggcccttcctcccttccttctttcctctaatcccttcttgaggaaatcgagccttagcaggctaaggaagggagggagttagaaagagagatgactatttccctctcctcctcacagttggcctgagttggggtaagggagagaagtcttatctcttgatgaaattggaattattaagattgcaattactatataaaatgaccactctttttggtttgtaattaacaatgaatgaccaattcagttatggggttgatcaatttccatccaggggcagaggaagaactttccctcctatgaagatgggaagagacggtgggagaacaacaaaaaagtaaccttcagggcacttccctgtatcactcatgtcaggcacaccaccaacagctattaagtccctaccaaaaattacaatgcgcctggagaagaaaataagtggtaaattttctgttttcacctttaagtaaaatgatcctgacataaatggtagtaaggagaattaagattaatcagaattgaattgggattcactttttactaccacttctatcacaatgattccactaaaacagtaatttttatttgatctatgaagccttggaatctaatccttcatagagttctgggaattattataaaccattgcaaacacaaaaagttcagagaatgagataaataacacccatgtactgactatattttgaaatatctaaatagtttgctgcagtttcattttttaattttaaatagaatattacggaattggtagaagcatccttcacaattcactctaccctttctcctgggcaggctcctggctctttacaacagctccctaattatttctcaaatagatatcaggattttcaaaataccacttaaagctttctgttggttatttgcacccatcatttgtatttcagcacagccaaccttggtttcctgttggttgttctttcccaaactaatcatcaccttctctggggagatgggaaagtcttacccaactccattacacatgcaacagaactgttcctaggaaacaccgaggcctttcttggtccgagatttgccgagcacagatggcgattttcatcatgtgtaaaggaaaaagaggacagatagaggggccagccataatacattctagtctagcagatgagatgcagaggctagaattttgtcttctatatgtttggtcaaatgcctaatttgctcaaagcagcagccatgatttctgcacagttgcatgatgaaaaaaatggctctggcaactggtaacaagatcatctgggttcagcgcttaaaggaatagacagccccttcttggatgtgattgcgtttttttgcaagaaagagtaatcaatggtgtctgtgagtaaatatggctagagcagtgtagtgactgtgtcttgtggaggccttcaatgctgctggtggcccagagccatggtcagctctgtggcaaggagtctgaaattgtctctgtttgctgatgacttgagtttatatatagaaaaccctaaagactcaaccaaaaaacttttggttgataagtgagttcagtaaagttacaggataccaaatcagcatataaaagccagtagcatttctatatactaacaacaaactatccgaaagagaaattaaaaaaaaattccattaatgatagtaacaacaacaaaaaacccaaagaacaaacaaacaaaaattgggtgtaaatttaactaaggaggtataattgaaaactataaaacactgatgaaagaaatggaaaaaaaccacagataaatggaaagatatattgtattcatggatttgaagaattaatattgttaaaatattcatactacccaaagcaatatatagattcaatgcaatccttatgaaaactccaatgttatttttttacagaaatagaaaaaaaatcctaacgttcatctggaaccacaaaagaccttcaatagtcaaagtaatcttgagcaaaaggaacagagctggaggcattacactctctgtttttaaaatttactacaaagctatagtaatcaaaacagcagggcactgtgataaacagacacattgaccaatgcaacaggagagaaagcccagaaataaacctacatatttatggccagttgatttttgaccaaggtgccaagatcatacatggggaaacaacagtttcttcaataaaaggtgttgggaaaactggatatccacatgctcaagaataaaattggatccctatctcaaaccataaagaaaaattacctcaaaatagatgaaagacttaaatataagatctgaaactgtaaaactaccagaaaaaaacataaggggaatagttcaacaacattaatctaggcaatgattttctggctgtgaccctgaaagcacagacaacaaaacaaacttgcacaaattggattatatcagactaaaacgcttttgcacagcaaaggaaacaatcaacagactaaagagataacccagagtggaaaaaaatattggcaaaccatacatctgataaagggtttatattcaaaatatataatggactcaagcaactcaacagcaagaaaacacataaccctattaaaaaaatgggcaaaggacctgaacggagatttctctaatgaagacaaacaaatggccaacaggttcataagaaaatgctcaacatccctaatcattagggaaatgcaaattaaaatcacaataagatagcacctcacacctgttaaaatggctataagaaagatgaaagataagtgttggtgaggatgtggagaaaagagaacccttgtacactgttggtggaaatgtaaattggtacagttgtcatagaaagcagtatggaggttgttcaaaatactaaaatagaaccaccatgtgatccagcaaccttgcttctgggtatacatctgaaggaactgaaatcagtatgttgaagagatatctgcatttccatgttcattgtagcattgttcacaatagccacgacattgaatcaacccatcaacagatgaatggataaataaaatgtggtatatatacacaatggaatactattaacccttaaacgagaaggaaattctgtcatttccaataacatgaatgaaactggaggacattatgctaagttaaataagccaggcacagaaagacaaatagtgcatgatctcacttatgtgagaatctgaaatagttgaactcatagaaatagaggctagaatggtggttaccaggggtgggaggtcaggagagggagatgttggtcaaagggtacaaagtttcaattagataggaggaatgtttttgagatctattgcacagcagtgtgaacacaaggagtaataatggacatttcaaaattgctgggagtaaatttcaaatgtctcaccacaaaaaaaatcatgggtgaggcaatgaatatgttaattagcttgatttaaacattctacattgtatacacatatcacaacatcacaatgtacccccaaaatatatacaattatggcttttcaattagaaataatattaagagaagcaaacaaaaataccaaaaatggttgagtaatgaatggcaaatttcctctctctgcttgagctgggacatcgatctcctgcccttggacgttggcactctggcactcaggcctttggactcagactgggacttacttttttggctgccctggttcccaggcctgcaggattggactagaactacagctagactttcctgggcccgcagcttgcagatggcagatcataggatttctcagcctccacactgagtgagccaattccttccaaaaaatctctctccatatatcaatatatttcctattggttctgcttatctggacaaccctgaccaatacacagggtgaatgctctttttgctaaaccacagttgctattgcaggctggcaccagggctgacatagagtcttcctctgccctccagaatggttggtgcaggagccttaaaccactcaatgggtctgaacccttggcagttgggaactggcagggaaatggtgtgcaggctcctcctcactcccagcctctcccttgagcatggaaattcggctaaggacctcatgtcactgaggatggccctatattcacaagcaactgtggattagaattaagtggtgagacacactgttgatggttttacagagttacctgaattcttttggaaccaactgagatgttatctcagccttagagggcagctgcatcctttatatcctgccttatttcaaggagtcaacaattttatttctgagagggtgaaaacatctgtaatccatccaagctctcccatgtctccgcaccaaggttgcgagtgttttctgcatgtctgaaggaagcctgccttcacagaggtaatactgtgacacttgagggctgtggagtgctagagattcatctgttcattcaacaagcagtcagtgaaggccagctaagcctcaggaactgtgcccggcactgggctatcatctggtccaaccacgtcattttacagatgtagaaacctgagcgcagagcccctcagctgctggcacatctttaaggcaaaaatgtgatgcctaagtttcactcattcattcaataaacacttatggaggacctactgcgtgacagtcactgtgcttggtgttggggaaagaaagacaatctgtccagtgtgggagacacagactaatcatcactgtctagtgtgactagctgcatcacagagggatatgcagagttctgtgtgagcccagagggagctgagatagctctggggaggggaagtttggactatctgactttggaaatgttttaaacagagccatgatattggaagaaagaagatatattaaaagctgcagaactctttcttcaaatacaagcttaatggaaagaaaaaaaaagatctgaagttgttttggttgaatttgagtgggcgagaatcccaaagctgcgctgtttgcacagtggctgtcctcacccttgcctcgtggtcctgaaggggctgtggagaccatctaggctgcacagagcacattttgcagaccactgggctagaggatgctggaagatccccttccgttgttttctctttttcttttttatttttttaaatttgctgtctcccaggctgtagtgcagtggctcacagcagtcttgacttcaaggaatcttcccgccttagcctcccaagtagctaggactacaggtatgtgctgctgtacctggctaattttttaatcttttctagaaatgaggtctcgctatgctgcccaggctggtctccaactgctggcctcaagcgattctcctaccttggcctcccaaagtgctgagattacaggtatgagccactgtgcctgccctgccgtcccccatccccccccaaccccggtttcagttcagtctcaatcagtggctcctctccatatccttggattcccagtttcacacactggatcatgctaggtgctcagtgaaatctggggaataaatggttgacagtctggccttttgctttctcttaaatttgttgtccctaggtgcagaactgcaaaaagcatttcaaaactcagtctttaccaattttacatcaaatgggagaaagtggcatcaacagccgaggcctgtctttgaagaacaacagggatgccacaagaggtcactgcaggaatgctggttgggggaaaagagccctctcagaggactaaactagaacaacgcagtgaaacagggagccagcagcttcagagcctctctccaacccgtaaggcccttgcaggggactcagagctgcctctgcctgatttcccgggtcaggtagtgaaacaccagccagtggcaatcccagggctccacgtggcatcacagtcgaatggcttgttcttgggggctgcttttgttcaaggagatctttgttcctggggcagtgagaagagggaggagggaggtggaaagaggggtagtgcccaagaggtagtattcgtgggggaatctcagccatcctttggaacttgttgatcttaagtttaagatattttctttttttaattaatactatcagtataactatcttctataacagtatatgaaacatgctcgctgtcgaggaaatgggatgttccagtaagctctgttttcacagaagttgggtcaaggggtaaacgcagagaagcgtaaatgcagagaaacccccatcccgcacacaaacacacaaaccacacacacatataacatgtacaacatatccataccaccaacacaccacacacacacacaaacccacaaaccacacacacatacacaccacacacacaagcacaaaacacacatacaacacatacaacatatccaacataccacatacacacataccacgtgccacatatacatacaatacatacaacatacccacactgcacacataccacatatacacatgcatacaacatatatccataccacatacacacacaccacatgccgcatatacacagcacacacgtacatacacaacagacacacgcatacacacaccccaactaacccaaactatttcccactcttctctgtggttcagaatcctgcccattcctcaagactcagcccaggcctgtggtcttggtgacaaccccccagggccactccttctggtaagaacgggaagttctcatggcctgtccctctcacctgacacatttcacatgctgcttggtagtgtgatgtatcttttaaattttaaccacaggcacctgttaagggttttgattgtgaactgaacaagatccagccctgatcaaatattgcttagaagagatatttgagagagaggccacagcccacgttcctggggctggattcttccagttttagtcctgctctgtgtggccatcagaaagctgagtacccggatcctattatcttggccgctcacataaacgctttcagtgagctatgctttaatgtcaggcctctagcttttatagagggtcgatacaagaatcatctggttgaataacatttcggtatcttttgtaaaactgcagttgaagacatcgttcactgtgtcactcagtgtcctttatacaaggatccgcacgataaattctggcttgtatttagttccaggaagaaattctattttctgcagataaattagttagtatgcttcctgctgtcagaaaatgaaaactatgtaactctgggtgcctcttttttgcttagcagctagacaagagagagccaaatttattgcctgtgtgttgtaatttgctcagctgtggagtccaaaagcacttatgccttctacttcttttaaatgggcttattttattttatgctcaaatgtctcattgtgcttttgcaaaatgtgtgagtctggaagtcacctggggaagcattcatctggccattgacttggcctatttattgcttgtgctggctgctagggattcgaagatgaatttgactgcacccacctttcctggagcttacattttagcatggagaatatatatggaaataaataattacaaaatagggttggtgctttaacagagacccatgaggcggaggcaaaagcagattttgggagaaggggtcagggaaggcttcacagaggaggtcaatgttgaattggttttgtggctacagtgggaagaggacagtgaatggaagaatgtaggtagctgaatctgatacttaaaaaaaggagttgtctttttatgcacatgtcaactcatcctggttagattggaaactctttgagggcaggcactggatacagccctctgtggattccatgatgcctggcaaagtgctaagggcagtgcagcgtgatggctggaacactgctgtggacccaggctactggccttgcatccacagcggagcaaagttaggcaggtttccttaacccctttgggccttaaatgtaaagtgaggataatagtaacatctacgtcattgggttgtgagcattaaagaaagaaacacatgtagagaacttagtaacatgcctggcacatggtaaagtactcaagaaacatttgctgattagtctcatctgcattatcaacaatactaaatcatttggggtcgatagtacagtaaagtggtaaaaacacacacaactgaattcagcaaagcactctcagctcagctagctgaatctagttaagttagtatcatttccaactgacgcctaatttaaaaataacattgttctattgtttcctgaaatagtgtgtgggagtcagccctcctataagccctgatgatgttcttagagatggttattgatgtttgtcttaaaagacacccccagctctgactgtcacatctagggagctcacaaggtacaatgcttcttcagcctcctttttgtcttcattagttctcctgtccactaagttttaaaaggaccagggttcggtagatgtttatgtttcctgatgtatcttgggtgagttgtaaatgaagaaagaaccatagtcttgactttcagccaggaaagagagtaggaatccttataaaagcacatgcacagtcacgcgtgtgtgcacatgcacgcgcacacacacacacgcacacacccggccatgaaagggccatccatatgccattggtgtggtggcaaatgtttaacagccactctttggaaaaaaaaaaaagccacatttataatacttgccaatttccttggtgtaaatatttccagcatggctgatttgaagccaccagtatgatctcgctaaatgtggatttgggaagagaggcaccgcagcacctcgtcacacagtgttcccaccacacagatacagtggatacagatcacttcaaaagcacagataataacacaatgtagtaaattaactaggaagtggtgaattttgagtatttgttacctttgtttcttaatataacatttaattgtaaacttatctaatttaattttaataacatctttgtttaaaaacggctccccacattcctggagtactaacagtttatgcttttatggactgagccagctcagcacaccactgggaatggcttatcatcatccatgaatgatttcttccaaatggtgcctctcacattaccactaaatctttgttcctttgggatatgggattgcctttatagaaatttccctgggcacacatctacttacacatccagagacatattcttatgcaaaacatataagaaaaactctcctgatccaacttgctcatcacccttccccacgacaaacccaaaccgatcacacccacactttcatgaaaccataggaacatgtaggcaaaagaaagaaacaataacagaggaaatactgagaatggagagtgagagaaagtgaaaagaagcagacaaagggaacagaatgaaaagggtgatggtagtagaagatacacaaaaaagacagaaatgaaagggggcgtaccactgagtcacttctttactcttagatctgaagcctgaattacaaaacatcagggaatccaaatacaccgagtaggctgcctttactcttaccggagccctctgtcctagccttcagcccaactgctgggctgaagggcgagagttaaggttctataagcaatctgtcttgagaggtttctctcaatgaggagaattcccatctgaaatgcggccacctgggacacacaagctctggcagttccaaatctccatcagacaacctcctaaggagcttggacggcaacatggcatttaatctcagaatggcagctgggagatgttgacacttcttctctaattgggatagtatgcttttaaaataaataggtatttcaaatgctcttaattagacttccagccaaagtgctttctgtttgaagtttgctgattacttcaggcaaagctaggcgctactgaacctaacacctgctgtaattcagaagactcccagagagatgagcagaggaattaaggcacaagcctgtgattgaaaacatacagcagttttccaaaggcccaggaagtgtctgccccagctggaaggaccatccctgggaggggtggggactgggcagcagagaggatggaagatctcttgcccacaaagtcatggaaatggcttcccagaccgaagatgaaaattgcccctagagttgagtggtatttttcacatcattgtttgtttatttttaaatttccatttttaaattttagattcagaggtacatgtgcaggtttattacaagggtatattgcatgatgctgaggtttgggcttgtattgatctcgtcacgaaggtagtgaacctagtaaccaataggaagtttctcagcccttgcccacttcccttcctacctccttttggagtctctggtgtttgttgtttccatctttatgtctgtgtgaactcaagatttagctcccacttacaagtgagaacatgcggtatatggttttctgttcctgcgttaattcatttgggataatggcctgcagctgtattcatgttgccgcaaaggatgtgattttgtttttttttatggccgtgtagtgttccatgatgtgtaccacattttctttatccaatctgccattgatgggcacctagattgattccatgtctttgctattgtgaatagtgctgcaatgaacataagtttgagtgcctgtgtcttttggtagaatgatttatttttcttttggtatatagccagtaatgggattgctgggttgaatggcagttctatttttagttctctgagaaatctccaaactgctttccagaggaggtgaaataatttgcattcccaccagcagtgtataaatatacccttttctgtgcaaccttgccaacatccgttattttttgactttttagcaatagccattctgactggtgtgagatggtatctcgttgcgattttgatttgcatctttctgattattactgatgttgaacattgttttgtatgttttttggccacttgtatgtcttcttttgagaagtgtctgttcctgtctttgcccactttttaatagggttctttttttcttattgattcatttaagttccttatcgattctggatattaatccttcattggatgcatagtttgcaaatattttctcccattctgtaggttgtctgtttactctgttgagagcttcttttgctgtgcagaagttctttagtttaattaagttccatttgtctatgtttgattttgctgcatttgcttttggggtcttcatcatagattcattgtctagaccaatgtctagaaaagtatatcctaggttttcttctagaattttaacagattgaagtcttacatttaagtctttaattcatcttgagttaatttttgtgtatggttagaggtaggaatctagtttcattctctgcaaacggttagttttcccagcaccatttattgaatagggtgttctttccccattgtttatttttgttgactttgttggagatcagttggttgtaggtgtgcagctttatttcaggagtctttgtcttgttccattggtctatatgtctggttgtgtactaataccgtactgttttggttactgtagccttgtagtttagtttgtaatgggtaatgtgatatctccagctttgttctatttgcttaggatggccttggctatttaggctcttttatggttccatatgaattttagaatagtttttttttctaattctgtgaaaaatgacattggtaatttgatagaaatagcattgaaactgtagattgttttggacatttaaacaatattgattcttccaattcatgagcatggaatgcttttccatttgtttgtgttgtctatgatttcttccagcagtgttttacaggtgtcctcatagagatctttcaccttcatcattagatgcattcctaggtattttaatttttttgtggctattgtaaatgggttgcattcttgattgtcagcatgaaagtttttggtgtctggaaatgctactgattttgtacattcattttgtatcctgagactttgctgaagcagtttatcaggtcttggagtcttttggcagaatctttagggttttctaggtatacggtcatatcagcaaagagagataacttgacttctcttctgtttggatgccttttatttctttctctggcctaattgctctggctaggacttcctacgttgctattcctattgaaccagcaacatgaaggctgaagaagagggcagatgtttcagggccaggtggcagcccttggggacaactccatatccagggacctgccagggtgagcacgaagcaggatacagaggcccataaggtcaccttggtacagttttccagcagaggtcattctgccttcccaagcctggcccaaggagttagggccctggggcagcctggctctttgttgaagacacttcgcagaatctcaatgctaagtgtgtgcccaagtctctggcgctgggagggcagtgtacctgaccccagtcccagggccaacagtgggaagctcagagctccagttgccgtggcttaggtgcccttgttctatgttcctgatgtaatcagcagctattctatatcatcattattactactgaaacgaaacaaccaactttcctaataatacaaattaccaaagtcaaatgagccatcgtcatgactttagaggctctcctctatttccccaccattggccctgggtgctggatttctccgattacaggtaattgagggcccacaccatctcaaggggaactttttttgtctggaatacatgaatttcttatttaatcaaagttctccataaattgttggtcccagctagctggagaggaaatgaggaggttctacccaggatacccactccaccagtcctctgcaagctatactcttctcctaggtgacttcattgggtcacatatcaaaaaagggtgttttctgcagatgtccactgcttaaaaggtgccaagggcctcttagaatatgactgtccttgttttgtatttgcattcttcatgcgttaaagcgggttgatcattgcagtgggcagtaaatagcatgagggctaacagcaccaagcttggaacagaactgggttcaaatacttgtttcaacactcactggctacatgaccttgggaaggcactgcatctcccccatctggtaaatgcacttacctctttggactgctgtggatgaaaggagactgcatatgaggctgtgcaacagacacgggtctgtaaacaaatgctgttttcatcattaactatttctgttaggattagttagtagtggctctgaaaagctcagataggaccttgagaatctgggacacagtgggtgaatttaggtggggatgtggggtgggaaaggaggggaggatgaggcaacagctggaagagtagggtgctgggtgctgatggccaggcgcaagaacacaggctggggaaacagatcctgttagaggaggggcatccaaggaaagctgtgtggatagcaacccttgccatccttaacctcagagagggttttaaatgggttatcttttagctgggtttggattcctaaaatcaggtcagtttatattaccttcatcctcttcctgcagattctctttgtacctacctagggctacttgctgtatatgccgctgggtgatttcttccttcaggtgacctgccaaagacacaaaagaaaactaccagtgggtttccaatgggctggaggaagactgcctcagaagcatgtggcaagctacagaaaaaaaaaaaaaaaggtagagtaagggaaacaaaagcaggcatagcttccaagaaatgaccttccatgattcctagatcgtgttggaagaagaggttgcaaaggcctaggtgctggcacatcagtgcaaacacacatttcacccttgagttcaatcatcttaggattcaagtatcttagcctgtcacccataactttcactgaggcccctattctcttaaatggttctttctattattaataaagggaaaagcagaatttggtcttttaataatatttaggcctactttaaaatccacatctttatttaagctacatgaaactgtgtcaaataaaaaaagatggtggttttaactgacaataaccctaatagttggtcatttggtgtgaaactcatataattctagtttacattaataaaggtatgatgcacagagaacagtgatagttcccttcagggaggtgatagttccactctgctctacaagtgaggagacatcagctggtatttgttctgggagttactcttcataaggaacatttgcaaaatagaaaatattcagaagatggtgactggaatggtgaggggtctgaaaccatgccatctgagaaatatttaaggtgacatgagacatttagatgtgaagacaagacttggagaggaggaatggagataatggctgtctttgaatatctgaacattgtcatatgaattagaaacagctttatttttatcttgctcctgagggcagaaatcaagtctaatgaaagcagacttggggcttaatacaaggaagaaacaactcacaatgaggactgtctcaaaatggattaaatcttctggcaaagcagtgagccccttcctgaaagggttcaagcagaagctgggtgaccatctgttgggttgttagagtgagaattcctgccctgggtaggatctgggaggcaatgacctccaggcttcctccgtctctaaaattccatgatttcgtgcatgaaggaggggtgaaacagcagcccggagtttgtttatgtccaagggctcagcacacttgttaaaatgtcagtgctgtctgtatggcatgtcccatttgggggatgtgatcaggccactgggggattccaagaaagcctggaaaattcattgcttccttgtttaagatatttctttcctcacataagtacattctatacctccaaggctatagctgaattgagtattcaaaagatgagtagatgaggaagcagtcacaagagactttatcatttatggagagttttagggcacctctagaatgttataattgggagagatggcagaggtcattcagttcaactttgcagtcaatttaggaatcccttctacagaaggaaatgggcatttcccttctgacttgtatgtattcgagctattccattaagttatatgtaaggaattaattatgtggagttgcatctgcttccctataatcttcagctatgtgcctggcctgttttctggatcagcacagaaaaagatcctctgtcattggcataggatcttcacatatctgaggatgctatgattgatttctctacttcgacttgccctttatggaggtcaaacatcaccagtccttaggtaatacctcggaggccactatctccagacacatcattgtcttgggaaagggtctggggcacctgcatgtctgtgccttggtttccatgtgtccctactggagagaattatgcatagagagcgtggcaggcattgggactaaacaataattgcacccttattccatgtgggggaagggtgggaacttcaggagtgtgctgagggggatttggggaagtggaaacttgacccaatgatgagtattggtgaacctggatccaacaggaaaatgacttgacacctgagccagccacagccccaaatggatcttttccctactcagtgcaatttgacccttattgtccatataagcagagtaaagaagttggggacataaggctgctgctggactgagactctaggctgcatcaaacactgctgaattaaattttaagatgggatagcacatgcatgctccaaataaaaggagatattgctgtgacaaatgcaacacaccatttagaaacatctcttgatttagagtgagtcatcaaaagctttttaatcctgcagtatggagagtcagtggtgctttggtgccctgcctgtttcctgggtatccggcacagccttataccacgagcctctcatatgactgggtactgccttcctaatgagcctggacagtggcttgctcctttagagcacacactggtttgcactgcttcctggaaactacctccctgctaataagccttcccagtaataagcctccctgacaatgcgcctcctgacacatgcttcctcaagtctgtgcctccaaaccccatgccttgaccagagtaggtgtgctcaacctggtatgttacaatttcttcagcgcctattggaacgaccaagttcctttttcccaaaccctaaggaagtatttttttttttttggaatgaccaggtttaaggattctccactgcccctggtttgggaggagctgctcacgtaaataaagaggggattttgccaccacaagcataaatactcactctcagaacaacgaggcaccaccagggaacaaaaggtgggtctttataatgttacatattgataaaggttgttttacaatgccgctagtgatactcagttttggtgaattgactaacatctcccaccacatggcaagtttttttttatttcccccaaacaagcttccaaaaatagccttatggctgatacctaattgcatttctaacagagctattcttcatgtgcagataacagtctctgtaacctgctggatcttgcagctttatgggttttggcaaaaaaaggagttgagggggattgcagaattcactcagcatgcagcttgctgtcattaccacggtgataaatttgctggttttggcctgggttcctggacacatccccatccagaggtatggaaaagagatgaaatggaaacagagaactcccagcctgaggccggagacagtctgggagggaagtagggagcccagaatggggctgaaaaccaaaagggtaggggagggaaggaatgctctgcctgcaggagtgtccataattagtaatttttccttcagtaatttaccacagtacatgctagaaacaccttctctcccttttgatacattaattgatggattgtgggtggcagcggggagcagagcttacagcaatccacgggaaagctccagaggagacgggtgaccttaaatatgaccgcgagcagggtatgtggaggtggtgctctgtgtggtatatgggttttctctgttactgagtagttctagggaaagtattatcatcatgcagaagtgaaactgatttttttacatcagtattcagtcttctgaataaaaccattttccataagcttcacactctattttgcacgcatgctagtttgagattattcacgtgaacgctgcttggctggcctggaggagagctattcacttacgactccctgagtggctgtctgctgctcctgcaatttctgggatgctgtgcctcattcaacatgtttatgttgctatcaaacaataaatacttatctctcatctactatcggttaagcactatgttctaagtgctgtggaatatacacactcgtagaaggctctatcctaacctaggaaagtcagtgcagtacagggatcagcaaataggtggcccgtgtgctctttcttttaagtgctggaccaacggctggccttgctcctccatcagggatggtttgctttcctgctgagcctgagtttggctcttccacacagcactctgggcagctatagcccatcacttgaagttggacttgagatgaagcaaacctctttgctatttcagttattctagaaaataattacaaatctgggccaggcatggtggttcatgcctgtaatcccagcactttgggaggccaaggtgggtggatcacctgaggtcaggagtttaagactagtctggccaacatggcaaaactccatctctactaaaaatacaaaaattagctgggcatggtgacgggcacctgtaatcccagctacttgggacactgaggcaggagaatcacttgaacctgggaggcagaggttgcaatgagccaagatcgcgccgctgcactccagcctgggcaacagaatgagactctgtctccaaaaaaaaaaaaaaaaaaaaaggaaataattacaaatctggaggtagacgaagttgagttcaaatcccagttttgctacttcttagttgaatgggctaaccaacgtctctaacctcaatgttatcatttgaaaaatggaaaaatattataactgcaataatatctgctttgctatatctcaagatctttcagaggagcaagggataacgcaccagcatgtatgatatgccacactcgttttaggtattcaggcactttcagacatattggaaggatactacatggttaagatgacaggtcaagcggctaaatgtcaaatcaatggtagagatacatttagaggagggaaaggagacattgggaaaggcataattactacaggcgaattgagtaggctcagaaaagagcaagggtgttaaggtgcgcttgggaagggcacctcagtctgagagaactgctgggacaataatgcagaggccaagtatatactggtttgggacaggggcggcaagggaaggttgagtggaggactagggctggggaagactaagttgtattcatactggagtctggggtcctgggtaattactaagagctctggacccagataaatgctatttgtctgtttgactatactactagagtttctgggcaaaatctggttaatataaacatcagttgtagaactggggtgtggggagaatatgcagaatatgtttcctgcctgaggggcctctttgaaatggaaggtctagttagaggctccgaactctgagtgacaatttcagctgtcatgtgagaagcagtttttttggtactaacatggaggatcatgataaccaaaaggttagatccctaaaggctgtgtgtaaggctagttgtaaaaataatgggcctagaataaattgtgtaatccttacacggattcccaactaacaggaggatgtaaattctttgaaaccttaaaatcagacatattcatgtcccccttgctaatatatatttcatcaggctttatccaaacttgttggtatactttgaaaatgtattgagtcaggaactacctcttctcaccatagcagtggtggataaaatagaaaagagactatcaggaagacattgtgggatttgattatgagacatatttctgaagaccagaagtaggacggaaatgcaaaaatggtgagtggagctgaggccttgaacttgcaaagcactggttccagaagtaggaaggtaactaaaacagcgccatgcggaacagggtaagagtctggcacattgtttgaggctgcgggttgaagtgaggctccctaccacccaatctgtgagtgaaaggggactgatgaaacgtgcaccagatgttgcctggggctatggtttccaactcaatgcaagcccaaggaggaagaaacgtacaaactcagcccctctccagctgctaagcccagctgctcacgggctctatacagggtctgctcatctccagtactgttacggagcagtcactccaaattgtctttactggagttgattctggattgggggcctggagggtctgtcagccagagagggatgaacacaaagaaaaagagagtaagagaaataaataaaacgtgtttcgttaaaaatgggcctgcccagcaaaatgccaaaatatatgaataaatctcatgctaaaaaaaagatagtcaagttcaatagttggaacatgaattagttacagatgaaagtaattttctgggcaggcagatgaagacatttgttgatgcagaagcacagagggttgagttaattttactcttcagtttagggtacaccactcatcagcctgggcaatgcctctctggtatgtatgtttgtatgtatgtataggtgtatgtatacatatgcatgtatgtatatatgaatgcatgtatatatatatatgtgtgtgtgtgtgtatacatgtattttggccctgatacttcatgtctcatgtcctattcttattctcctcttcttccaacaggcaaccattctagttggtttgatgtatgtgcttttattgtaggtgttcttacaatttgtattaaagttttctgtgtagttttaagctgtgaaagtaatattgtgctatagatctcattctgtttcttacttatttattagtactgtttttgacatctgttttgctgtatatgcatctaattctcagtttctgactgctacatccattccacagaatgcaccccaacttttacttccattttttgatagttgaacaactggattgcacctcactcccactaacacaaacagtgctgtgatgaccatccctaaacatgtagtcttataagtctgtgagaacatttctctgctgggtctcagcagatttgcataattaatttgagtgctgccctccataatgattgtgctagtctatctgcccaaggcaaagaccttaaagtatgttgaggatacttaacgagattaatgaagggatacattttctttaaaaagaataagaaatatgtgacaaataggtataaatgatacaagaataggtggatagaacagaaattttgaaataaaaattagtcattgaaacaaataaaaagtacagagactaaggaaataaaccctagatggggtaaatttcaaaagtgaattagtgaattggaagacagttggaaaaactgactcaaacacagcacagaaagcaagacataaaaatggggaaagcggttaaaagtcacagagaagagactgagaggcttcctcatttgtctagaattctagaagagaatggaggcaaatggtaaagaagcaaatggaggcaaatggtaaagaatggtgaagagatagcagttgagattttccagcattcgagaaaaatataagcccttgggttgaaagtgcagtttgagtattgagcaggataaataaaaataaatccacccccacacatatcatagtaaaattacagaacttcagggaatcagaaccactattaacagcttccaggggacctgcaaaggaggaacttagatgaccgcccactcctcagtgacaaccacaggtgccgggagatagtggagggaaacaactgtcaacgtgaattttattcatacccaaactatcattcacaggtgagggcacagtaaagacattatcagtcataagaagacaaagagcatttaccacccgcaggccctctctccctaaaagaactcaactgaggcagccaagcgtggagggtgagtgcgtggactctggagccaacccccttgggtttgcatccagctgggccacttactgtgtaacctcctgcaagtgactgaatgtcagtgtgcctcagttttgacatctgaaaaatggggataataacagcatttgtgctgtgacaactgaattaggtcacatgtgtcaagtgcttaaggagttcctgacatataataaaaactgtgtaagtgtgaaagttgttatgatcagcaagaagaaaaataaacacaaagatgggggataaaagaagtaatagcataaaatgtaaataaaatatttaagtaaaaatattttattatttgaccattaaaaacctctgtgtgtatgtgtatgtgtgtatctgaaaaccaacattttaggcaataataacaaagtgaagataaagtagtgagatgttcagtggggagttaaaaccagctgtgaccctggatgtggttgggaggaggatatatttggaacaactacagacattgttatagttactttttaactctagaagaataaaaatatgtacagtagcagccaaatcaatagaagatcagaaaaaaaggcaagggatgggtgttgtggggagggaatgccaacattttcacaattcgacagaagccaaggaagaagaaaaaaggaatcagagaaaagaatggggtataaatgatcctgtgtttggtgaaacaaacaatggcaagagctttacatatacgtatgtaaataactgtgtgtttgtgtgtgtgtgtttgtgcacgcacatatgcccttgtgcatatatatgtatatgtatgatgctgtgaccatggaggttatgtgaatgaatatctacaatgctatgacaggttactgagggtggaagtggggtggagagtgaattgggtaggagaggataaagccgagcaagatcaaacaaaatagaaaatgtactttaataaaggcgcatgatttacgattcacataaaagctatatttgtatatatttataaaaagaaataaaaattaaatacccactgcacttccttgatagggaaatgtgatgttactatagcatgctggaaattgcgcttgagcacctgccacacatgtgatgtcatctgccatgtgtgctgactgaaaatattcataaccgaagtctcagcgacagggataggggaaataaggagggtttcagcatcggattatttggcagagctgtgttattcaccagcagcctggcaaagaagtgaaggtggaagacagagagtcccagaggcagcccaagacagcaagggatttccattggcttgggggccaggggtgggggcacctctgagaagccttcttcccttgttgaggtcagggcaacaggtccttccatgggttcctcaaagagaaaggtccagcaatggaacatacagtgggaggccaggagtggcctaaatgctaggcaaatgtttttaagctgccttattctaaactgacatttcatttctccagaattcaagattcttcttccatttagtatgctaaacatcacagttgataacataatcgagtcacagagagagggggaaagcagctccttataaaagatatcaatactttctagaaaaacatcaccggaacttgtcttgatttccccccgtggggattttctcaagggctccccatcacctcggccctatcttgtggaggaggatgtgcctggtaattaatgaacatttcagcttgggatgaaaacaccagacagtagtctgggcttttcaagacagctccttgcttatcattatgacggtacatgataatcacattttggggaatgctctcatttacaaaaaatgaccaaattataccatgtctgggagacccaatttcttttgctgtgggatattcacttgggctacccaagtaatcaaaataatcacacaagattagcacgttctgcctgaagctcaagcatttggctattgtatatgtgtaattaagctaagaagcttattgatatcactatttctgtatgtgatactattatataaacagattcagagaattaagtaagcacatttgttaaaagctcaaacaaacgtggagatgcaagtaggtgagcattaggaaaattttcagctcagcaaccagcatgaattattaaatactaaacatctcagggagctgagggctcatgattgtgttggtatctattcaaaagatgttactttagatgcttgaaagttcttctcagcaaagggggatataaccagcttccaaggcctgccctggaggagtagctgtagttcacaattgttctttctgtttgaagatgtggttccggttgccagaaatgttgtggggggtgagggcagggcccaggtagccactgcctctgatttccatccttatatccccagaagtagcccagggtacactcttaggagtacctgggggcattcaaatctcctctactccagtgtgggtgggacaggtatattccatctgttcccaacatgctcctacttgcactggaggctagtttgtaggacccctcactaactgggaggtagagggcaggttcactgaagggacataaaatcaaccccaagcactgagatgtttgattttgcagtgaatatagttttaaaaacttggattctaacatgaaaacagcaagttttacatggctctttgatataaataatcaactctttcactccaaaataaaacttgattctactcatttaattttaaatcagttagtgcttaaaaaaaagtcagtgggaaaaaacaagccccaattaaggctcactgctggacaaacttccagctggcctgtaaaataattgcctaacacagagttggtgcttcatgatgtgggaattgttctccatttgaagagactggagattaggaggaatgtgttagtgagtttgtgaataaaagacaaaactgaatggaaatggtttcagcttccaggttcaaaagtcattgttagatgttgcatatgcacgttgcgtctttctggtgcaatgggccaggcccaccattgaatctgtgaggctccctgtgctctgtctctgcactcacctccatgggagtggcatgggggtggatacattagtgcatctcaggaaaaccatccaagggagccaacgggggccgagcccagcaggtgcactgggaaactgtggtggagtggggagccagagaaaggtggctagccttcagagacaactgaacagcagtgaaggcccgtcagaggagagggagtggaaaacggcaggagaagttgcagagggaatcctgggcctacaataatggaaagagcatgggttctgggagcaggtagactggcactgccacctcctactgtgaccctaggctacttaatccctttgagcctcaatttcttcattaaaatagggtgataacaccaaccttgcaaggttgctgcaagaattagacccaaggtacataaagcccccagcacagtgcctggcacattgtaggtgcacaatgagtggtggtcatcatggtggtggtagtaataaaaagtaatgattatgaggtgggtggctctgattacaaataacactgcatggaggattgaagcaagctaacctattgcaattgtttctaaggtcttgatcacattcaaatatggcaggacatctgtattttcccctgttcccttttagaaaagcatctttcaggcctaaattaacaagttatcgtgggcccagcagactttgctgaagtgcctctctccgcctcggtggggaggaaggggggacagtcacatgtccttgcaattgtccaaatcagggtttcacaaagcagagctgtgacctttcagcactcgctgactccaactttttacaaatttagtttatctttactaaaccttctcccttctgatcagttatttaccctcaaattcaccatcactttagttagtaatggggtcttccatattccgttatagtcaaatatgattgatttctgtaattggaagtaaatgactttttaaaaagcttgcttgaaatgctggtggtaatggttctgttttcagagcctgggatgatttctatccccatcccgttattttactttattttattccagaaaaataacaccagagctctttctccttttgtttcctctgaggctaaatattttcaaagaggaaagaggaaggagagaggtggagatggacatcccaccattttacagacggtgcttttcaggagtgacatatttcaggaagaacatcgtttccccctccctgaacttgagttctgcctgcctgaaattccagtacgcatggctctgtttcttaccgatctcagtcctggtggatataagctggtcattttggggataatgcataataaggaaatctagggagttaggactagaaaaaagaggcaaagcagacaacataaccaaatgagaggtttttgcagtgaagctttgggagatgagggaagctgcagtacacatggcccgagaactacacttcttcagccaacaaaatgagtgagcagggggagcgggaaatcagaaggtgtgtaagaagggctgatggcacgattttgggtgctgtgtctctggggagtcaacaattccaagggctaatatcaggaaggcagtgaatacccagagagaagaaaaacagagatggagagggaattgccacaatatgcaaagataaaaataatttacaagcttcaggttgaatctttaggggagagagatcctgaaaaattttctgcgtccaagggatagtaaatggaggctaaatatacagagcccattatgatgaatgaaatgttattatgattctttagtgtattggttttaatgttttgttttggtgaatataaaaatatttgtagggacttttataggtttacttgtaaacttaatcttgcttttcacataaaggcgtaatccttaattatggctttttctatcacagggatgttcagttccttcgtggctagggacaggtggataactgtttcctataatgtgggagatgtgataatgtacatcccagagcacagcacttgtttctaatcctcatcgaagcagaagttgatttcatttcagctaatggagcatattgatcatcagctgctccagggtctaacaggtgccaggaggagaccaaaccttcacattctttgaacttgggaaggtaaaatttccagaataaggagcagcctttgccttctatgagaaagtctggatattatctttgagaaaaacatggctctgttggagacaagctaatcattttaatggggcatttgaggtttgtacatgtaaggtaaagatacaccattattttgggggaagctctaaaaatgaaataacccaaatgcaggtaggtgcttctaagtaagagttagatgttctatttagtattctgtcttcagaaacacagatcgggtgcttctttagcagaactataggtttgcagagctagagattaaaaaatatcttcatacagtttatctatgcctaaaaagtaatgcttgtactttggatgttgtgatggttagttttatatgtcaaagcgtataggctacagtgctcagatgtttgcttaaacactagtctagaggttgcttttagatgtggttaatgtttaaatcagtagccttcaagaaaaatagattaccatccataatgggagtgggcctcacccagtcagttaaaggccttaagagaaaaaagactgaagtcctccagagcagaatgaattgtgcctccagactgcctttggacttgacctgcaacatcaactcttctttggctctccagcttataggcttgccctgttcgagttgaacttgccagcccctacaatctcatgagccaatgcctcaaaataaatctctctctctctgtatctatgcacatccttttggctctgtttttctggagaaccctgactaatacagatgatgtggatgtgtccttgtccaagcacctgctgtagctctttgggaacagtgggcagtcaacggtgggatgaatatgtaggtctgatcttgtccccacctcacatgtgaatggagactttcatccaggtactcaatagtggtcacaacaatgagggaaagacacttttgtactgagtgagctgagccgggtcctgcgactaaagaaccgcctgtctcatcaggccaatggcacccccattgagaaacgctgcttttgaggaaagatggaacaagttgttggtcactggggggagtcccaccttgactgatgacatgcttgtgtcattgaagactgaatggcccagagttttggaaaacaaactgctataaactatcttgtgagagctatgggtccaggcagtgctctggagaaagtgaacatacaaataggctgttgggccctgtgtccactgcaggtttttcttggagcaggcctgcctgagggtgtgtggaagcctccatgaatgaggctggaagcctatgggtcaaagccctccaagaaaccagaaggagctttcagctgctctccaagaagcatttcttttaagcttaagcctccaacagtaccttgttcaagtttgcctcacctagtcagatgccatcgccagggccacagggtctttgaggcttggtagcagccaccagcaatggcaccattagaggatagcgtgcccagcaggcagcagcccctatagcacgagagcagataaggaagacagaggggaagggcctcaggcaggcgctccagagcagtgcttggaggcagtgcttgaagagacttctgggtacagtctggggacttgctttgatgggagtggattaatttccagcagtaaagccaggagggactttggccataatattttgggaataagaaggagacgcaccctgtttggctgtcacaggctggtgagtcctgggacatgtgggactcattgtgagaagtttcctttagtgctgtcacccctccaggaacaaggatgggtggcttataaaggcgagcaagaggcaagaaagctgtgcaaactggaaaagggcggcattctttcagacacaggctggatgattatattcctaactcatgccaatcctaactcacaaactgctgaagaaatgaaatctggttaaatgtgttcctttttgcccttcttaaaaatatcaaaagcaagtatttttcagacagctttataccggccacactggccaggccttgtgggctccaaaacaaacacacctgagctagacttggtcagcattgggaggccagagaggtggccaaggaattaataaaggaatctaaagatttttctctatccccaaaggctgccacttgagatagttcttgctttgggggagtcatgtgagtgtgtggcaaggagaggggaagagggttgtgggggagaagcttctgaatccattcagcttcatgcgacaggattttgactctggcctgtcactggaaacagatctgaccccttctccacggtgatatttgtaatcttttctctttgcagtcaagggtatcaatgaagagtgaatgtgtatgacatgcagtttttggtgagaagtttactgtgggccttaggatattttctgctggagacaatacacttgatgtaatgattttctgtaccacagaaatcacaggaatctgttttctaaggattgattacatgtcagctgactaacgtcaacagtcctttgtgggttggtattttaacaatgtggcagtgtttagaggaattggtggtttttacctggatcttaggaaatcaccaatgatgataatacaatgggtgaacaatgggtaagctaagatgttgcacgtacatgaagaagagataagtatctgaatggcaaataggtgcccctaattcctaatagtgtaacattatcaatgaggacagtgacttctaggaagttgttacagtggccggaggccagtagcctttctgcagttgctcaagtcactttggttgagaaagcctgcataatccagctcccattttcctctgtcttcttttcaccatctgagttatctcagaggtaacaccccataccccctatcttagtgtggtttctcctggaagcagaccctagtacaagtagtttatttgggaaatgatccctggaagcactggtaacagacaagggaagtgagacatggagggaaggcagccaatctagggggcaatggcaagccattttccactatgggcaattggagctcaatcccacttggagactctaggggcctgtagaggatacatgcctcagagctctcactcctgcagagggagggagctggggtacgtatacaccaactgccaacagtcattgattgagtcctcccggggcaggggattttaattccccagcaccagcctgccccacatatatctcttgagtaggtgaaaaatgctctcgggggagtgggtagtgctagcaggtgaagtcatgctagtgtgcacatgcctggcatgtggaagggatgcaggtggggctctgacaacatctaccctgttccttatttcttgtttttcattatccttgtctgaaaaatattactactgcctgtagttaatatagtctcttacaaacaaacctaattctttggcaacaaaactagcagagaaagaggcagaggaaatgaaacattctagctagtctattgcctgatttcttataggcctggctggtattttgggagtcaggtttgttttctggcctggcaaataggagtaactgtagcagcccttggttttctatggaccctattttaatagaatgcagactgcttagactttggctcacattctgcatgctgaggtgagctactctttcctcacttgctgcctcagtttccctttttgcagtgacacctcagataggaagctctgacatcagaagctcttcaattcagcttctacttggggcaatggaaaaggtacgatgtgttactgtgatggaaagcactgtcaaccaaccctggcagaggtgccaggggcatgagggactcaagccgtttcgaggactcatcctagaacaatgcaaacaattgtcctcaatcctgggtctatgggcctgtttactcactccgtgctgtgcccggcagaaacttgcagtgatttaggaagtcagggagagacatttctggctgtgcggaacctgatgaaatactgttttgtggagacagactaaaaaataaccaaacggtctttaagtggaacagagatcagaaaatctcctgaggcacatttaagaaacccatcaattttgctggcttggccatagaagggaaaattgcactgcaaatgattatctctgatgaaatgttcccaagtcttttacagggcacttatttgtagtgacctattactccaccaacgaggcctgactgagaagcccccactgggtggtttataaggggagtctgcagagtaattgcaggctcaatcctgagggcctcctgtgtcctatcttctcaaccaccttacaggtatcctgaggctggggactctcctatggatttgtgtgttttccacagggcctccaactttacagatgtacataaattactgaatgaataaacctgagaccaaggctttctgcccaaagtcctcatcgtagaagccctcaatttcctacttgccctgaccaaactgaggaaaagctgtggcaaaagctcctactgcgttcagcctgaaataattcaccacaacctgtatcatcaacccatacccaattacctaaagtgctctttctagagaaattaaaaaaaaaattctgttctccaacataagattcattttaaaatgacagctgaggtcatttcttttataaaagctgaggtgggttgtctgatattccctcctgtcttctttccttggtggattcatactgttttattttttatttattattaaatatggtaaaattgacttgggagcatgtgtgtgcatcatgggtttggacacacacatagatttgtgtagccaccttcaaaagcaggatccccaagagttctgtcacccctggactccctcacaaggccatgttggactcacacccttctcccacccctgccctgcattgtggaagttctcactttttcagaatgtcatatagctggaatcagatagtaggaggctttatgagactggcttctttcatccagcacaatgcctttgagagtcactcatgttgtcttatttaccagcagtctgctctttttattgctgagtaatgttctattgtatgcactctattgaagtctatcccctcactcactgaaggacatttgggttaccaccagtttttggcaattatgaagagaacccttacaaacatctgcatacaagtttgtgtgtgaacctaagttttcatttctctagggtaggtagttggcttgtatggtatgtctgttgaattttgtaagaaatggccaagttgttgtccaaggtgtctgccccattttgcatgctgactagcaacatacaagagttccagttgctccacatccttgctattacttggtattgtcagttaaaaaattaaaaacattttaagctattctaataaacaaatggtcatatctcatcattgtttagattcaaatttctctaatgctaatgagggggaacatttttgcatgcgttcatttgccatctgtacgtcctttttggtgaagtatctggtcaggccttttgcacccccaccatttttaaaataaatgaactgtttgttttctgagtgttgaattttgagagttaatatttatgtattttttatattctgtatagaagtcctttgtgagatatgatatctgaaaatattttctcccagtctgtcacttgtcttttcattctcttaacagtgaatttcacagaccaaaagtagttaattttgataaatctgatttattactttaattttattggttgtacttttggtatgatgtttaagaacatgttgcgaaaccccagacatgaagagtttctcatactcattcttctaaaattttatagttttacattttctacttagatctatgatctgttttgactcaatttttgtatatggtgtaagattacattgagattcttcttttttccttcagtacatggatatccaattgttttaatattgcttgttgaaaaaaaccctattctttcttcattgcctcggcagtgttgaaaatcaatgaaccttacaggtgtgggtctgtttttggactctgtatcctgttccattgatctacatatctattcttttgccagtgtcaacactgtcttaattacagcagcttacagtaagtcttaaaattgtgtggtgtgacttctccagctttattcttctcttataaaattattctagctattctaattctatggtctttccatacaaattttgcaattaccttcactatagctacacaaagttctgctgggattttgaatagaactgcattacatttaaaggtcagtttagggagaattgacatcgttcctatattgagtcttttaatccataaacatttttttgcctccatttatttatgtcttttttgattttttttattagagtttgttgggtttcaatgtagagatcttccatatgttttgatagttttatacctaaatatttctctctgtattttttggaattactataaattatatattagcatttaatatatatatgactataatatatttaaaagtataaaataatatttaattttggtaaacaattattactagaatgtaggaatataattgatttttatgtgtagaccttgtatcctacagtcttgctaaactcttttattgtttataggagcttttctgtaaattcttgaaattatctaagtagacaaatacatcatgtgtgaacagggacagctttacttcttcctttcacattctatgccttttatatatttttcttgcttacttgcagtgtctaggactttcagtactgtattaaacaggagtggtgagagtcaacaactttgtcttgctgccgatcttagagaaaagcattaagttattcaccattaattatgatgttagctgcaagttttaaatagatgtccttcatcaggttgagaaagttcctttgtattctagtttgctggagtttttattgtgatgaatgctaaattttatcaaatactttcctgtgccactttatacgatcatgaggtttttcttccttaatctattaacatggtggattatattgattgatttttgaatactgaaccagaattgtattcctgagataagcctcacttggtcatggtatattagtctttttatatattgttgtattcaatatgctagtatttgtgtatatttatgggggatttagtctatagttttcttgtgatgtctttgtctggtttgggatcaggataatactggcctaataaaatgaattgggaagtgttccctcttctgttttctggaagagattatataaaattggtgttatttctttttaaaatgtttggtagaatactacaatgaaactctctgggccttcattctttttgggagacttttaagtatgaattcaattcctttagtagatggtatgaaaccattcaggttatttatttcttcttgaatgagttttggtagtttgtgactttcaaggaatttgtctacttttatctaaattgtcacatttgtgtagactgtttataatattctcttatcctttcaatgtctgtaatgatatttcctctttcttatttatttttttttgatatagagtcttgctctgttgcccaggctggagtgcagtggtgcgatttcagctcactgcaacctccgcctgggttcaagtgattctcgtgcctcagcttcccgagtagctggggattacaggggtgtgctaccatattcagctaatttttgtatttttggtagagatggggtttcaccatgttgtccaggctggtctcaaagtgatccgcctgcctcagcctcccatagtgctgggattacaggcctgagccagcttgctaggctgatatcccctttttcgttcctggtattggttattttgtcttttctctttctttgtcaacctggctagatgtttatcaatgttattgatcttttcaaagaaccagtttcggtttcactgattttctttattgtgtttctcttttgtattttattgagttttgttcttatctttattatttccttccttccacttgctttggaattatttttgttctttttctagtttcttaagatggaagctaagcttgttgattagatcttttctctttgccactatatgtgttgaatgctataaatttccctctaaatactgtttcaactgcagcacacaaattttggtggattttatttttattttcctttagttcaaaatatttctagtttatcttgggactttctttttgagtcttaggtgatttggaaatgtgttgtttaacctgcaagtatttgttgtttttggagacaagttctcactctcttacccaggctggaatgcagtggcacaatcatagctcactgtagcctcaaactcctgggctcaagaaatcctcctgcctcagcctcctaagtagctgggactataggcatgtgccaccatgctcagctaattaaacttttttcttttttttggtagagatggggtctcactatgttgctcaggctggtcttgaactcctggcctcaagtgaccctcccaccttggcttccaaagcactaggattacaggcatgagccactgtgcccagcttcaagtaattttggatcatatccagaacatgttcagggtcttatttaaattctaaaaaagactcctgttttttttttgttgccgtttaagcagacaatcagcctgattaggttcaggtcacaaattccaataagccttctttgagctgtggttttttaatttttcctttttacaagattgcagtatttacttcaaaaaatacattgcttcataagcttcaaaaatagacctggctttgctttagattactgatgcaggcactttataaactttatatctttgatgtcccttgcctattaagatgccccttgatgtctttttgcctgttgagtttatttggtacattacccatttctgtagtcattccttaattatttgcttttgtcttccaacaaaaaggagggcccaaggatcctagtgtttgctaatgagttgctaggttctgctacattccagttatttattaggatgtcttctagacttcagcatcatctcaacatgtgttaatatgctgtttggcaaaacaactaaattttaaaaatattcatgcatcattggtaatgtcttcaataaggattaaattaataaaatcagtctttacctcattacgaaacatatattttcagcagtaaactcatcagacttgtggtctggtgcaagttttaaccatctgtatgcaggagtcatttattcatgtagtggttagtggttctgaaacaaatgatctgaaatcaccatctctagttttgatctggacatgtttttagtgacaatcagtgtagtgtgaccaaggttactttaaatatcttccttgggccagtgctatagtgaggtagagtcagtacctcccaatttaaagcaacttgaaaaacagaaaaaagcaactgtcctagggttcttccaaaaatcataagagaaaattaaaacaagtgacagactggaagaaaacatctgctacgtattctatagacaaaggcctaatatccagaggacacaaagagctcctacaactcagaaagagaaattcaactaaccaatgggcagagaatatgagatacatgaaaaagtattcaatttcaccagctcttagggaaatgcaaatgaaaacaataacgaaatgccatattttgctctccaaatggcaaaaactaaaatggctgatatgatcatgtacaagcaaggatgcagggaaatgagtactgtcacacactggaaggaatataaactaatgaagctctttgggaaggcaactggggagtagtcatgaaagttaaaaatacacgtatactgttgctccccctaattctacttctactcatctatcgcaaagaaacattcacatttgtacacaaaaatgcatgcactgtttgtaatagagaaaaactggaaaaaaaggtgaaatgtctgttacaagaaagtagttaatagtatttacatagtttatttcaccataaaaaatggtgagtttctcatttaacatactcactgttaaatgagaaaagcaagggggcagaatgatactttatggtcctatttatgcaacaaaacaagatatctttgtacataggtgcctctctctctctctctctctttctttctctccaaatgcacagaagaggatggaaggagatacatcaaattgttgaaagtggctactctcctctggggcaggggcatgattggtagtaggtgagagaaaatgtgtgggctgcttacattttgctatgtatattaatgtattgttcaaactatggcaaaatgtacccatgaatcacttatgcagttaaaaagagacaaaacccaccaccccaatgaatctatgactttctgaactccagattaagggagagaacctaggaaggaaggcctgtcctcccttgactaacttagtcctcttcccgttaacctctctgcctctttcctttattgtcagctccatcccttactagctccatcccttactagcaataaaggaatattgcgtatgaatatgagcaatattcataagtttcagtttcttcatctgtagtaggggtattataataataatagtgcctctatcaaagttagctattatgatgatgacggggactctacttctttgactcttgctggcctacggtctgtgcttagatacacagtcactggcagtgggcttctctgtttgccaccagtcctttcaggcaatcctatctctgtccaagcattgacacctgactttgggaagtccccatggcactcctagttgaagtccctggccacccttttggccttgttcaggtagctgccagggtcctgctgttactagttttgccaccgaaactgcctgggctgggcttttgttcatgagatgcctcatcagtgacatagcctagatgtgcttgggagcatctctgctttttcaatgttgcccagtggcagtcatctacctgccagaaggggagtgctgagtccctgaggatggacaagtgtctgcgtggtgtttcactatctcctctgaaggtctgtgctttaacaaacagcttgctgtagggctgcacatgcatacttttaggctggcttcaataagttctggtgcagactatgtgttagagagccagtctggtccacaggatcatgttaccacatgaagccagcaccaaactgaggccgtctccatgctgagtggaatggcggctgcgaggagggctattcccacccttgtgtgttctgcttttggaggctctcagtggatttcaacagggggactcatcagtgtttccagagtagttgacaagagacacagcaaaccttctgctatttgcaggtattccctgttcagcatcactgacaaaaccctcttccccacctctgtcccagctataaatgttcatccttctaatcaatacaagacaataaaacacacttttccttcttagaagtgaaacaacaaattaccaactatctgccctgggcaaatcagtcagtggagcacagttcctgctggtatatttaaagagagtctccttccttttagagagtgccgagagggcctcagcctggagggaccacacgcttaccaatatgcccctgtggctctgcatccaggagtcctggtttatatacagctgccacttttctgcagggttattctgatatctagataataatatctgctggcaaagttatttttgaaatacttgaatgaaaattatcatgtcaagaatgtacattactactacgatgagatttagaatgcatcagctgctttctgaaaatgtgaaatgactctcccataagggaaagaaatttcattttaaggcatttcattaaaatgaaataggtgttgagaaagttggttatttgaaagagattcaacttagagcctcagcttacataccatattctataataaatcctaaatgagttgagtgtgaaaaattgaacaatataaaaaacactataagtaaatttaggaaggtattaaacagatccctgacaatgaacaacctaccattattattattacattgactgtttctaaatatgaaagcaatggaggaactcataaaagaaaagatcaatggatttgactgtatgaaaaataataatgtactataaattataatgtaccttactaatcactattactactggtaaaacaaaggggcaatagtgagttgcttctttgagaacctggaaattaaggaattgatgtcacctaataagagctgaactagcaaaaaatcttcacacagctctccctgagataaaaccaagagcatatgcgatatcaattattgcacctgtcctacctataccctttttaaaagagagagcttcctcccctttgctgcctaggtgaccactttctgacatacaagacctcttttcctccttggtcatagtttcctggaccagaggtgggttcctgaccccaaagcagcacatgcttaagcctgccagcagctactgtcctaaaggcctagaaaacacaaattggtccagtcaaattctctttctcatacctttgagctaagaaataagcagataagtagctcattagccttggggactggatattaaaggatattttcaggtacagctgggaccagggaagaccaaagccatgaggaagtgggactatggtcagcagggccagccggttacaagagcagacaggcacagagggagcaagaggcgctgagggaggcctggaggcagaacgctgggctctaaggccaccctgggtcctcttggctctccaggtcctggttccagctcctattacagcttggaggggcctcagatcttatgatcgtatcttaatgggattcttgtcatcaccacacatgtatcctaaccctgagctagctcatcaggtttatgtttctaaaatcaaaagagccaaactagaagtgattgtttctgtgaccccaaatcctatgaaaagtgacttgcggttcatcctggagaggtaggagtgggataaaattatggtttagtaagaagaagcctcacaaatggtgctttactgtgtctggtgaaagaggtattgtgtgcagaaggaggctggtcagcctggagaacagatgagtcaggttggcaatggtgagtgagcactgtccagagaaggcagggattggaccaaggcctatcattgttgcaggaatgttcactgctgtgagcaatggaagccttgtgaggcttaattgtgaccatgggaacctatctctccaaactctttacttctcttagttttgattccctttgtgcttggagaggctcacttatcagcctttcaacaactaatctagcttgtttcctgggaggatgtgccatggatagaggtggtttaagagttcctggctataaaagaacatccaccatggtaaataaataagttgtccccctgatttgcagtccatttgacgggcatgggtcagcattcctctgttctcctagccaggtcgtggaccttggttcactcactaaggcaagactactctgtcaggactcttggaaggtagccatccatcttttcttggtggcattccaaccaaatcattgcttccttctctatatatgataattattagtgttcaatcttgctagtgaaggtacactacagccctccaacttgcttcaaatcattttttttgtttgatctccaaactatgacagcaaaacattaaatttcatgaagatatcagtcatactggttatgggttgttactcagataacttcatgtcttggaatattctgcaatttcagtgatacctgaactgttacagagagaccttaataagtcatctttgctcttttcgtctctagatacctgagtcatctcagaaagatgcttttgtgtcttgcttttcaagagtcccgtgatctctatcatttaataaccttcttgtcaaaatgttctttcacgtgatcaaatacattttcaatacaattgcaaattatttcttcctttttggagtctctttaaagctgaattataatttattggtccttctgtatatcatcaagtaatacacagtcggttctcttacaaccatgtttctttaacaggaattatctcatatgcaattggttaacagggaactgatgtcagtgtaatacatagtcttatttgttcacataggattttctcctcgtatgttaaaattttgcaccaccaagtaaaaacaactgaatacaaagtaagttggcacagctgagcccaggaagctgtggagaaatgcaggactgaactgcagcccccttgcctccatgttcctttttgtggtccagcgtggctgggtgctgtctcttagggggggcttatcgtgctgctgtcccccatctctgcacatgatgctcatgtctccatctctcagcagcctcaacccttccttaaatcctcttctatcatgataaccttattttggaaaaaaaaaatctgatgttttaataatagattgtgttgccttatgtattaggaatttagcatgccatttttatcattatttttaatagggttgtaattggttttgttagagttaaagcagtgtgggttctgagtggtctccctcagtcttaattttcctataatccccgagttttcagtgtgccattttgtatttgttccattatagcacctatacttaaatccaatctttaagctccccattcacagctttcttttttccaggataaagaagtctaactgttgtcttttctcataagaactacctcccattgctttacagatgtctcctatttcaggccatagataaatttctgtaaggtctgtagtaaacataatttttgtgtgcttagcatttcttcctttggagaaagatacctgctctattccttaaaaattttgttcagtttatgtggtgcagatgggctaagcacctgcctgaggagtggggacatgatctaggcctagtcagtcagagtgttttattcccctggctatagggattggttcagagatgggtacctgacttaagccaggtcgatcattcgtccctccaatgacttttgccagtgttgttgggcaaggtccctttcaacgaaggtacgaattctaaagaccacgtaaacttggagttgccaggggcatcttgccactaactggggagaggctgtcagacaatgtagtcaagcagaactgagacaaggagggagaggagaggagaggagagagagatgcatttgaagctagttgtactccttagattccccacttacctgagacaacacatttccttctattcttacagtcaaacattgtaaccaatgcaagttgggtacaaaaaattaattgaagtttttgataagcgtaattttaaaaatcagacaatactctagtgcactagcagagtgtgttattgaaaataaatgtggtgaatcatttaataaatcaaaaattactttgtaacttttaaatcatctctttacctgcttttctctgaaccatttctattcttgtagggatctggaattactgaggaaatgcagtataatgttgacatggaaatgctgggtagagggaagggatgacatcttggcttttatatttcttacttttgagaatataatatttttttttactttatggtaacacattttgattttctggtccccgatgactcctctgcctgcccttaatcaggctttctcgagtccttatttgtgctggttttggtacataagcataaatatttcattacacctattcctactaaaccacatctacgtttatgctttgaattcttttgtattttttgaagcatcagtaaacccactcagttggaattgtatacagcctgagaatacaacccttcaactctattctccaaaccactgaaaatgatagttgaaacacatgtgggacactgaatcctaccacggctgctgcaaacccatgggggacctttgtgcaaactagaaaaaggtgtgccttcctatgggcagatgtaacgctgagtggcgcacatgggatggagagcaagggcaggctggacttcagccccactcactgccacaactgggccccaaagtgccaaagatgacctgtcattaatcacgctacaaagagacttttaattttcgtgggctatgctcaaagctcctgagctagggtctagtttgagccttttgttaggcatatcgtgtaggataaaggccaaagaatcagggaaactgaataacaactgagagaaatttaaactcagaagacaatgtcaaagtcaggtaaatgtgaatttatggagatcatatatagtgttaaaaagttctggagttggacagaaattctagtctggccacttacaaaggccatttcactgcaactcattgaaaaaaaaaaatctggccaggtgtggtggctcatgcctgtaatcccaacactttgggaggctgaagcaggtggatcacaaggtcaggagttcaagatcagcctggccaagatggtgaaaccctgtctctactaaaaatacaaaaaattagccaggtgtggtggtgggcgcctataatcccagctactcaggaggctgaggcagagaattgcttgaacccgggaggcagaagttgcagtgacccgagattgcgctattgcactccagcctggatgacagagtgaaactctgtctcaaaacaaacaaacaaagaaacaaaacctataaaacagtgaaaataccatatttcatagaatctaagacaatgtcaactagaagaccaatcgccaatacagagatttttaaaatgtaaaaaaaaaaaaaaaaaaaaaaaaggccaaatgggacggttaaatacatcccgacaacacagatgttaagagtgtaaaaactgtgtccttagaatctgtgacatatatggtaaaacccaccttacaggtgtgtctcctccctgtgaggattaaatgagataacataggtcaagttctcaggccagcctggagtaagtgctcaataaatgctgaaggctgctgttactgctggtgttgtccttgtaatttggagctggcaacaaatagtaacaaaaggatatacttgatccgggtcatcataatctagcaaaacagcctggatgttgtcttttccttactccaggataagttacaagaagcagacatgcaggaggtaggtccaaaagtaaacctccaatgacgcttaagtacagaacatgcacagaactgacaaatagcaaaaacagtctggtttattctgccgacagagacccagatctgagaaatgattttcccaaatcccagatgtacaagagaaacattttttaaaagggcattggtcaaatggtgggttggggggttctttgaatttggagtagggggaaaaaaacttccagaatattttgctagcttttctagtgtttgtttttctctttctttgcctctcactaacagcttcttctattacattccccgtgatttttgaattgattgctgagtgcctcactagtgaaaacccactgtgcagcctcctgtgatgtgagttttcatttaggcctggaggggtctgtggagggatgaagaggtgccaagaggtgtcagtcaagctcttttacctgcctgcaaggcagctgtttcaggactagtctggagtgggccttaagccagtgaacagccattcattgtcctttgttgccaaagacaatgctgccagtggtaaaacagtgatgatgtaaaaaaactaatgcctggattctagtaagcaaaaccatgcctggcttatgccactgcctctaaagcagtctacttcttttcccagtttgggctcagtggcgtttttggagacatgacagatggaagcagggtgtaaatgaacatgtgcgaaaccccagcccatgtgaagaaaagcagccgaatgatcttgtatatggaacaggtagatacaataaaaatggctctccgacagaaacacagactcttattatttttcagggagattttaaattggttactcctcccatttcttatttcaacttatttcaacatcaggattgatgtaaatggcgtctagagaaagacaaaaaggagtttgtggcaagagtttatctacctagttgggttggcttcttttaagagaaggaaattatatggaagttcagactgattatgccatataaaaattagatattatacagccactactaaattgatagcctttagggagttttgagaaggaaggcagctcaagaggcagctgtggatcacaatgtcagagaaaaaacaaactacccgaggagacagtggcaacctgaactttaaacatgtgggctgactggtttgcagttcacaaatacagcttttgtttcttctctgcaggccaattacgtgtgtacccctcggcatctcaatcttgcctcagggtccagaggcaggatgtagcccagtttgggagtggagctgaggcaccatcccgtgcagacagggcaaattcatgtcatgctcctgcctcctgcctcctagattcactgaaggactccttggggactgcaaattccatttgatttcatttctccctaagaaaaatgcactcactcatatcctaaatttccagaaacttgtgtccttcaaggttgccttggaaattttaaatgtgtgtgcaagttccaccttcctcctccttagtcctaacctggtgtctgagatgtcgtgatggcaggctactccctgaggtcaagcaccgtgagggggtattcagtaatacggctgagtctcaatgacccactcacctgggccccttggattagagcacaatttgaaagatgggtggccaggaatgggtctcactgtggtatttgcataaagtgaagtgaagactggcattggctttataggcatcactgaattaactatgttcttggcagcaatggaagcttgaatctcaatattggtgtgaactatgcttgttattttctggataaaacaaatgtttacttgtccagatcttctcctagcatatctgggccctttgaacatgaattataagcagacatcttctctgggcagatcaaatgacagccctcagttggttggcccttggctcttgggcaggaaacacctgtgcagattttaaggcagcccccaacctgcctaatcttcagaatgtggcaaacttgctccaccaacatacacgattgcaccacagttatggggaatttgtagttatttccattgtactcagagtgaaaaaactaagtatattagtatagtcaattggtgccttccatcattagtctatttcattaatgttggaacggttttattttggtttacagagtaagatattttttaagagcaaaagtttatattatttcttagggagaaacagtttataaaaggtcttctctcttatccctccaaggatgaaaacagaccactgggtcccttgaggtaagaggatgctgacaaattggccctggctccactgaagtcagcttcctctttccctccttctccccttcaagccaagtagactatcactgcccactgtctgggactgggatgccccccagcagagtgtctgccttcccacctgaaggagatcagcctaggatcaatttccttattggtgtgggtgactgggccctctgagaatcagatgagctatggatggacataatcttcagaaaaatacaaacattcctaactcccagtttttctcatgcagttttaggatgttcaggaatccaggtcaagaaaggggtttgaaatctttttttgtgccagcgatcttctggcagtctgatgaccttacggaccccttctcaggataataatttggtgcataaattaaaatacgcaggcttttaagataaaccaattatattgaaatagttatcaaaattgtaaaaccttttgtgatacagaaatatctatgtacttttatataaatgtattaaataaaaagatctaatggtgagtctaataaccactgtaattttgtactgatagcacaaaagatattttacaacgtctgcccctctgtgatatgacatgcaggcctctgtgacttccactgggttcatcattgaggtggtgctaagtttcagttagaggttagtagaaatacaggggcatttctctcctatcaagatcctggaccttaggtcaagaactcctgagacacaaggattctgagtgtggctgttggctgtgtctctgggtctggctgcctcagccccttctgtctcaggccacagaggggactgtggggctcctgtttaccgaccgagacaaactgaggctatcgtgatttttatattctgttagaaaaattaaagggggcactcacagtggcttctgtcctgtcctcacttgtaggcggagaaaagggggtagtaagagagacccagcgggccagctgtgagccagtaactgctgccttctccagcacagaggtgaggcacagggatcgcctctgtgaagctgccctgggcctgggagatgggtctctgtggtatcttttagtttgggatgaaaaaaacattgtcctcttacttttaaaaggatttgaggctgggtgtggtggctcaccacctgtagtcccagcactttgggaggccgaggtgggtggatcacttgaggtcaggagttcgagaccagcctagccaacgtggtgaaaccccatctctactaaaatcacaaaaattagctgggtgtgatggcatgcacccatagtcccagtcacatgggaagctgaggcaggagaatcacttgaacctgggaggtggaggttgcagtgagctgagatcacgccactgcactccagcctgggcaacagagtgagactctgtctcaaaaaaaaaaaaaaaaaaaaaagagaattcgaggcacattttactgagttgcctcttgccttaacttcacctttgcaggggtactcacctaagtggggagccctccgtggcagcctccaccttgggaaggcacgatggcttgtttttgcttcttatccttccaccagcttattgactgatgctaaaatatcatacctgtgccaaatatgctaagcagaagctttgggaggtgtaagagtgtttccccatacttgaaatacgaaatgacgtctcactgtaaccgtgaagttatgattagctgagctactgctgaaaaacaccagggaaaagcacaactctctgattgggatgctggagctcaggtctgcctgaggatgaaaagttcaagttctagacaaaagaaagtgcttttcctgctgggtggtgggagggatcacacacttcctagggaaggctctcaaagcagcttccttggcaggggctctcctgaaactggccatttggggcttcatggccatttggaggcacatcatgacctgattttcaccaggaaaatggtttctgaaagaggctcacagaatatcatctgcttaccaattttacttcttgcttcatttatactttctcccagggccttggcttcagaaaatctggaggggaaaaaaatgaaaattgtagtttttctgttcatcctacaagatgttttaaaaataatagatttcttagaggtcactaaaatatgatgaaactttattgaaagacacaaaagaaaaatctaaataagtaaaatatattaggcttaaaaatagagagaaaattggtattaattataggtattgttaatttttactctatccagcacagaatttgtattctcatagtctctcatttatgacttttaatttatattatttcatgatgcaaagatatcagaataaagcctggctgtaaggtttctgtgctgtgttctattgattatgataccaagatcttataaccaaagaatatatacttacataacttttttctgattataaaataatatatcagaggttgtaaaactatggctggttatgagacaaatctggcctgctgcctgtttctgtaaataaagttgccctggaacaccgccactcctattcactgacgcattttctgtggctgctttcacgctacaagacagagtcgactagatgtgacagagactgcgtggcctacagggctgaaaatattttctacctcaccctttatagaagaagtttgctgattcctgttatataccgttattaagccagattttgaaaatacaaaaacaagaaaaaaattctcaagtactcctctacccagaaataagcacattggatacacgtatccaccccgtcttttatagagccagtttttatagggttgggatcataatacagatatgattttgtgccccgatgtttttttttcacttagcattgtaacataagtccttccctgtattatgagatgcatacctttgatggcttcatgctagtctactagattgctgtgctaatgtttagtgagtgattcctttatgtttctggcctatgtttgagacacccacgatgagccaactttgcgctagagaagcagacaggacatggcctatgtgagaacatgtagttcagtccctatacatagtgggccctcatgaaatgttagttgctttccctcctctcctttctgccatgaagttaaagagacaattgaaagcctatgaaagcaagcacctaatagatagctgaattaaatggctgtaccttggcggggctagtcatgccattagcgtttgactagggagtggcctgtccacgagtgagcggagagctgtcaggaaagcttcatgtacaaggtgggagtgacctgggttttgtggatccacaggagtttttagaaaatgttttattatgaaaatttccaaatatacacaggatagtagaatgaaccctaacatacccagtatcacattttattaattgtccagttttatttcaactatttcccctcctcctccgcactcttctcttctcacttccccatctctaatatcccggcaaatcccagatatcctattgtttcatccttgaacactttagttgactgggattgtgttggaggaagtgagcagaggagggcattccaggcaggggaacaacaaaagcaaaggccagagtgccacgactgctctgtgttggatggaaaagaagtgtgaattatgtcattgctattttccaaatctgtctgcttggcctgggactgtggacaggaggtttccagggaaggggactaaagtttttctcaatgttagtttcttgggactccgcccctggctcccttattaaggctgttcaggctcatcgtagattatgtatgttctctcctcagcgacggcctgtcaccttccagggagaagtacagttccacttgatgcaattcagacatttacatgatgcacaggtcactgtgctgggctctgtgggctcatatggcctctgctgctgggcaggcataaggcgacatttgctgcaggccatttggaagatgaggaccatcttcaactctccattctgccaagggagggcctatgatcatttcatcactgctctgtccatccctagtacctaggattcataggatctgacagtcacacgttgctcaacgagtgactcctcccatttcctgttccataggcttctggaagctttagactcttcggaataaggaaaatacaagagcaagggtgcaaaactgctgaaattcacactgaaattcacatcaatgctggaggaaaccagagtacagatagaaaaggaagacaacataagcagaagaaggactttccaccgcagtgctgcccagagaatccctgacaagcctgggatggagtcccccagccttggcggtgcccagatgtgtctggggggcctggcagagggagccgctgagtgctgtggtcaactctctccaaagagccgccctgctccagagctggcagaaactgtgtggaaagccacgagctgttcctgtttctctgttgcagcccagtcctgagctaaaaagggctttcccactggagaggtgtggtctgagggctgtgcagtcttcatgagaccattttcccgtcactctggaagttgtcaccactccaggccaccccacccacatgtgttcctgatccctggttgtcaagacgaactctgaaaggcccaaccctgagtgtgtagagggaaagagcaagtgtcaaaggagatgggagagatgagaaggctaaggactcggttaggaaagatgcgagaaagagggtgaccccatcagtgctgccacgttcttcctggcccacctgcatctccacgcctctccagccagccccagtctccctccctcctcacttactccctttcctcctgcccctccgtctgaattctgctcacctaaacttcaccagggggagtttcctgcctcctgattatctaaaaggcgcatcctcatccatgagatggctcagggagccaacttttggccaagggtatgctgcacccctgtacgatatcctaaggtgctgctcactgctatgctgatgaggctgcaccttgaggaggggcaggaaggttgtgtaactcagccaggaccactgatgagcgcccgagggtttctttctattggtgccaaagcattcctattagggcgtcgttagttgtgtggctggctttggggagtgtaagatagctgggtgcagttccagtgtggatgcaggcaggctgccatgtcacctgcacacaaaatcctgtgcaggggcaggggctgggcttggaagggagaaggaatgcgatgctctgctgttcttctactagcctggcttcccgtaacacccagccctcctcaactatggctcccactgtgtgccagacaggtacttgcagaccctggggaaatgctctgttattggcttccaagggccccggctcttctgtctttttccccctctctctggcacctccttctcagtctcctttgctgatgtgttctgcagcctgttccttgaatgttgataatccacaggattttgtcctaggcccactcctcattttccctactccctgtaggcattccctttatgccagcatctccttggctatctcaactgtcatctctcaaatctccacctcagccctgctttagttcctgactcaggtatccaacagcctgtttgataccttgaagataactaaaatcgactgtacccaaaaagaactaatcatctgccctgaacacctcccctgtttttcctgttgttcctgtctcaatgcacagcaccatcacttacggatggctcatgtcagtaacctgcacgccaccctttgcccctctctccattagcgccttccctcaatcctggagtctcagccattctctatcctcaatatctatcagagcattccacttagctccaactgcctgagagcagaacgctgccatctctcccagattattgcaaccactgcttgctccttcccctgcaatcgcactgcctgtccgcaggctagtccccacattttagcctgagtgattcttcttaatgcaaacctggtcctgttactcccctgctcaaaactcctcaagtgctccccagtgacctcgggagaaagtccggattccctaacagggcgaagtagactcttcacgctctggctcctgctgccttctccagcttcttctcttccatcccccacaacattcccaggcaggcttgaatcttagtttcgtcaagtgtcacactgtctctcatcttggggacgtcccctttacttggagcctgtcttttcctctgactaatttctgcctaaccccttagtttccacagtgatgtctcctcctctggatagcattccaggactgtgcaggtctacaatacatgacacccccaggtgctccccagcaccctgcacttctgccatcataagcagatggcatactatatgtgaattgcctgtttacttgtttgtttccctttcaatatggtaagctccatgaggacagcaaccacatctgcttaattcactcttttctctggggcttagaacaggggcttgcacctagtaagcattccataaatatttgtagaataaaagaagataagcacgtgagcaagtgtgtgtgccaaggcaacgtgcacaagtgaggagcgctagactggaagtcagagtaggaccaaatgcctacctcacctcttagcgactgggtctcaggctcttcatttctaggattagaatgagatgccgtcagggctgggttgatgtggaaagagcatgcatgcaaatatgttttgtgtgtcataaattcattatgaccatggcctggcagtgtaggaaccccccgtagggaatgtgatggactgtgaagtgggaatgtgtgttggaagcagtaaccacagacaatagtttgtctcagcaaaccaaagtattagaaaggatctctgcaagtcaatggtcaaggacactcaagatggttgctgagtttctcattttcaatggaaatgaaaaggatggaggaattgagggtgaatctgacgttaacttccaagatcagttccagaaagaatcccatcctgctgtggggtgtgtcaggcggagatactcatcatgactggggaagcagctggctctgccccacacaccattcactagggatcatgggcagtggctgcttttacccatgggccaaagagaggggctggtgttcgttcagcagccactcagtccccaagagcctctgcaaccagatgctctgtcatgccagctgagattgccttctgagaatggtgggccaatatgtgtttgagggcaaagggttcctacaatatctttcctacttttcttgtctagaacaactaacttaatatgttgctttttcatagagtgaacatccaatacccttccctgtcagagaggaggacagaagactgggcctatattttgccatttttttcctccataaacttgtaccttgtaccctggctgcctccactttattgtaataaagatccaccctttgttccccttatgctttttaaaaaatgctagtattcctttcccgtttcatctctcccactatggcctccctctcccgcctccagttgatcagctcctcccctgaccctccagaagcctgctgcatcctcctacttctcggaagctgtaaagtcttctccagccattttcttggctgccaagatttctcaaagtcaatttcaaattgtcattcacaaacaaaaaaagtgttttttgagtacctttttttttttttcctgtggccagcactgcttttaaaattgtggagaggctgagaagattctaatctaatctctgctctcagagtttatcattttagttcagcagaaaagatgtaaatacaaaaaaaaaaaaaaaaggaaaaatcataagggttaaaatgaaagtctaatgggagccaggaaactcctcctcaccatgggagttacctcctgatggtgccacacggtttctctccaccctcggtccggttttcctgttggttttagatggctgtttgattctatgttagaaggatccaactgagtgaaggggtgctttgctttgtttagtttacattttcaacaccttcatttccaatagcagttaatctccccatttatttcttcttttgttattgaatgggactctgagactgatggactcagtttgtatgaaaaatctgccacaaaagaaagcttgcagtgcctgggcactggtatttgccaagcatggggtttccagcctctcttcatattattgtatactatagggatgagtcatgcctggaaaatgtgattgtgaattgcaattgttctctgctgaaaaatctggcttaagaattggctcacatgctctagttcaccaaagggcgaacatcctattcatgtgccaacatcttatttctcttgtcacatacaggcagcacaacttcctcagactggagaccagagcttagagatgctagaaattccccgtgagagcagcaaagggtgcaggaaaaaggggaagaaaaacctttctattaagtaacatggggctgagtgcattggcttacacctgtaatcccagtactttggaaggcccagggaggggggaggatcatttgagcccaggagttctagaccacctttggcaacacagagggacctcatctctacaaaaggtaaaattagtcaggcgtgatggcatgcatctgtagtcccagctactcggtaggctgaggcaggaggatcacttgaatctgggaggttgaggctgcagtaagccatgatcacaccactgcactccagcctaggcgacagagtgagactctgtctcttcaaaaaaaaagtaacatggaatgaaggggatgggggaaccactcactgtcccctcctgcaactctaaatcaattcttatactctgggtcagggctgagagagtcagaagagattgtgggtcaccaataatccctacatttgtgcttagaacctacttgctatggggtagagaggctgaactcattcaaggcttttgcatgggggcaattagttccagcccctatttagtggcactttgccaacataatgtcccaacaccagcatggtcagaccacagaattagtctgatgtgagaagtctggggtgaaatgggagtccaggctggtgggtcctggttgctgaggtctattgggaagctgaggcttagagatgaggcaggaagccatcgctgaatttcaccctaagtcaaccccctccagtctgtgtctgtattcccagaactgcccatcttcccacagttgggccacatgagtccttcctgtcactagagggaatggaagcaaatgtgtggaaggggcccgggttactggaagggcatttcctaaagtaagggtggcatggaagtgaccctatgagcatctgtgaagccttcctttgatgtctgttgttgaaaccctgcttatgcagttatttgttttcatacaagaacatttttcttattccccttccttaagcagttatgaacatgtaatatctaataattcaatactctccatcaatgcaaataagagctccaatcctaagaaaggggtaggttctgggttacatcccctataccaaatagtcctttaatggttagtattacaggaacattagtcagatatagaaatttttaaaaaaatatgggctggtctcctgacttttcatttgatttaaaaagactgatttactgctgggaaaacctcttttcagaggaaaggttgtgtgagttttagttcccttgcactatggccacaaggaagatgggatcattggtattgccagcccatcctgcataacttaggtatgtttaaactcaaaagcacatttgtcacatgggttgtcagaactctactgtacagagttaagtgagctctatattagaaggctttggaagaccacaacatcctcatcccactcagccccgacccaaatccctgctgaaaatagacctaaactcaggttacaaaccagaaccagaaacaatgccaactttataataagaaagatgaagtactatgttctccctaagttagtggttctttgatttgagcatgtgtaagaatcacttggtaatttttttctaacctgtagtgtttgggggatcttaccttagggattctggatctcatggtttctggacactgtctaagccagtggttttcaaacctacatgctactggaatctgctttttaaaaagagatgctcaggttgcacctaatttaattagaatatctggggagtcagggccaggctttggtagcttttaaaagctctgttggttgttttaatatgaagccagttacgagtccctggtgtaagctaagaagcctctcgtatagacatggctgaaggttctttggaagtcttttggatgagacagctagcttaacatgcttatcttcagacagacaaggtatcctgccccaacacgtccaactagccatattaaaaattcatgtcttacaacatggataagcattagaaggcttgtgaaacccttggatttacaggctaaaatttgtgcagatgtgcatatgtccccctttctagggagagagtattcagcttcactggattcactttattttcttccctatccccttgttttattcgtttattcattcattcctttttatccccatgccctgctcccattcttgtgggtaaagtatgctaaagtatatctgggactcataaagtataccagggactcataaagtataccttttttgctaaagcatatctttgtttgcatgtttttctttgctttctgtggatctatttgtaatttatctgaatgatgtgatcttactcagtgctatgcttttaaggtctatgttaattggtatgcatacatctaatccatgactcccacctgctgcgtcctgcttcatggggcatcggcattattctacctgtctacttccccagtgatggatactcagcatgtttccaactctccttggccatgaatagccaaggctgctcacagcagcctggagtatgtccccttataaacatgcacgagaacttcttgggaaatagacccagaagaggaactgctgggtcacagcaggaagcaagtagttcttttgactaggaagggctggactgccgtccatatacagagccatgtactcccactcccttcactggattcctgaatgagctgagatctgccttctggtaaagtgtaaaagccaggatgatagtctaggctgggccttcgaccctcattgcggtttgcttttccgtttgcctttctttttccttcttccgggtctaccttctttcccattccctgtggctgctgtattaaaccttcatcaccaccctcaagtctcttattctacctcaacttctttttcacagagaaaacttaggtcatctttaattttctctctcttcttctcagtgtgccaatgtcagccccatcttgatttgtttttccattcttgctcccttccagggctaacctccactgagcttttattccctaccttcctgtcttccaggagccttgctgtgtcagcttttcctgttgtttctctacctttctcttaccattagcttattctgtggcctataatattagccaattctttcccatcctgaaaccaacttcccttttacttaagctacctctctttgttctttctaaaaatgtttttaggccaggcgcagtggctcatgcctgtaatcccagcactttgggaggccaaggtgggcggaacacgaggtcagcagatgagaccatcgtggctaacacagtgaaaccccgtctctactaaaaatacaaaaaattagccaggtgtggtggcgggtgcctgtagtcccagctacttgggaggctgaggcaggagaatcgcttgaacccgggaggtggaggttgcagtgagccaagatcacaccactgcactccaggctgggcaacagagtgagactctgtctcaaaaaaaaaaaatgattttcatctatcaccaactttttgaaggcaatgacatttcttctcactcgctcctccatgcccggcagtccagccaatggccttctagttgcaaaatctctgtacacttcccagttccctcctgcttatttctctgtcgcatctgacactactgacagtctgcttcttcttggagccggctctcctcttgacttggctatcaggacattattttctcctggttcgccccctcttctttatgcttcttctcagtctccattatggcctcctttctctctaccttcccttcaaactcctttcccttatggctcccctctttaggcctcagcactgccacatgttctcctgagagctcatctacttcttaggcttcctgagttgtcatatgattctcaaactcagatctcattttaattcaacaaatagttcttgaaaacttactgtgtgctaggatccacagtctcatgtgacatatgagagttcaccctttcttctgagctctagacccctacatctgatagagtttgtttgctacagtttgaggatatgcatatacctcacagactagctaaaagaaattatatacctctaagtaagcttcttttgaaggggtccagagcacagccccatctgacaacatgtcagcagataatcctgcctgctctaattttggcctggagaagacaccaaaggcttctgggtcacaagatgtgcacatattttctttgactaagacaggactgctctccagaacagctggagtgcctgcagttctaagaatataatttggtccatagactttttcccccctcctttgcaacagtaagacatggatagagtacaggctgatgagaatgaatgtatgatgtgagaattgtaaatcacgttgatactgtcagtaacagaccctgccctaaagttgcttaccccagtagtactgggatggtgaggctcacacatgaaggagaattgtaccaggctggacataattaaatgtgaaactgaataaacattatgcttttcttgtaatagttatgttgggcagattaggaaggacagagtaagcaaatctcttctaggctggcctggctgagcctcggaggaccagctgctctctgagacagccttacctctgtttcagaatctgtttgttgtcatcgatggtaacgctgtcagcgtggtccctcttgaagatttcaaaagcctcctggcatcctaatgacatttcctctctcattcctgtttggagacacagggaaatggcctcagtcacagcatcaggatcctattaatttcattgtcacttcagtcagaccacaaaaccagccctggctccaagaggcccacagcagagagactctgaccagacaggtggccccaggctcttccagctggctgacaacctgctgaggaggcccttccagtgccacccgctgcacccctcaggactgtgcctgcacagccatgtgactcgtggggggcggggtttggaatgcctgctcgggggaaatgaaaaccacagcgccaagccctggactgccgaggatgtctgcaaatgccttttcttaccatcgttcagtgccacatttctccctggtatgccctattttgtttttctgttaaatttccaggcatttagttaaaggaattataatccaaactgaaagatagcatctagaaaattctgctcttagtctctgtataacaattcattcttgtttcctgtggttagtgagggggtctcggctcttcttcaggagttaggtcctcagttacaagactcatgagctggccatggcaggggtccctaggtcatctctaacttcaatatcctgtatcgcctttgccaataaaggccaaccctcactgctgggcgctgttcagagttcaacttctgggacccacggtcagtacagccaggaccaggctctcctcctcaccacctcccggagtgagggtcagcgcagatgtatgcctgggacccctcagtgagagctgaattcaccgctggattttggatgcatctatagagccatttttttttttttaatgcttctgcccttggttcctttgcctgggaggccttttctcatgttttcctccagtaactctacctccgtggagctttcgtcaaagcccaggcagaacaaaccctcttttcaccatgttccttatcaatacacctataatatgcacagcccagtggacactgccacttcacatggcaatcctttctggtgaaatgtaagtttctcagggggtagagataatagttttttgtttgtttgttttgtgaatccttgtgtcttgttcaaagtctggcatttagaaggtgctcagcatacatctgttaaatgaatcaggttgagaatgaagctgggtggtgctgagccttgctgttattgctgcgggaacacagtccagggttagtgaggctcactctgaggccaagggttccgcagaggctttcatatgggccacataccacgtctcctcttgcctggaaaaaactctctgagtcccatcacccatcctaagggtgagtaactggactagcccatctgacaccaatttaatgattactcttgataaaaatagcaccgtgaagaatgtctaaatggtgaggcacaaaaatacaccccacccttttctgatcagaagcaaatgggcacgactcagctttgtctccacatctgccttgcacactctagaattgggtaggcctgggaatccgcttgtgtgagacgcagaaagatgatccctgatgcatgagagacattgaggggcacgtttcaccagcagagcccattaggagccagcggattcattccatacctttcccctgtccgggtctgcacccagttctaacagtgcatgccttttgctacataataaaataataacagacagtagagggcatgagactttggactggagatgggaagagaaaagctccacagagaccacactggagcctgcttgggggatctccaaattgctcccccccgcaggggagctgatgagcagccttccaccaacagaggtgtgggggtggtgggtgaaaggggtgtggggtgggagtgaaagcttgcttaagctgcagggaagaagggttcacagcctcttccctcccaggctctgctttttctgcagagctgactgtgaatggacagctgggtggaaaggaccactccagagcccacggcactgtggcggcagccactcctgggagaacttacaatgcactgagcaaccattgggactaactatattcccaacaacgaacaacacaaaagtaagtgacaatatgaaaacacgaaacaacatgaaacacaccttccctgaggtgcactggggcctgggccgtgggagcagaaaggacgtggagggcacagaggagacaagcgcaggcagtttgggatcgttgtgtacggtcttgaaggtcctactaagaaattcggggccagcagcataacatattctacatgcatcgccaactttcaaagacttacaatggaataaagtacacattatgggaaagttacactggaaggatttaatactcttggtggcttaaaaggcacttaggggtcctgaagtgccaagggcttatcatcaggaacataaccttggttttccttctgtcacggacaaagtattctggagttggagttctttgattgtggtgaccacaggtgaaggccatcagaatgatggctattatcttgtcagctgttttcccaaatgtccactcagggaggccaaggtgaggtggctgaagcatagctggaaggcaaagaggcaaggcaaggccaggatgcctgcagagacttcaaggccaccacttggggcaaggctgaggtccacagagggaggcacatgggaaggactcacgggcagctccagtgtgtgagcccaggtcccagcctggccctacccttgcccatccccattctgcttgttcagagctcatgcgcagctcctttggattgcactaatataccacttctcaccccattttgggatcagctgcaaagttaatgaacggcttttatttactgaagaaatcacttccttgtccctctgaggatttagaaaacaggctctttctcctatggcagttcccgtccctgagcatgcactgtatgcatttgaaagagaaagagcaaaggagcaaaaagagtgattaaaagctcaccttgctaatgagacaatcgtctatttattctctcaagaagtatttatttatattaggcattgtgctaggcatgtgacagagatgtaaagttgaacattaaagctttgattcttgatttaaagaatttggagtccagtaagggagaaagaaaaatgaaaaatggcagggcgcaatggctcacgactgtaatcctagcactttgggaggctgaggtgggtggatcacctgagctcaagagttcaggttcagtctgggcaacatggtgaaacccatttctactaaaatacaaaaaaaaaaaaaattagctgggcatggcagcacgcacctgtaatcccagctacttgggaggctgaggcaggagaatcacttgaacccaggaggcagaggttgcagtgagccgagatagcaccattgcacttcagcctgggtgacaaggtgcgactccatctcaaaacaaaacaaaacaaaaaaacaaaacaaaacaaaacaaaaacaagaaaagtgaacaaatatttacaatggaggttgctgcttgctgtagagaggtatgtgtccagcatgcgggagagggagggagggaggcagggactctcagcgagagtgggagaaggctgcaagcaggagggagcaagtgaacttcatctagaaggatctgaaggatgaagcagcatttcccaggtagagaagacatggaagaagtttccaggtggagggggcagagatggagtgtggattacaaaggcaacctgattaatatgggtggctctgccatccaatagaaatgatctctaggtgattaaaaaatgaatttcttatatactctataccaaggatagtatcatgtgctttcttatatattatttcagttaaatttctctatgatctccgcaaataagttcattttatagatgaggaaactgaggcttacataaataagtgattataaaggggtgaaaaatgcccagcttttagaggcagtcattgcggctcttagatcagtttttccagggaaagtaggcctgacagaaagggcaaggtggtggggctcaaaatgacctcgtaatattaatagtagatttacccatgagatcgtactcttattagtgcttctctatctaaaatgttgatttatttttacaatatcacagaaaaacagaaccatatatgttttttactacctgcatagtttacttcatctgttaatatgttttattattacttctagaatttgtaagctccatgagggcaggtatttaaaaaaatttttttatttcaatagctttagaggtacaagtggtttttggttacatggatgaattgtacagcagtgaagtctaggattttagtgcactcctcacctgaatagtgtacattgtacccaataggtagtttttcatccctcaccccccaaacctcccccatttgagctccaatatctattataccactctgtacaaatttgcatacccatagcttagctcccacttataagtgagaatatgtggtattttgttttctgttctcgagttactttacttaggataatggcctccagtttcatccaagatgctgcaaaagacattattttgttctttatggctgagcagtaatccacaccacattttctttatccattcatcagttcatggacacttgtgttgatttcgtatctttgcaattgtaaattgcgctgtgataaacatatgcatccaggtgtcttttttatataatgacttgttttcctttggggagatactcagtagtgggattgctggatcaagtggtagatttacgtttagttctttgagaaattttcatagcgttttccatagaaattatattaatttacagttccactagcagagtataagcattccctttttaccacatctgtgcgaacatctattgttttttgacattttattaatggcctttctggctggggtaagatggtatttcatcgtggttttaatttgcatttccctgataattaatgatgttgagcatttttgcatgtttgctggccatttttatatctttttttgagagatgtctcttcatgtcattttcccactttttaataggattatttgttttttttcttgcggattggcttgagttctttgtagattctggatattactgctttgtcagaagcatagtttgcaaatattttctttcattctgtaggttgtctgtttactctgttgattatttatttttctgtgcagaagctttttagtttaattaggtcccacttatttacttttgtttttgttgcatttgcttttagggtcttagtcaagaattctttgcctagtccaatgttcagaagagtttttcctaggttttttttttctggaatttttatggcttcaagtcttagatttaagtctttaatccatcttgagttaatctttgtatatggtgagacatagggatccaattttattcttctacatgtggctatccaattttccaagtaccatttattaaatatagtgtcctttccccagtgtatgtttttgtctgcattgtcaaagatcagttggttgtaaatatttgctttatttctgcattctctattctgttccattggtctgtgtgtctacttttacatcagtaccatgctgttttggttattatagctttgtagtgtaatttgaaatctggtaatgtaattcctccagatttgttctttttgcttaggattgctttggctattcaggctctttttttggttccatattaattttaggagtttttttctaattttgtgaaaagtgatattagtattttgataggaattgcactgaatctgtagattgctttaggcagtattgtcattttcacaacattaattcttctgattcatgagcatgggatgtttttccatttgtttgtgtcatctatgttttttttcatcagtattttgtagttctccttgtagagatttttcacctcatttgttacatatatttctaggtattttatatattttttgtggctattgtaaaagggattgagttcttcatttgagtctcagcttggtccttgttgatgtaagcagaactactgatttgtctacatttattttgtaaactgaggctttactgaattcatttatcaaatctagcaatctttcagagaagtctttaggattttctaggtataagatcatatcattggcaaacagtgatagtttgactttctcttttccaatttggataaaagcaaggatttttgtcagttttgtttgcagcaatatttctagaatccagatagtacttggcatacaagagcactatagcatatttggcacacaaaatatcttttgaatgaatgaatgaatgaaaaagtgctttagatgcttaacgtctttccttctggatagcatattgtgatggtgtgaaaaatgaggcatgtatccattgctctctctctctctgccaccatgctactggacagtttcatctcctacatagtatgattttagaaattcagcaccatcttctccccagtacatgtcaccatgcttactggcccaccattagagatgaattccaactccaagaagcttttataaaaatgcaactacagtcctgccccacataaagacgtttcaatcaatggtgaactgcatgtacgacggtggtcccatatggtgtcatagttgtcataatgtcatagtgcaacacatttgtcacatgtttgtggtgatgctggtgtaaataaacctactgtgatgccagttgtataaaaatattgcgtatataattatatacggtacataatacttgataataaatgactattttactgatttatgtatttactatactttatttatttatttaattatttatttatttttgagacagagtgtcactcttgttgcccaggcaggagtgcagtggcctgatcttggctcactgcaacttctgcctcctgggttcaagcgattctcctgtctcagccacccgagtaacagggatttgtccgccaccacgctcggctaactttttgtatttttagtagagatgagatttcaccatgttgaccaggctggtctcgaactcctgacctcaggtgatccacctgcctcagcctcccaaagtactgggattacaggtgtgagccactgcgcctggcctatactatactttttatcattattttagagtgtacttcttctacttataagttaactgtaaaaaagccttgggcaggtccttcaggaagtattccagaagaaggcattgttatcataggagatgagagctccatgtgtgttactgcccctgaagaccttccagtgggacaaggtgtggaggtggaagacagtgacactgaaggtcctgacactgtgtcttcatttttaacaaaaaagtctaaaagcttaaaaaaaatgaaaaatttttaaaatagggaaaagctgatagaataaagatataaagaaaaaaatatttttgtacagctgtataatgtgtgttttaagctaagtgttattacagaattaaaaagttaaaaaaattaggcttataagataaaaagttacagtaagctaaggttaatttattattgaaatattagtaaaaatgaatttagtgtagcttaagtgtacagtgtttataaaatacacatagtgtacagtaatgttctaggccttcacactcactcaccactcactggctcacccaaaccaactccgtccttcaagttccattcatggtaactgccctgtacaggtgtttttatttttatactgcattgttactgtactatttctatgtatagacacacaaatgcttaccattgtgttacaattgcctacagtattcagtacagtaacatgctgtacaggtttgtagctgaggagcattagtttatcccatctagcctaggtgtgtagtagtctatactatctaggtttctttaagtacacactatgatgttcacaaaatgatgaagtcaccttatgacgcatttctcaaaatgtatctcagttgttaagtgacacaagactatactcttgaaggtatcattatttcagtgctagcaaagaaaaattccacaatttattgacaattagctaagaggtactgcaaagacatacattttatcttcttcccaactttgtttagtctgtcagactcagctcctcaacagagctgaggaccttgggaacttgccatgctcatttctagagctcatttcttagttgtttgcttttagtgaattttaatcacaggttcccagcgctggatccctgaaatatgaatgattaagagaagcctgctggcttgctgagttacagaaccatttaaaacctaaaagagaggaatttctgagtctcattctccaaaagacgacattgcaatttcggttgtaagttggatggaaaatatttgcaagtcccaaaggtgtaatctcttctgaactttgatagtggtcaaagagcacataggtagaaatggtagtcaacaaggggctttcaacatcagcctcagggttgggtttctgaaacattaggcatccaaattcttgtgcgctggtcccttacccacttcttaatgctttctttttttttcaacctgaaattcagttccttattttgctaacgaatacaacttggtactttgggaagccctccccatccccaacacagggtcccatggaaaccaaatggaaaggaaaaacatcggaagtggagagtttatgctattgcctttgggcctgcggtctgatttcctttagtctggggtacatgggccagagcttattttcctggctgctcctaaacaacctactgctgcttaagctattgcttaaaaattgacaaaagtacaatgatggagagagttgtgttattcatgctgaaaaatgatttcctagtcggagccaaaaatatattttccttgggagatattcactcgcgtggggcctcggttccctctgactaaagaagagagggatgagaagaagaccagcaggggacgatgaacagtgagaaggggggtggattccaaggagatgggggtttggaacacactgtttgggactgaaagcatgagaaggctcagagctgggtggggagcatgtggtgctaaggcaggaaggaagctgatgattcacggtgggaatcgtattgaaggatgattatactctgtggctcaatagtggaagctctttaaattgaaggtaagggaacagctctgataccacagtatgatgaatacctacaacgtgtagaatctggaggtgcatacaagaatgagaagcaatgggcagagatcaagtgtgttttttgtatggtgcctgaaataaccttctatctgaagtgaaatttcttggtaagtgttgacttgggtgaaatagacaaaaatatcgtcacctaaataattagaagagaattccatttcagtgtgttccaaacccctgtctccttggaatccagcaccccctcactgttcatcgtcccctgttggtcttctctcccctctcttctttagttggagagaactgaggtccctgagtgtgtggagaaggtagaatgaacgggttgatgggaggaaaaggaaataaggatttagaagagagacaaggcagagctgaggaagggataatctatcgagctgtagcatgaaatataaaggtcaagagggataggaaggtcagggggaaggtcagtgagcccacactcttgggagtggtgctggatgtctccaggggcatagagaggaaatggtggcttcagccagaaacccaggtgcaggacaagccagcagctttgacgatggagagccaaggatgcactgacactggactgaatacatgcatggaatggggttgggggctataacagatcttataagagaaatgagccatctccaagaaagattagatggaacagtggagatagtgtctttaccttcctcccacaaggatgcttgtgatttaggaaggaggagtttttgaaaggtgcatgaaagacaaggatgttgaatatgcagaccctatgttaccgctttcactcttcatacccctagaagacatcgctgatcaatctcagcatctttcctgggaaactaatcatagcattagagttctcagcacagtttttcagcagcctctgccagtcaatcatccctggcatagaagctcttcctttaataggtggcttccagattactaaccaattaaatgacaactgccatttgataatagcaaatgtcatcatttactgttactgtcatcatgccggtgccacctggtcccatcgctttaggaactactgtgcagatggtctcccctggagagcagcatcatgccctagcatgtgtgtatcactgaggagccctccattcatgttcctccacctccagggtgatggaggtcaccacagtaagcagagccatctgtcacggttctgctgactttaaagggcctggtgtagcccagctacaatttgaggggttgctgcgctggtaccgcagggtatgaaatctgaggatgaggggaagaaaaaaagccacggccaaagtgactgcagatgtgaagaccagagatcagatcttttggggtgaccaaggacactcactcaacctacttcctcctctcgattgacaatttctggaatgggctagtgccccaaggctttgaggttaaagggctatgttcaactcagataatatcacctgggctaaagtcctcagattaggacttgccttagagtttcttaagtagccacatgaaagatgtcaaaggaacctttaattagtaggttctgagggctggcttggaccaggctgaagcatggtaggcttggcaggagctctagggaggagagcgaagggaaaatctgaagtggaaagccacataaaccttaggagacccacccaatggtggcaccacatctaaataaatcaaatgggttcctgactcctgatgccagaaatcacacatcccacgggcaacccacactggcccagcagtgcagaccacgcgggctgggtggaataaagggggcagtgctcaaggcaggttgtgttttccttttgtcttggtaactgcatctgattcacccacctgctgcggctgcctcctggactttcccttgagcaggtgaggaaagggctggcttgccaaaggagtggacaggcctggagcctctgaaaaaatggcagctgctctggggtagcttctgattgccagcaataacaaaagacatctaaacagtggtcctcaagagcatctgcagaaaacactcattttcctaacctagcatctctggggtttctattttgtaaatgttctcatccaggacaaagtgcccacatgggctgttacagaaatccgtggacagacgcaggcactgagtttggaaagccgcctgggtcatggtggcatttctgcattttggagccagcttaggcatctggaggccagcaacgtttccattaaataagacagcacgctgtggctcctgctgccaggccaaactggatctattgagtcttttctattgattttagcccgtagatgtggcagcactgaaaaagcctggatgtctaattccaggctcaatatttggaccaatcctgggaatctgagtggaagaacgcgtgtgtctgaattctttgtaggttgactgacagctccctgaacggaaaggcagcagttttcttcagcttagaaagaggctccagatcggctgggcgcgatggctcatgcctgtaatcccagcactttgggaggctgaggtgggcggatcatgaggtcaggagattgagaccatcctggctaacacggtgaaacctcgtctctactaaaaatacaaaaaaattagccgggcgtggtggcgggcacctgtagtcccagctactggggaggctgaggcagaagaatggcgtgaacccgggaggtggagcttgcagtgagccgagatcacgccattgcactccagcctgggcgacagagtgagactgcatctcaaataataataataataataataataataataataataataataataaataaaaataaaaaaaagaaagaggctccagattctacagaacataggattccctgagtctcacatgtccttgactgcttccaaaggccatggttcacagggtcctgttgagtggcttccaccctaatgagattagctcttgtgtgagcctgtgcttcagaggcagtggttaaagcattgttaacgtgtcctgttgtctgaaaaatgaggcaaattttctatctatgcctaaattaggaatggattcactatagactcatttattttcatgtatttaattttatttatttttattttatttaagacagagtcttgctctattgcccaggctggagtagagtggtgcaatcttggctcactgcaacctttgcttcccagggtcaagcaattcttgtgcctcagcctcccaagtagctgggaccagaagtgtgtgccaccacacctggttaatttttgtataactagtagcgatggggtttcgccatgttggccagactgttctcgaactcctggcctcaagtgatctgcccaccgtgacctcccaaagcactggaattataggtgtgagccaccatgcctggtcaattttcatacattttaaaaagagaattaaagaattgcattctagctaaggagcaaaaaataccccttccctgaaatatgtatggatttaagtaaaattctgtttccttagcttgtaagtaagtagatgcaaaatggagtttagatatgcttatgttcatgttttggggaaaaaaaggaaggggaaatttaatttttgtgtgtcttccatgtgacaggcactgttccatatttcacaaatattaattcaattaatcttcacaactctattggtagtggtggaaagctgatgcttattgagaactttgcatatactagaggcattacatatgttcttatttaattcttacaataaccgagtcaactaggtagtattgggcctagttggcaaggttattaaggttgaaagaggttaaaagtgactccaagtcaacagttagtaagtggcaaagccataactataccctaggtttgtctgactccaaaacccacctttctttttttttctttttttggaaatggaacctttatttctgcacaggccaccccggctttactgaggcataattgacaaataaaattgcatatatttaaggtttacaatgtgatgatttgatgcaggtatatgttgtgaatgattaccacaatcaagttaggtaatacatccatcaacttatatagttagttacctgtttttttgtttgtttgtttgttttgtggtgagaaaagatcttaaggtgaaaagaccttctgttaacaagtactgagaatctacgctattgacacccttaagatcttaagatctcttttagcaaatatcatgtatacaatacagtattattaactacagtcaccatgctgtgcattagagccccagatgttgggctctatacctcctcatttccccgaactccagcccctggcaactaccattctactctctgtttctatgagttcaattttttccaaaacgctccttttgcatgctatgttgctaagtgaaagtcatttgtcaactagaaatgatctcataaataccagcaaaccactgatatcagacctaagggtcagaaggtcagagatggttaaaaaaaaaaaaaaggaaatttttggagggttgtgagctggaacgtggaccaaaacccatcaatttgcagttcacaagagctggagatctctgtgaacaggaaactagggaaggcaccagacacctgacacctgggaggagccgcatcacctgagagcccagggtctgggttatggagcaggggaaagtgaagatctggctggcttgtagtgaatccttgactctgccattaaggactttttggttagagaactctgttaggttcaattaagtacggtaattatctttccccaatctgtacagcgattgtactctgaacagtctccacattaaataggttatacacttgaaatggtgattggattggagttgagttttggtgggggcactacagagaagatgaaggggcagggcccaggttctaataatgtgggctttgaggagaagaaactcccatcccccagtgaacagtggtgaaaagaggcaagaagcatccaggaggtgatcctttaacctctgacctctctgtatcctaatagcttcttctctggaaagcattttattgtttaaatataacattcgtttattcattcaggctgagtcaactggtgaaacagaccatctgttaataagcactgagtgtctacgctattgacacccttttctatggttagttggagataagtaaaagaaatattgtccttgaccatacaatttagctcagcactgagggcatgggaaggccaaagtttatgttaaaaggcaggtgaagcagatagacaaggcatcaaaggtcacgtggttcagaaggtatagatgactgggagagagcagagaagcgggtggtcagattgcagaaggatttctcagggaatgttcctcctgaggcaggttttagaagcactgagaagcaggagctagaggaaagggggtcagtgttattctgcacaggaaatagaatggcaaatccacagggatggggaggatcccaccaggtgaagggcttggcatggagactggcaggaccttggggatttcctttggttgccaggggcattcaagctcaagtggccactgggaccagacactgcaccctcaaccagttccctgtttgcccaaggtattcccaggcagagacccaatgaagttttccacaggcttgtcaggcaattttccctccctccttcagatgattgaagaagatttcctttagtgtaacagcaggctgctctgtgattcctgttcagtggtgggggaaaggagataggacttggaggcagaagccatgggttgagtgctggtttcgactactagctgtgtgccccggatctgccatttatattgctctaagtttcaggctccacatctataaaatgaaacacataataactgctatctcttaatggtattgtgaggagttaggagtgggcagtaccttgtgcatctctccattttagaactatccaatgcctttgtaatgatgtaatatttccatgatatctcacctctctgcctcccctacccctcaggccatgagcccccaaaggcatgtgactttagctccaagctcactgcctgggatacagtagatgctccaaacaagatttcttgactgaataaatgagcaagaaggagagatctccagtgaaattgttttcttttctttcctttttcttttttttagatggagtttcactcttgttgcccaggctggagtgcaatggtgtgatcttggctcactgcaacctccacttcccaggttcaagcaattctcctgcctcagcttcctgagcagctgggactacaggtgccaccaggcccatctaatttttgtatttttagtagagacggggtttcaccatgttggccaggctggtcttaaactcctgacttcagatgatccaccagcctcggcctcccaaattgctgggactacaggcatgagccactgagcctggccaaaattgtttttcttaaaaacgttatttgttaaactgtacttatgtctttaatgtagttttctgtgaatatattttatataaaaataaagaaaacaatatggcagcaatgaatcatttatttaaaagtctctgacagaatgaatgagtaaatgtggaatatactataaaaagtgaaagtgtaaaaatgttataattaccatcataagtaataatgagtcacctaaaaacccacccacagcaatctgttacgagtgaaagaattactttaacacagcaggaggattttaaggtagttacaaatgacgggttagcaatgtagggagagacagtggctgaaatggtcagtctgcctctactgtttctgtgttctctgcttcccaaccacaccagccaggctcattccacagtaacaacctcatctcattgagaaaatgaatgtgacaggacaggggctttccaccaccatgtcttccagtggactctcatgtataccagaagtccaagctttccctctggtaacaactaaacatcatccaccatcttatcaaagcccacccccttcacctgggctgtggctcccaaactcctctcctggccttcttccctgaacccttatctcctgcctgaacaatttcccccactggattatttccagcagcacaaagtcatattttaaaatgtatgctgaatcggttatagttaaatgtagctatatttgaatttgtaggtaccaaatggaaggttaaaacattcatgtttactggccttgatttcattgatggaagaggagaaaagataatctatttgtagtgtgactggcagcgtaggggacttaagaacacttagacacttgggggaggaaaaaaaaatactcttttaacaatatccttcctttaccccattaaccttccagctatctttcaatttctttggtcccttttcttggaaatgcttcaacagagctgtctacattcacctctcaattcccccacttcctgttctcgccttgctgtagtccaatggacttccatcccctatactccactgaaattgtcctttcaagatccccagtgatcctggattgccaaaaccagtggtcagttttctgtttttatttgagttggcctctcggtaaatggtacagcaataaggttagggaactgcacgtaactgctactggtcagcgggctgtgagcggcagtgatacgtttcttcctggctaaagcagtggagagcccctttgcgattcttcatactctctctttcctcactctggtgatgggggtcatcgcagatataatctccatcagcctcggtctctggggaccagagctcctacctctctggcccacattattcatgcaatatgaacaaaaagtacattttattaattttttttttgagatgaagtcttgctcttgtcgcccaagctggagtgcagtggtgcgatcttggctcactgcaacctccttctcctgggttcaagtgattctcctgcctcagcctcctgagtagctgggattacaggcacctgccaccacacccggctgatttttgtagttttcatagagacagggtttcacgatgttggccaggctggtctcgaactcctgacctcaggagatccacccgcctcatcctcccaaggtgctgggattacaggtgtgagccatcgtgcccggccaaaatatgttgtattaagtgacactgatattttgtgttcatttattaccagagcataacttagtctagtctgaccaatatgcagtcggtgaaacagctgacaagctccctcctgcctgaagcacttccttccctggctttctgtgacattactccctccaagtttttgtcctacctccctggcttctctttccaaccttcagatattgtttagctctggagactattctctttcaacaggtgatttcattcaggtgcatggctttacgatgtattacacacaaatggctccaaaatgactttccctttgagtgccaaagtgggacatctgacaggccactccactgggaatccttacttgaaggtttaattggcatatcaaacttaacataccccaaacagaactcttaatttcatgctccattctaagctctatcccaagctgttccccctaattgtttccatatcagtaaatggcaccatttgctcaagcaaaaaatcctaagattcttccatgattcttcaacccccacatgccatcagctctagcggcaactcctgccaacaatcccttcagaataatgccttacacctctctgcttctctttgtctcttttttagcctaacccaagtcgttgccatttcttctctggactgtctcctgatagccttgccagcttccattttgccctcctgcaatatattctctatatagcaacccaaatgatcttttaagaatatgattacgtcactctctgctttaaactctcctgtggcttcccatggacaaagccaaacctgaatataccccaacctcctcagcctaccaggacctcctggcgtcatctggtccctggctacatccctccctcttcatgccacacccaggtattctttgttcatgccttcttggctccctggccgcctttcagctgctcaactatggaagtagtgttcctgcctttggggctttatacttgctgcttgtttcactgtctggaatgttcttttctgggatctttatgattatcaactcactattcagtttgcagctcccttgtccccaacccaccacaatgattttctaccctctttttctgtttcatatccttccttagcacttatcaccctctgaaaccacatgtatgtatgtattgtatggaatgaaaactcctcagaggctaacctgtcctgttcagtgctccttctccagtacagtaggatgaaagagaggaaggaagggagagagcagtcgcagtcccattgtaaacaggtcctctgataggtaccagattggcacacctgcctgcccacatcaagcccaaactgctctcctatgaaggtgccaaccctggaactgagctttttcctctctgcccccacaatcagaattttttaaataacctttctgttctgggggacttggctcatgtcaacatccacaggcccttgctaacctgtaccctgactaacctcatcacctcactattctgctgtctctttctcactaggttttcatttttgggagtttgtggtttgtttgttttgcttttatttttattttctacattttaactccatgaataattctctccaaagggggccaaacaaaatgccacgtataaatggcaaggtggctagtgagagccactctcttttcctggcaagagtttccatttctgaaagtgacacatgagaatctttggagacatctatcatcatttcagaatgctatggggtcatccaagctaatatctgtacctgttgtacatcctcaacagacagaagtaattgaccattatggatggattatgttaggctatctaggaaagtttcagaggagttttgctttcatagatgcattatcctataggagctcagagagggatatagtcgatacggaaggcaagtcctaaagatgtcaacctcatctatgcctgaggaggtaagaatatgcaaaaggcattactttactttttctaattatcaaagtatggcttgcccattgaagaaaactggggtaacagaatgatgtaaagaagcaagaaaggccgggcacagtggctcacacctataatcccagcactttgggaggctgaggtgggcagatggcttgagcccaggagtttgagaccagcctgggcaacatggtgaaaccccatctctaccaaaaacacaaaaattagctgggcctggtggtacatgtctgcagtcccagctactcagggggctgaggtgggaagattgcctgagcccgggaggttgaggcttcagtcagccataatcgcaccactgcactccagcctgggtgacaaagtgagatgctgtttcaaaacattaattaataaaagaagcaagaaaaatcactcacaatctctctactttccttccagtttttctatgctttgttttactacatagttaagatgatactatatatacaattttgtagcctgtttattttacttaacattatctcataatccttttttcgtcagtagtgaaagtctttaggaatgttgctttttatggctggataatattcaccattgtagtccattctctaatgctggattttacattgctttatatatatacactatgcaaataatgctgcaccgagtgtcttggtgcattaataaattaattaattcaacaagtatttactcagtggccactatatgtcagttactattcttggagctgggaatatggtggtgagcaaaggcttatttcctttggagagcttatgttctactgagggcaacagacaagagaatcaaataagcacatgctattaattagttctatgaaaagagatgacgaaaagtaagaggatagaaagatatgaatgatggggcaggctattttactgagggagaatacaggaaggtctctctgaaaaagtgtatttgcacaaaggcattttggattatttctgtaggctggattctcagagggaggaattgaagttcttgctttctaggaagccagtttattcactgacagcagttctagaggaaagaactgttataaaaatgcactctactagggcataaccttgagaaaattacttaattcctctgctccttggttttcctgcctgcagtggaatcgattacacctgtatgtgtacatctatatgtatatgtgtgtggtaaggctgagggaggggcatggctgtgaggatggaatgttaaggttcttacatcccagaaaacttgggttagggagcaaacacatgtctgtgaaaagggaatggtcaggctgtgaaatgcatgcagggcattccaggtgataaaaaccctaactgaaaaagggttctggaaggtgtgacatgaatacttactgtgtctggcacatattaggtagtcataatatatactgaatgaaaggaagcacccaatctgtccagaagagcttacttaaaatgggtagctaggagaaaatgtcttgaatgatcacacagaggctcagtgtggcttgtgaatcagatactacaaagacagcccttcaaaatgggcgagcctgcaattcatgagcctgcagataggcggcatcctcagtttcctcatccatgaaatagggctaatgtctacttcatagggctgttttgggcaactgtttttgctgctcttggtttacaaatcctgtcttgtctttaatccagaagcagaactggattgtggaaaacaataccaagggcttggggccccaattgccctcatctgttacatgacaggaagaggagaaggaaggaaagggtgctaaaagttaagctgctaggatgaagaagaatctaaattggatttgcttaaaaactcagcttggcattcatctgtggtgaaaaatgttcactggcggatgctccaggacctagttaactttagctggtatggcttggtagtgaccatcctctctgcccaagcccaggaagctgcctttcacttcattgggttcactaatgagcttttggttgccttgagcaataatttgctctctggatataaagaatgcaagagtgggtaagctgaaagcccctctggctgggtttcctcttgttacaaacagttagtctctgaacttgtaattatgagtcatggggctcccagtctggcacaaaagtgactcattttaagcaaattatcagctttcgcccttaccaaatgctgtgatcaaccattctgttcaagaaaaaagggaacatttttattaaaagagcaggatgtgaaaaaggagagcaaactgcaactatgatttccagacgtatggatcaaagtcaagttcaggcccagtgtaagccaagcaacaaaataaatagtaaaaatggcacagaaagcaaatggtcaggaaaattcatttcagaacaggcgcaaaatcaacccttgcagtcaacagcataagattcctataatgctatgattcttggacattctcccctcccacttccaactcccttggacctactggaattgaggtcaaggaagaaacatctttctttagatgacttaacccacaactttgttaaagaatcagtgatgacggatgcctccaagttgcccaaagctagttacttagacagatgaactgatagacaaagcaatcaatttaaacaaatgtgatccagagatggatctacaatgtatgaagaatcccaaggccttctactacagagcattttcctgaggacacctgtttcattaatggtctttggctgaggaaacatttgaaatgatcattacctctttgtcagctgcaagagtagtaactgatctcaaaagacaaattttattctccgatgtctggggtgtattaacactgcccaggaccacagtaaagggaaatgggtccagggtggactgaaaggcaatgtcgtccgagtttgtgttttctggaatggtttgagatttccaattaatcttttacaatagctgcccattcatctatgtcactgaagaagataccataagctgcatgaggaatttggctctgggacaaattgtctgacttccaactgttacatcctttctaaattactttcaatttaatactgcttttcttatatcttgactctatcacttctcgtccttcataaaaaaacaatggctaccaaatggctatttttgtatgttccccaaaccctaaaataaaatccattaatcgatcacccaatatttcttgaatatttatcatctctgctttctggtaatcactgtagttgataaagaatcaataaaaaccacaaaaaaagggcagaatataacagtcattaatcacctcccaactggcaattcaagtgcacgttttgcaattctcatgcctcttggcctctctgaggtatttaaaaatattccttaattattaaaattttcttctctggcttcttggcatagttctctccatattccccttgtatgtctgtgactgccccttctgagcctcccttactgactactacactgccttatcatctaagtaatataaccaacaatgaggagtcagttggaatagaaaagcagtgttaaatacagtaatagaaatagaaaagaaatagaaagaagtgttaaatacagtagatatttctgttaaatacagtagatagaaaagaagtgttaaatacagtagataaatacagaacatgatgactaagtagcatggtgagtatgtattagaactcttatgttgcaatagtggaaacctaaactttaagcttcagacactttttgatacaaagactcaaaaagaaaaaaagaggaaatattaatcagagaaagtcactcaaaatgcagtacagtcatctaaagaaatggaaaagatgaaagagagattgagatgtgaaagagagagagtaataagatccaacacatgtgtaataggaagctccaaagatgtgaatagatagaatggaggaaaggcaatattagaaaagataatagctctgcattttccagaaataataaatatgtgacacccgatatccaggagcacaataaatcctgatcaggaaaaatataaacgaaactctttccttagatataatagtgatactgagagcatcaaaaaaaaaaaaaaaaaaaaagatcgagcgtgagcgacgcagaagacgggtgatttctgcatttccatctgaggtaccaggttcatctcactagggagtgccagacagtgggcgcaggccagtgggtgcgcacaccgtgcgcgagccgaagcagggcgaggcattgcctcacctgggaagcgcaaggggtcagggagttccctttccgagtcaaagaaagggatgacggacgcacctggaaaatcgggtcactcccacccgaatattgcgcttttcagaccggcttaaaaaacggcgcaccacgagactatatcccacacctggctcggagggtcctacgcccaccgaatctcgctgattgctagcacagcagtctgagatcaaactgcaaggcagcagcgaggctgggggaggggcgcccgccattgcccaggcttgcttaggtaaacaaagcagccgggaagctcgaactgggtggagcccaccacagctcaaggaggcctgcctgcctctgtaggctccacctctgggggcagggcacagacaaacaaaaagacagcagtaacctctgcagacttaaatgtccctgtctgacagctttgaagagagcagtggttctcatagcacgcagctggagatctgagaacgggcagactgcctcctcaagtgggtccctgacccctgacccccgagcagcctaactgggaggcaccccccagcaggggcacactgacacctcacactgcagggtattccaacagacctgcagctgagggtcctgtctgttagaaggaaaactaacaaacaggaaggacatccacaccgaaaacccatctgtacatcaccatcatcaaagaccaaaagtagataaaaccacaaagatggggaaaaaacagaacagaaaaactggaaactctaaaacgcagagtgcctctcctcctccaaaggaatgcagttcctcaccagcaacggaacaaagctggatggagaatgattttgacgagctgaaggaagaaggcttcagacgatcaaattactctgagctacgggaggacattcaaaccaaaggcaaagaagttgaaaactttgaaaaaaatttagaagaatgtataactagaataaccaatacagagaagtgcttaaaggagctgatggagctgaaaaccaaggctcgagaactacgtgaagaatgcagaagcctcaggagccgatgcgatcagctgaaagaaagggtatcaacaatggaagatgaaatgaatgaaatgaagcgagaagggaagtttagagaaaaaagaataaaaagaaatgagcaaagcctccaagaaatatgggactatgtgaaaagaccaaatctacgtctgattggtgtacctgaaagtgatgcggagaatggaaccaagttggaaaacactctgcaggatattatccaggagaacttccccaatctagcaaggcaggccaacgttcagattcaggaaatacagagaatgccacaaagatactcctcgagaagagcaactccaagacacataattgtcagattcaccaaagttgaaatgaaggaaaaaatgttaagggcagccagagagaaaggtcgggttaccctcaaagggaagcccatcagactaacagcggatctctcggcagaaaccctacaagccagaagagagtgggggccaatattcaacattcttaaagaaaataattttcaacccagaatttcatatccagccaaacaaagcttcataagtgaaggagaaataaaatactttacagacaagcaaatgctgagagattttgtcaccgccaggcctgccctaaaagagctcctgaaggaagcgctaaacatggaaaggaacaaccggtaccagccgctgcaaaatcatgccaaaatgtaaagaccatcgagactaggaagaaactgcatcaactaacgagcaaaatcaccagctaacatcataatgacaggatcaaattcacacataacaatattaactttaaatgtaaatggactaaattctccaattaaaagacacagactggcaagttggataaagagtcaagacccatcagtgttctgtattcaggaaacccatctcacgtgcagagacacacataggctcaaaataaaaggatggaggaagatctaccaagccaatggaaaacaaaaaaaggcaggggttgcaatcctagtctctgataaaacagactttaaaccaacaaagatcaaaagagacaaagaaggccattacataatggtaaagggatcaattcaacaagaggagctaactatcctaaatatatatgcacccaatacaggagcacccagattcataaagcaagtcctgagtgacctacaaagagacttagagtcccacacattaataatggagactttaacaccccactgtcaacattagacagatcaatgagacagaaagtcaacaaggatacccaggaattgaactcagctctgcaccaagcagacctaatagacatctacagaactctccaccccaaatcaacagaatatacatttttttcagcaccacaccacacctattccaaaattgaccacatagttggaagtaaaactctcctcagcaaatgtaaaagaacagaaattataacaaactatctctcagaccacagtgcaatcaaactagaactcagaattaataatctcactcaaagccgctcaactacatggaaactgaacaacctgctcctgaatgactactgggtacataacgaaatgaaggcagaaataaagatgttctttgaaaccaacgagaacaaagacacaacataccagaatctctgggacacattcaaagcagtgtgtagagggaaatttatagcactaaatgcccacaagagaaagcaggaaagatccaaaattgacaccctaacatcacaattaaaagaactagaaaagcaagagcaaacacattcaaaagctagcagaaggcaagaaataactaaaatcagagcagaactgaaggaaacagagacacaaaaaacccttcaaaaaatcaatgaatccaggagctggttttttgaaaggatcaacaaaattgatagaacgctagcaagactaataaagaaaaaaagagagaagaatcaaatagacacgataaaaaatgataaaggggatatcaccaccgatcccacagaaatacaaactaccatcaaagaatactacaaacacctctacacaaataaactagaaaatctagaagaaatgggtacaatcctcgacacatacactctcccaagactaaaccaggaagaagttgaatctctgaatagaccaataacaggagctgaaattgtggcaataatcaatagtttaccaatgaaaaagagtccaggaccagatggattcacagccgaattctaccagaggtacaaggaggaactggtaccattccttctgaaactattccaatcaatagaaaaagaggaaatcctccctaactcattttatgaggccagtatcattctgataccaaagctgggcagagacacaaccaaaaaagagaatcttagaccaatatccttgatgaacattgatgcaaaaatcctcaataaaatactggcaaaccgaatccagcagcacatcaaaaagcttatccaccatgatcaagtgggcttcatccctgggatgcaaggctggttcaatatacgcaaatcaataaatgtaatccagcatataaacagagtcaaagacaaaaaccacatgattatctcaatagatgcagaaaaagcctttgacaaaattcaacaactcttcatgctaaaaactctcaataaattaggtattgatgggacgtatttcaaaataataagagctatctatgacaaacccacagccaatatcatactgaatgggcaaaaactggaagcattccctttgaaaactggcacaagacagggatgccctctctcaccgctcctattcaacatagtgttggaagttctggccagggcactcaggcaggagaaggaaataaaaggtattcaattaggaaaagaggaagtcaaattgtccctgtttgcagacgacatgattgtttatctagaaaaccccatcgtctcagcccaaaatctccttaaggtgataagcaacttcagcaaagtctcaggatacaaaatcaatgtacaaaaatcacaagcattcttatacaccaacaacagacaaacagagagccaaatcatgagtgaactcccattcacaattgcttcaaagagaataaaatacctaggaatccaacttacaagggatgtgaaggacctcttcaaggagaactacaaaccactgctcaaggaaataaaagaggatacaaacaaatggaagaacattccatgctcatgggtaggaagaatcaatatcgtgaaaatggccatactgcccaaggtaatttacagattcaatgccatccccatcaagctaccaatgactttcttcacagaattggaaaaaactactttaaagttcatatggaaccaaaaaagagcccgcatcgccaagtcaatcctaagccaaaagaacaaagctggaggcatcacactacctgacttcaaactatactacaaggctacagtaaccaaaacagcatggtactggtaccaaaacagagatatagatcaatggaacagaacagagccctcagaaataacgccgcatacctacaactatctgatctttgacaaacctgagaaaaacaagcaatggggaaaggattccctatttaataaatggtgctgggaaaactggctagccatatgtagaaagctgaaactggatcccttccttacaccttatacaaaaatcaattcaagatggattaaagatttaaacgttagacctaaaaccataaaaaccctagaagaaaacctaggcattaccattcaggacataggcgtgggcaaggacttcatgtccaaaacaccaaaagcaatggcaacaaaagccaaaattgacaaatggtatctaattaaactaaagagcttctgcacagcaaaagaaactaccatcagagtgaacaggcaacctacaacatgggagaaaattttcgcaacctactcatctgacaaagggctaatatccagaatctacaatgaactcaaacaaatttacaagaaaaaaacaaacaaccccatcaaaaagtgggcgaaggacatgaacagacacttctcaaaagaagacatttatgcagccaaaaaacacatgaaaaaatgctcatcatcactggccatcagagaaatgcaaatcaaaaccactatgagatatcatctcacaccagttagaatggcaatcattaaaaagtcaggaaacaacaggtgctggagaggatgtggagaaataggaacacttttacactgttggtgggactgtaaactagttcaaccattgtggaagtcagtgtggcgattcctcagggatctagaactagaaataccattcgacccagccatcccattactgggtatatacccaaatgactataaatcatgctgctataaagacacatgcacacgtatgtttattgtggcattatgcacaatagcaaagacttggaaccaacccaaatgtccaacaatgatagactggattaagaaaatgtggcacatatacaccatggaatactatgcagccataaaaaatgatgagttcatgtcctttgtagggacatggatgaaactggaaaccatcattctcagtaaactatcgcaagaacaaaaaaccaaacaccgcatattctcactcataggtgggaattgaacaatgagatcacatggacacaggaaggggaatatcacactccggggactgtggtggggtggggggaggggggagggatagcattgggagatatacctaatgctagatgacgagttagtgggtgtagcgcaccagcatggcacatgtatacatatgtaactaacctgcacaatgtgcacatgtaccctaaaacttaaagtataataaaaaaaaaagtaaaaaaaaaaaaaaaaaaaaaaaagatcttaaaagtagccaggggaaaggcatattgtctactaaggaatgacaattacattgacagtatactttctgataacaactatgggaataaaaaagaacataatagtacttttaccatattgagagaaaacatgtatcaacctagaattctatatgcagctaaattgccacttgaatgtgggtgacaaaatactcacttctgcactttactcttatagaaagtgcaaactctagcctcaattccaaacaatctttaccccaggtacataaaaatttcagtgtccaaatgcggtttgtcttttcatacctttgtaatactgcttccttggcttagaataccctttccaacatggcaggcttcaactcattcttctaatttcagttcaaatgctatctcttctgagaaaccgttcatcactcctcttggaaaaattattaacttcattcttgcattccttcacattcatttcaatatataataaatgttttatgaaagtaagcacgcatgaatgaaaacactacattaagtggtcaaaagagagttttgcaagaggttagccttaagttaggatttgctttaagcccagctagatcttgtttaatgtccaacttaataacaatgagagtaaagttaacaataaatcataggtctataatgacaattatagcattcatcatattattggcattcatctgtaatagtctaaaatgactattatagacctacgagaggagaagtgttcttcatcagcaggtaacacaggcaatacaagtgaggtggaccctattggttgactaacctacaaatcatggccaattctcttcacctttaccttcctctcactctagaccagcagtggccaatgaaactatgatgtaagtcatacatataattttagattttctagtaatttttactagaaattaatagctttagttttaatttttacattaaaaatgtaagaaaaggtgaaattaattttaatatgttttattaaactcatatcaaaaatataatttcaacatgtaatcaatattcataaaattattgatatatttacatgtatttttatgctaaataactatactcatttgcatgttttattcttacagcacatcttaattcagacactgaatttacagtagaaaaatttgatctacatctgttttataaatttacaagtgtaaaatgtagccaaactgagtagtaaaaaattattattttttaatatttgtatctgtattgacaaaaccagtcaatgaagtgtttatgtgtaatacaaaaagtgtgtgtacctgttgacacatgtactataatactaatattttatactaaagtgacatgtagtcctttcaaaacaagaaagttgtatgtaatagagactttttattgcttccattttatgcttaaattaattaaaatgaaataaaattagaaattcagagataatttcaattgcactagccacattccaagtattcaatagtcacatgcagctcatggctatcatattgaatggtgcagctctggaggctggaaaagccatatacctatgtttccaggctcctttgaagcttggcatggctgtgtgatacatttactttatggccaaagaaaatgtatgagaacgtttggaggggtattcttggaaggctttttgctttcctgataaagagacaaactcaagaggagaacttgttggcaccattccttcctccttcctgccttaaatgtgaacattatgtaatgtctggagctataggaaacatcttatcaccatgaggcaaactcatatgaagatgcaaagttagtacactaagaatgatgaagtaataaagtgagaccctgatgacaatcactgagctgccagatcaacacgagatcacctaccttttgaacttcattataagaaatcagtgactgtccttataacttaagtcattaatagactgataacacttgtagctgaaagcatcctaatgggtacaatgagcatgatgggctgggaagagagccaatagccagcctgaggagggtagaggtatttactgaagaataatgaaaaatgagtctacagagatggggtggagccagataatggaaggctgacgagatatctgaaatgagaggcccacagcaaagcatctgtccttgtctcagagaccttatcatattttgtattttccatagtagtttgtatatatgtcataaatatatgcacatatatatatttgctactagattataagggctaggaacttgtacagagaaaatattcagttaattttcattagttgatgattagatatagagctggaggtatcaaggctggtttttagcattttagcatggatcaaatattcaacattaaagaaaattcagcaaactaaagcccttagtgagaaaatctattaagagttcctatattaacacgtcaaatagaatgtcttcagcctaactttgttccatcaacagctaagacaacagctaagatgaaatttaactacactgagttaaattttgcccaaccctctctactttcaacttaattactggtaataccttattcttcctaagacatttggcttctattttcatctctttgaatgggtaacatgtaatcttatggtgtcccttctgttattcctctgaactaagctcccccattttctctcctttatctcacttccacagtgtgagactaggcctccaactaacagtttaaatactatgtaagcctctattgtccaatctgcctccagcctcatcaatcccaacctactatccaatcaaatttctctgaaaatattcttaaaaaaacatgttattttttcagattttaaaataatatgttctttgtaggacatttgaatatttcaacaaaagagacgaataatctctaatctgactaccaggagatagcaaccataacattttagtgtattttcttccagacatttttctatgcatgtttagatctatttaacatcattgaaattataaaagtgtactcatcttttttacttctcatcacatcataaaacatttcctgagtaattaaaaattcctcaaaatcatctcaaaaaataattgtatgatgtcccatcagatggccactttttaaatcttatttaaacatttttcatatcaacacatctcttctgagtccccatagtgactgtcagttgtcttttattaaataaaaattccaaatcttggaccctttggatgctgtcattctaaatctgcccctatcttctgctggcctttcagattttaaccaaataagttggcttgctcctctctcctttgagtcatcattcattttcttcctcccacatctctgtcaaatcactgctgtctttaaaatttacctcgggtaatctcctattgtctctttctttatattttcaaatatccttgtttagtaggtgtacatatttattactttgagagtttgtggctgatcatatttatgtttctgctacatgtgtgttatggtctgatagactggcaggggccaggatgggtggtgggaccaaaagcagcaggagaagagcttgcagatggtggccacatctgaccgttgtcgtgcttgatgaggtggtcagcactgaaagggaggcatgaggcaggactattctcatgctcagagctgagcagtggagggtgattatgttggcccggctttgattaacaagatagtctatcaggcatttggagaccatctgcattttcagcctaaacgaaaacatatttattttggctgctaagtatctggaggatgagggaaccatgtgcataagggaggcttaccctcctcttggaaaaaatgatctcaattagatcaatgtctgctttagatcagccagcgtattaagcataaacctgtgcactaacttaagggtcccagtgaagtgtccctacttttggatctaatgttcttgacctcacacagccattctcttataatcagaaactatgagcatctgtttaaaagtggaatctggaatgcagagcagccacttgcctcctcctcctcacctagccaggccatcgcctggcagctcatctccacagcctggatgctagtgggctagggcagccaggtggggccagctggaatgctcataagcaccactgagtggagcaggattcacgctaacaagaccccacaggagcccactggactcttgactatgagagatcagcacaacttgttgacttactatagtgatatacctacaatggaaaaaaagccttccgagaactgctttttaaaaattgatcatttgactcttattaatatgcaacaaacattgggtcactgaaagcatggctgtcccagtttatggcaaaagaaagcctatacaaaagaaatctggttttgtgcttgttagccacttgagcaaacagttgaacaggagctagcagctctaagatgtatctgtaaattttaattggtcaggagttctttcctagtagcccacttttccaaatatttatggcaccaccagatgtccgtgcgtttctcatttccagaatagggcatggacaaactctgctgcttcggtaggcgggcggggatatcataccccatgtctgcacatgccttgaaagagatggtctctggttgcagcatcactggccataaggttatcaaaggagggcaagaagcatgggcagatgtcttcatagagcatggcaagatgcatctttggcaaatgaagactttttgacgtgtgactctggtctcaagaaatcaaagtaatgacgttattatcaagagacaatagcaggtaattgaaaagttgccaaaagtaaaacttcagaatcatcctggactcctcccttctcttcactggcatttaattggtcacacagaccttttgatttcctctcatctggacctcgcctatccttctcttctttatctccaacaccactgtctttgttcaaactctcatcatctcatgcctaaactgctgcaataccttcctatttgtctccctgactttagtctgtcttcctatgcacatcagaaacatccttccaaaataaatctgaagcttctctctgatgcttaaatactttcagaggttccccagtgtttatggcatcatgtcccagtcttgtgtatttaacaactgggccctaccctacgacttttcttctgccactccccaccataaagggtacattgtgttctaactacactcaactacttggcatcctctaaacagttcagacataccatgattttgcatgcctctgttctttttgatcatactattccttattcctcaaatcctcttctccttcacctctgtttgatgaatttacttcaataggcagctaaaatattgctgcccctgaagcccactttaattcttcctggcagaatgtcactcccttctttccaggcatagtcctcggctcttgcccccatcatcccttccatattacatggcaagtgcttctttatttttgtcagtctctctgacagacatctctgtgagctccttgaccacaggacattgcactccaggagttaacacagggtctcacgtgtgtagtgttcaatcaggtttgctgaatacataaatacggctgtgtaaaaagttgttctgataaagctttatgtaacaacaaggccaactttcctccccccttcctccttccttctctccttcttccttccttcaaacaccggctgccaggattcttttggactttctggaggaacacataacaatggtttctgagcttcaagcatcagagataaaggagttgctatttccaaaatggtggtgtagctcagaggacctcatcaccagtgacacaatcaaagtcagtgaaaattattaaaacaaagaacaacaacaaaaaccatttgaaatatctgaaaattgtctaaaggcacgcagcaaatggagaaatattcattcaaggaaatctactaaatctcagtaagaagagtaagagtccattggcatttgagccatgacttgctccttccccaccccccacctctgcatgatggaagctctactctggatgactgtaaattagaacatgaagcttccactccccctagctcccagtctaaggttatggtatctccctgggaaaagcaggccacccacatttctcatgacccctatctctgtattgcataagctgtaggccaggcaagagcaaatgagagatctggggcttccttcctccacccaggcccctctttgtaaggcagaagttctcttccaggtgaagcaggccaagaataccaggtctcgattgcctttgcctgctcataaagtgatggctccatgccaggagaagtaagctgagaaggcaaaaggctacttccccccttcccagcacctcactcataaagcagggtgttgcttccagagaagcagaccactgtccccactgccagttccagagcaatggcttagagatttgttccacaggacaaggcaggcataacaacagagagctttatagctttccccaaggaactgagggtacttggaacagagactatgaggaagttcaagcctgaaggtgctgtagaaaacaatggagattctggtggtagccaatgaaaaggacactcactagtagctccatgagagcaacaagctaaaccagtttaagtttagcaaagatcagctagatgcttaacagagagaaccagggaaaagagatagttaataagagcctttcctgggtttgaaacaaaactcaaagaatggcctcaaagactacccctgcaaataaggtgaatttaactgcatcaaactgtgaggaaatttatgctcagacactgttgaaaacaataaaaccatcaggtgtcaattagtgaaggctaatatttacacatgatatcaacaaaggcagtcagcttagcagagatatcagggaaaaaaaaaacacagagagaggcagccctgctaaaaccattgtcatcctaaggtgactgtgcacatgcccaaggctatgccctctgaggaacaaaatcataggctaacgctaagggaaattagacttcactgagatagtccatccaagccactagacgaataaacaagtataaacaagccccagaaaaggtgggtggggatcaatatctagagctgctatattatctaaaacatccaattttcaataaagaattatgataaatgcaaagaaagcgctacccatacacaagaataaagcaggcaatagaaactgcctatgaaagggcatatatgctagcttagcagacagacttcaaaccagtcatatacatatattcaaagaaccaaagggagcaatgcttaaagaagtaaaggtttggctctgaggacttgctgaaaatgaaaactaataaataaataaataaagaagcaaaggacactataatgcaatgcctcatcaaatagagactatcaataaagagatataaattatttttaaaaaccaaattgaaattctgaagttgaaaagtgcaataaccaaaatgaaagattcactatagggctcaagaggagatttgaactgacagaagaattagtgaacctgaagatagatcattagagattacatactctgaagagcaaagaaaaaaaaaagaataaagcaaacaaaaggaatagagcctcagtgaaatgtggggcaccactgaggacaccaggatacaagtaatgagagtacaagacggaggggagaagagagagagaaaaagcagaaaaaatgtttaaagaaataatgcaaaaacaccccaaatttgatgaaaatattaggttatagatccaagagtcttaataaattctaagtaggatcaatacaaagagatccagacctaactacatcatagttaaaatgttgaaagctaaagacaaagagaaaatcttgaaagcagcaagagaaaactaacttgtcatggacaataagattaaaagctgacgtttaatgagacatgatgaaggccagaagccaatggaatgacacactgaaatactgatgaagaaaaagctgtcaaccaagactcttgtattcagtaaaactattcttcaaaaattaaggtgaaagacattcttagataaataaaaatgggagaattcattgcaaacagatctgccttacaagaaatatgaaaggaatttcttcagtttaagtgcaagtgactctaaaggttaattcaattccacatgaaaaaaaaaaggacaccagtaaaagtaattatataggtaattataaaggatagtataattgcatatttcttttttaaactgatctaaaaagcaattgtatcaaatagtatgtatataattttattgtggaaactataacatataagtgtaatgtagttgttagtaatagcacaaaggagggggtggaagcaaagctgtcctggagtaatgaaatgacaccagattataacttgaatacatacatacacacatacaacaataatagcataaaaaagggaagcatgaatagagatatataggattaacctatctcactggaattaattagtataaatatgaagtagattctgatagagctgagatgtatattttaagccctaagcaaccactaggaaaataactccaaaataaacaataaaaaatcattagagggattaaaatgctacactagaaaatattcacttaatgtaaaataaagcattaaaggaggagacagataaaaaggacatgatacatagaaaaaataaaatggcagaaatgaatacaactatataaatactatcattaatgcaaatagattaaaaatccaatcaaaagtcagagattgtcacatgagatttaaaaaaaaccaagatttaactgtatgctataaaagatacagtttaccttcaaacatacaaattagtcaaaagtaaaagatgtatcatgaaaacagtaaccataagaaagctaaacaggctatgttattagacaaagtagactttaaaacaaaaaaaaatgttactagagatggagaggaacttttaaaacttttactttaaattcagggatacatatgcaggtttgtcatataggtaaacttgtgtcatgggggttcttcgtacaaattacttcatcacccaggtattaaatctagcacccattagttatgtttcctgatcaagagggacatttcatgatgataaaagcatcaatcaatccatcagaaagacacagaaattacatataaacaactaacaacagagttccaagaaagataaaggaaactaacataatcaaagagagaaacagatgattcaacaataatatttggagatttcaatactccacattcaacaatgggtagaactagggaaaagatcaataaggaaatagggaacttgaacaacactatatgccaactagacctaacagacagtgtagaacactgtatccagaaacagaagaatacagatttttcacaagcacacacgaaaacattctctaggataaatcatgtctttgaccataaaacaagccttcataaatataaaaggatcaagatcatacaaagtatgttcttccatcacagaatggtgggagggagggccaaagtggattatagagcagagaataggggagggttgagagttgggatatcagggcacagtcaggagcaggtaaagaggtagagtagggaactttgggatttaaagttcaaagttcagaggtctaggagcaattgcacatggtgaaaaaaccaatgcagtaacagcagctcagtctgacgggtagctgagccgtacaatgtgattaagtgcaactcaaatgcctgccttgcagctcctgcctgtgacgcaggaggtcacagacttctctgtaggagcattttggactggtcatagcagaacatccagtggtgtatcttaatgaatttatctctgagcactccaaaatgaaatctgccagttgactgtcctcaagattatctaagaaggatgcctgtgaaacccaggaggatgattgcgggggaggtcctttcatactccccgggtgatgtggagaatgttgcatagacacaggatcaggtttagaaaacaacatattttagggcaggaaagaggagtaacatgtcatgtttcacctaaatgtgtaaccatctactgacagctgtttccactattccccatcaatcaaagatttggagagaagtgttaactctgtcaggccagaaaaagacccctgagcaggactggccttcccagcatgcaaatgcactccaagggagtaataagcactcactgtctgtattcctctacccactgccctttataacgtgggctcccttatcatatttctttaagatgatcaggtttttcctttaatggaacaccacagagctctttttccccctgaccttttcattcatgttgaataataaaacttaacattgagctgtgatttgatattacaaggcctgggatgccaaagttaaggccttgagtttgccagaagtttgtaatccttggtccagcaaaatttaaggatgcaatctggaagtgttttaaatgccaaaagaaatgtgacacctctctgctaggttttcatttccttctctcctgttcttcttttcccttggtatcttttatagtctccatggttccttcctgaggcagcctctctagcacatgggcccacctcttcccaaagaaggttctactgaactcagtacggctgcatttgctgcgtgtcttgtgcttcctcctctctgactctttgacctttctttccatgatgcctctgcctgcaggcccacactcagccttctcactgccttcttgtctggccacgagattgaccattccctgtgccctgggccagctacctacatggatcttctctactgtttctgggcaaggacactggtcacagggccagcgctcgacactctacgtcttggattttatttaactgtggtctttttataggtcctccattcatgaggccacacctcttcagcaaatgtgtacccatgatggctgcaggctgtctacctaaagggtctcagtgtcctgatcctcaatgtcatcatgagctggggagagagtgttaaaatcatctgccagcacatctgaggactggctcaaggtagaaaaggtctaggtaactcctatttttgtaatcttcccagtggaactaccttagctctaggagaagggagttctttttacatatgtaccttggtcttgacagagctgcttgctgagcatctagatagagatgatatagcatgaccttctgaagaatgaataaacatcaaggaaaccatctggaatagagtaaattgtaaatacatgtcccttacttcttccatttttaaatgaagccattgatgttgctgattcaccaaagtattccaactgcagcctgaagtacccgtggcacttagaatctatgtctaagagcaccacgtcctcatgcaagaagcagcctaaatccttcccaggagccacccttccactcctttactaacttgcacctttcccttcacaagcaaactcctggaagagctgtcagcgttccttggctccatttcctcaactactcttcacctttcatgccctacagtctggtttctatcctcagcacctcactgaaactgctcttccaagctcacctaccaccaccttatcttctttgatactaacaaccaagcccaattcccttctctgtgtctgttcctcttcagttttcatgccaggcttctcttctccttaaatgctagctcttttttcttttcttctcctccagccagacacttccatgtctcggggtgaaaaaatcattcaaaaattagtacccttaaaatggcaaataatgaatgactccaaaagataaattgttgagacttttgccttttgtattatcagggaactaagcatagccacatgctctaaacaaaatctgtggtcagtgccaactgcaataggaaatcaagcagatttgtggggcttttgcagaatgaaaagtcaaaaccaaaaccaaaaccaacaataacaccacctcctcctctctcccccttcccacgaatataaaaacatattccaatgtgatactctagttttgttttgtttttctaaaggagctgcctgactttcttgaccttgcagaaaaataaaatactccaggttttgtgcttttacagatgagccctggccaagtaggccagtgggatttacacactctctctgacacatcaccacacaccttttgttttgatgcaactacagtgttaatgtcaccagattcttcaataacaaaagtgttgtacattttcttttttttttttttgagatggagtttcactcttgctgcccaggctggagtttcactcttgttgcccaggctggagtacaatggcgcgatctcagctcaccgcaacctctgcctcccaggttcaagcgattctcctgcctcagcctcccaagtagttgggattacaggcatgcgccaccatgcccagctaattttgtatttttagtagagacaggatttctccatgttggtcaggctggccttgaactcctgacctcagatgatccacccacctgggcctcccaaagtgctgggattacaggcgtgagccacagcacccggtcaaaaaaaaaggtgcacatttttcaatcacttactgggcttaaaagacttctacatcccaggcattcacaaaaaagcaaaagaaaagaaaaaaaggataatacaaaatcaatttaggtaaaaaaaaaataaggttttgctaacttttctgaacatgtgcgacaaaaccttttaagagctctgaggtttacactttttccctacaggttttccaatttaatggatgatctaggaagacttacttccatgtttatccagtggctttgagtcctctaaatcccctgctgctaacctgaggatatcaaatttaggaagcggggcccaatgtcattagaaagagactaaatgttgtataatatttaatactgctctgtctgcttctcctgacagagcagtatgcagtagatttttagaatgatatttctcaaacttggttagaatgaaaaagaaagcaatatgctttggggttttggaggcagggggctgttttttgtttttgcaagttttatttatctgaaaaacttcatttcctaccacaacaggataaatgattctacttgatatacaggtcaaaaatgaaatagagagcaggcttagaacactagatatatttgtctctaacttgacttctagctttattttcccctcttttgaggagcttcattgattaatttggtaacatgagtatggtagaaaactcaggacacatctttttcaatgaataattttctctgtaaaaattcatttgagttttgatctgggaccatgattctgaccatgacaataccacctacttctgttctttatttggtctctggaaaatccgatccccgaaaataaaatagatgtgtacttcctcagaggcttcctgttatttccatgtgactgtgtagaaaaattaatatctgaaaataggtaacaactggggagaggatctctgacagggaaatgtttaaagggacagttatttttaagagtttgaaacatttaaaatctttggttatctgtaagtcatgatatatgactaactgctaaatagggaaaacaattcatgaagatacctatttgaggtctcttcatcaaacagctaatcttcatccacagggctatttgaaatatcaagtagagtccccactcacattattttcctaggtccctgacaatatttgttaggattgtcttcagtcgtaggtagcctctattcaggggttaacatatttattctcaaatcaaattttcttcttagttgagaggtctgtttaattgcaggtatgcagtaactaaggtaactggcacatagtaagtgttcaataaatcttccttctttacttgcatgaacgaaggacatcttataaaccttgtatttcacatcagaatgccagactcaaatatttccatgggggtaataagtgatcacaaaaaaacataataaatgggctagactgccagcttctcctgtgaaggagctgtggtctgaagcttctcctccacctctttcagaggaactctgggtatgtggcaggctacataaatactcagtgagaactgtgtgtggtaacgctgtgatttgtgaattgtgacataacatgcttatctctggataagtggcaagcctcatacgatggttccaactctaatttgcagttgaactgccttgcagtgggcctactgcctgtggcataatcaccagggtggtcgtccagacatattgattactcatttattcctgtatggatttaggacgattgctatgacttcagattattacaaaaacaattatatgatggtcctgttgctgaaggtgagcataatgttctttctcttgcatttctcaatgctagaattcctttacttaaactaattttgcaatgagttaagaaacaaatgttggaaggagcttcatttgggaatttggaagccctgagtcaaagtcttggctcctttatatgaattgtgtgaccttgggcaagtcactcaacctttctaagcctggttccttcctgcccacaaaatggggagtgggtggagatggaaataattaccctccctgcctcatatgggtgttctggggaggaagtgacacaatgaacacagatgtattaaatcgactgttaaatgctgaacatatgtcaaagttgtttcttgttgacctgccattttaaaacacacgcaaacatacaagcaccaaacataacaacagaaaagaaccagtgatggaaagtttgcaagtatgcttattttaaacagcttatcttcatcaacagggctatttgaaataacaagtagagtccccattcacattattttcctaggtccctgacaatatttgttaggattgtcttcagtcatacagaatctgaaatcaggattctaacctgacatttcaatttctaccttctcattcttctttgcctgtccccttttctgcatacctgcagaaaagtgtgggctgttgctcctgactcagtcccaggcttcatgtgattttatattctgagctcagttcagcttgaacagccttcccatgactgtggaggtagctctcattctctaagcagcgagaggcgccttcatgagcagctggagagttttacacttcttttgaggtaggctttccttttgtagccacagctcagcttcagcacagctgttagaaaagtcacaccatggaatactatgcagccataaaaaggaacaagatcatgtcctttgcagggacatggatggagctggaagccattattcttagcaaactaacacaggaacagaaaaccaaacactgcatgttctcacttataagtgggagctgaacaaaaagaacacatggacacagggagaggaacaacacatactcgggcctgtggtgggggtggggaaggaagagcatcagtataaatagctaatgcatgcggggcttaacatctaggtgatgggttgataggtgcagcaaactaccatggcacatgtttacttatgtaacaaacctgcacatcctgcacatgtatcccagaacttaaaattaaattaaattaaaaaaaaaaaaagaaaagtcacttcaagtaccagggcaccatggagattcctgctgtgatcttaacagttgctcccatcctccacttaactagctgtggtttccctgtgactggagatggtctaaaacaagcagagggcaaatgtgctcctgaagaatggaatcccacaaagttcataaaactaacagacaatcaagcatgctttgcttgtggcttatggtattttgatgtgagagcatacagaaacaacagaagcgaagaaactcaagcttctaactccagccaatgatggcctgcaccatcagaaggagctgggctctgggtggactctaagaagaaatgaagctagaagtagcctgaggaacccagtgtgagggtcttattttatctctcttcctgatctactagttagttctatgaaaaccacttaaccataccagctccaaaccactctttaaataaacaagaactcatggaaaagaggtgtgggattcttcttttcccagtccctcacctttctgaggatgaataaggtatttcatgtgggattctccacttttcagtctaacataaataatttattcacccagaatactgtttgtaatctttgaacatctgtatgttgcttttataactgcactgtgagcttatcatattttatgcttcttgagggaaggatcacatataatttaagatttatagcttcaataacatcagcatttattcaatcatttaccaacttcttcatataaacatttactggatttacaaatcttgactgaaaatctactttgtagcgaggcatttgggaaggctctgggagggatacagaaatgatgaagtcagtcccctcagttaaagagtttaaaatacactgggcccataaacatatgaaaaggtgctcaacctcactcataatatgagaaaagcaaattagagctgcatgaagatttcacctaatagagcagaaaaactgccaaagtgagaaccccctgtgttgacaaggctacagggaatcaggcaatcccaggtattgtcggtgggtatgtaaattagtacagaaaaatccccaaacagggcaatttggaaatctctgtaaaacttataaatgcatgcggattttgatgtagtgagcctatgtgtggaaatttattttgtagacatacatgcacatacaaactgatataagggcaagttatgtgttgcagcatcacctataacagcaaaagattgttaaaaaagagataaggggtttatctagtgataaacgataaggggctggttctctgcataatggaatactatgcaactgagaagaacaatttggaaaaatgttgaagatctgtttttaaaataaattttattggctgggtgcggtggctcacgcctgtaatcccagcactttgggaggccaaggctggtggatcacaaggtcaagagattgaaacaatcctggccaaaatagtgaaaccccatctctactaaaaatacaaaaattagcggggcgtggtggcgcacttctgtagtcccagctactcgggaggctgaggcaggagaatggcttgatcccgggaggcggaggttgcagtgagccgagatcatgccattgcactccagcctgggtgacagagccagactctgtctcaaaaaaataaataaataaaaataaaaaataaattttattgtatatatttgaggtttacaacatgatatcatgggatatacatatatagaaagtgaaatggttactacagcaaaataaattaacatatatctatcaccaagatctttgttttttggattttattacatgattttattattttttaaaaatttttcatttccataggtttttggggaacaggtggtatttggttacatgagtaagttctccagtggtaatttgtgagattttggcacacccatcaccctagcagtatacactgaactcaatttgtagtattttatctgttacccccctttcaccctttcccccaagtccccaaagtccattgtgtcattcttatgcctttgtatcctcatagcttagctcccacttatgagtgagaacatatgatgtttggtcttccattcctgagttacttcacttagaataatagtctccaattccatccaggttgatgtgaatgccattaattctttctttttatggctgagtagtattccatcatatatatatcatgtcattatccacttgttgactaatgggcatttgggctggttccatatttttgcaattgcaaattgtgctgctataaacatgagtgtgctagtatcttttttgtataatgacttcttttcctctgggtagatacctaggagtgagattgctggatcaaatgatagttctacttttagttctttaaggaatcgccgcactgttttccatggtggttgttctagtttacattcccactagcagtgtaaaagtgtttcctgttcactgcatccatgacaacatctatttttttttttttttttttggtggtagaagtgttccctgttcaccgcatccatgccaacatctattttttttaaattttttgattatggccattcttacgggagtgagttggtattgcattgtggtttgatctgcatttccctgataattaatggtgttgagcatttttttcatatgtgtgttggccatttgtatatcttctttcaagaattgtctattcatgtccttagcctactttttgatgggattgttttttttcttgctaatttctttgagttccttgtacattctggatattactcctttgttggatgtatagattgtgaaaactttctcccagtatgtgtgttgtccgtttactctgttgactgttccttttgctatgcagaagctctttagtttaattaggtctcagctatttatctttgtttttgttgcatttgcttttgggttgttggtcacgaagtctttttctaagccaatgtctggaagggtttttctgatgttttcctctagaatttttatagtttcaagtcttagatttaagtccttgatctgtcttgagctgatttttatgtaagatgagagatgaggatccagtttcattctcctacacgtggcttgccaattattccagcaccatttgttgaatagggtgtcctttccccacttcatgtttttgttttgttgaagattagttggctgtaagtatttgggcttagttctgggttctttattctgtttcattcatctaggtgcctatttttataccagtaccatgctgttttggtgactgtggccttacagtatagtttgaagtcaagtaatatgatgcctccagatttgttctttttgcttagtcttgctttggctatgtgggctcttttttgtttccatattaattttaggattattttttctagttctgtaaagaatgatggtggtatttggatgggaattgcattgaatttgtagattgcttttggcagtaaggtcattttcacaatattgattctatccatccatgagcatgggatgtgtttccatttgtttgtgtcatctatgatttctttcagcagtattattttattatattttatttttttgcagctattgtaaaaggggttgacttcttgatttgattcttggcttggtcactgctggtgtatagctgagctagtgatctgtgtacattaattttgtatcctgaaactttgctgaattcatttatcagttctaggaattttatgggggagtctttaggttttctaggtatacaatcatatcatcaacaaacacctatagtttcacttcctctttatcaatttggatgccgtttatttctttctctggtctgattgctctggctaggacttccagtactatgttgaatagaagtggtgagagtgggcatccttgtcttgttccagttctcagagggagtgctttcaacttttccccattctgtataatgttggctgtgggtttgtcatggatggctttttattacattgaggcatgtcccttgtatgctgatttttctaagggttttaatcataaagtgatgctggattttgtcaaatgctttttctgtgtctactgagatgatcgtgggatttttgtttttaattctgtttatatggcgtatcatatttattgacttgcgcatgttaaaccatccttgcatccctggtatgaaacccacttgatcatggtggattatctttttgatatgctgttggatttagttagctagtatttttgttaaggagttttgcatctatgtccatcaggaatattggtctgaagttttcttttttttttgctattgtcctttcctggttttggtattacggtgatgctggcttcacagaatgatttagggaggattccctcttctgtatcttgtggagtggtgtcaaaaggattggtaccaattcttctttgaatgtctgatagaattcagctgtgagtctatctggtcctgggctttgttgtgttggtaatttttttattatcattttagtctcgctgcttgttattggtctgttaaggatttctaattcttcctgatttaagctaggagagttgtatatttccaggaatttatccatctcttccaggttttctagtttatgtgcataaaggtgttcatgggagcctcaaatgatcttttgtatttctgtcatgtcagttgtaatatttcccatttcatttctaattaagcttatttggatattttctcttcttttcttggttaatcttgcaaatggactatcaattttatttatcttttcaaagaaccggccttttgtttcatttatcttttgtattttttttctttcaatttcatttagttctgctctgatcttaaaccataatctatatttaagtgagaaaaccaaggtccagagaagcacgtatagcatgctatctttttttaaaaaatgaagaaagataagagcatacattaatattttcttgaggttgtataaagaagctccagaagtatacacaaggaaataatgaatgtgttcaggaatgatgggaggtgtgtagagtgtcaggtggtaatggaacagataggaactgaagtgggaacaaaaccctttactgtttatctctttatattgttctggtctaagaggcatgtggatgtattacctcttcaacatataaaataaatatgttttaaagattttataggaaagatatacatgtcccaataatatgtactatacacatctctgccttattttctaattaaatttaaaactccttcagggatgaattacataagagccttttaaacgaatctctccatttctccctctccaatttctcttataaatccttgccagactaatcttcccaaataccttgttagacagattgccagaaatgattccttatggtctctgcaccaaattcaaacatctctgacttctagggctccccacaaactcaccccacccaaccaatgcaatttaatgtccacaattgagatctccaacaagcatcatttgcttctatcagggtgggttcatcattgttcttgaacgtttccatccctgtgcctttgcttgagctatttcccatctgtggggatgacttacactttcccctctgactattctgaagttcactgtcttccaaggccgctcccttccctaaagtctgcattttgagcccattctgatctatcccttatgtgacctccatgatactgtcagtactctgtgcttaactcagattctgcaataaaaccgttagttccttagagataaagacaacgggacctttaggcacacacacacacacacacacacacacacacacaccccactgggacccgtgggaggcagcaatatcaaccacagataactccagctttctgggtcttactaagaagatgctttccaggtcacagctataaggaatggctagaccccaagtcattcaccatttcatctttcctaatggagttttagggacactgagccaaattctcagattcctgttaaccattttgtataacaggcaccttactttagatcaaactgaaattcaaacttcactgattctacctggtgaattgcagggaggtctcatgtaaattcttgctattactaccactatcaccaccagatgatggaagagctgtgaggacacttgagttctccaagagaaaagagggcaatatctgttcccagtccctttaggcccttgtctgagccctctggagcaagagaatgaggctgaacctgaagtgggttctacaagaggctgaggatggaagtgtctgggtagtgacaagagccagagaaatttgcattatttcttttcatataacctcattcaccctcccaaatacatgacaccttgagaaatttagcttatatctgatattcatttactagttcctcatgcagtattgggctcgtgatgttactgataatgaatacataatttgatgttagcaatggccaggaggttacatttggagagctgcctccctcccatccattggtaagggctgtttggagtctcactgagaaacattttgaagcccagtccagcccactgggagagagtaccataagccattgcagatgtctgccaagggctccgggtacgaggacacatgttctatggattggatgtgtcatccttgctcctatgcagacaaggaaactgggccctagagaaggggaggggcttgttcccaggtcttatgaccaacctagaaccagagcccaggcttcttctctcccgatccaggcttccctttcctgtcaggttgttttgctttttagatcaatggaaaagtaaggatcatcaaaataacaaataatccaaaactttcatttcagtaaagagtttttatctttcattccttcccttctctctgccaaagaagctgttttaaaagaaaatattcagccgatttgagagattttcctcctttctctcttgctccctgctgatcttttggggaaagggaacagaatagacaaaatataggcagtctgaaggaaaaataagtagggcactatttgttattgcataagctgtgtaaataatccagaatcaatggtgcctgtaaacttgcttggatgcaccaagattctttcctctccacaactgtgattttcctgaagtcccttcctccatctcttgcttgtgaaaccctcacccagctccacatttgatttctgcatctgggattatggggaaacagtaacttttaaaaagatttcccacctgacacatcatattatgagtcctcacactggggtgtacctttgtctgacatgccaagttttctctgttagcattttaaaaggctgtccctcgctcatgaaaacaacttgaaatccattgatttagagcaggttttaaaccagtgcatttcaagcatctgaaagagatctaaagtttgaccctaacagtaaaggtccaggcacttgaatgttttgctgctcttccaggcctttatccgagattcaaaggagaacctcaaggactgttactataatatccaggatatcagccctaagagaaaagggaaatggaagaaagcctaccagcatttcaggatcagtaaatgaaatgagacaggttctggtgaaagaccaggtatctaaaagtgacatttctcagtaactagctgttctattcattccaaaaacatctattgaattctggccgagggtcaggaaccagggataacaaaaatcaatcagccatattccatgctcttcaattcataaagagtgggagaggctatatacacatgtaaacaggtgacttcagtgcagtgtgacaaatgataatgaagatgaagacaaagcagtgctgtgagaacacttccaaaagtgacttaaaggaacttactgctgccatcattcactctgcattcgctacataccaccctccatgtgcacatggccgtttccatctcatctccctatcatgttgtaggggccatgtggtcaacttacttgttgtctttacagggcctgctccatggcagatgcttaattaacaaattagacccacaaatatttattgagtagcttgtacctggtgtgagacacaaagtagagaggaggctaataatgatgaataaattcatttccacattcaaggagattacagttcagtgaccatgaagatgtaatatgataaggtgtcataaaagcgacacaagcaaaagtgctaggaatgcagggccaggaagggtcaattctgttaggactgataaggaagccacaagggagaggaaagagcatggagtcctatggagcaggaccacaggcaagaaatggcgggagatggagtaaaagaagaagctggaaatgtagacaggccaatgccccttaaagactttgaactttatttttgagataagaaaaagtctattgttgattgatgaaaatgattactttcaagagtcccagatacgtgcaatattactgtagttaagcaattactgagagccacctggactataaaccttggggctatttttctccacattaagctacattcctcttcctaaggactgggcctgtatatataaaggtgtcactatcccttcatatatgggccaggctgtggtgcagtggagccacttagatgggaagcttgcatctgtgactatcatctctgcctctcctcaatctgggtttgcctcccccagggaagccactctaggcacctttctctgccctctcctctggattctggctgatcccatgggggttctttatcagcctctctctccccagcaattcattgtcatctcccccagggctctctccttggcctgcatatttctccatcttcaagatgaggaacttacatcttagtgaggttgcccattgtcccactgctagtaagcatagtgagtagaaaaggacctgcagtagtacttccagaactaggactctgtgttactttctggtagtgaagctggtgcaatctacacataacagatgagatcagccacctgcagagccatttcatagacaggatgtctcagaaaattaaggaaagaagaaagctctggaaatttaatcaagtatgatgaaatgtgaaaatgcacacagcttcttatcagcaagattgtccttgacaatttctttaaaaaccactatcccccaccaactctttatccccttattatgcttggcttttcttcacagcactcatgatgtatttgcttctttgattgctaaccatcttacccatttgaatatgagttccttaaaggctggggactgcatcttcatctaactttgatccccagcacttagaacagggcttgacacatagtaggccaggaatccataaaatctgtagtttagcgattctcaagtgaagagattgacaaagcatcttccattcttctgcctttccccaaagattctcattcttctacacattatcaatgtgcagagagccactgtcacgaaaggagcatgttggcctctcagctatgtcagaacacaacaaacagcaagccactgattttgtttgaacaagggatttaacacatatttagaaagaatgtgccaacacaggaaggaagggtaaaagaaagagcttgcacccatagagcacttactctaggccagtaaagctccgagtgctttatcctttttgactcattgaatcctcacaacatttctatgagggagataggtgtatatattatccccatttcatagatgagaaaactgaggcacagagaaactaagtaacttgtcaaggtggcacagctaggatgtgggattcgaattcagacagtcagcctccagagtccctgccaggcaatgaagaacaatgcttgtggcagatgaaagatggctgtgaacactttgacattttgtccatcaatgagtgaactctatgtcccctacctctgaatccaagttggcctgaggctgacttgattaataagatatcacggaagtatcactatgccagttctgggcctagcttttcagaagactagcaatttccatttctttcctctgggaaacttgagcttccatgtaaatggtctgactaccctgctggagaggccaagtggagaagccctgagactccacagagagacagagggaacctgcagggcccaggtttccagttgtcccttctagagcacccgtcatgtggatgggccatctggggccctcagcaatgcctagttgactaccactgggtaactccattggatgtcacgtggagcctaatagtcaccaagctgacctctatctaaattcccaatacacaaaatcatgagctataataaaatgattgctgctttataccaccaagttttggaatagtttgttatgcaattatactgtgttaattggaacagtgttcatcaaatttttcgactgagatgcacagaaagaaatacatttgccgcaaactctacatatgtacatactaaagaaaccctgaagtttagctttggatccagtctttgaaagtccaagtggctgaatgcctagttcaacatcatttctagaatttctgaacctgtgagtgatcagcaataacatgattgcaaaggttgcatgaacccagcaatgttaataatagaacaaggaaggctgttggatttataaatatctgaatattcactttgaaatattctagatataacccagaatgaaaatctatatctgcatcagtaagttgaattataaatgtacatttattactgcaagactaaaacagagccataacaattataatgctataaacaaaacaattaaaaaaatttcaaaataacaaccaaatgttgttaacagtaacaacaaataataccacagtgtgtatcagtttactttaaaaacagcattctatcctttctgagccaacacatttttctaaatttaaaaatagtaataaataaaaatagaaaattagattgattctttttacttaaatgaatttatgttttaataacttaattcaactgaggctgtaagtctgacaaactatatactacgttgctgtcatggatactgtgggtgtcagctatatccccattcaggacctggtctcccagctgctgggactgctgctggcccacagatgtcagaggtcagccctctctgggaattgccctctgctactgcctcatccaaagtcagattccctccccaggggcatccagcacccaaagactggtccatgtacctaccctaacatgggccagctctggaaggccaccctttagctttccggcttgctgtggagaggactgaggcctttattgagacagcttcacagtctagcttctctctgcctaggtctgctttctcccttcccccacaggtgtcaatgccaagagttctccctacaattatttttgttccagacgaggtaagaaatatacagagtattaagaaaagaagaaagtgttagagaaaggagaaactcagaaagcatctaaattcaccactgaatccaggtgagtgctattttgttttgcgaatgggcagtttagtggctgaaaaacagtcctatagatgacaatctgagatgtgattatttctatcttaaatgtcagacttctaaaaatccaagcagtaatttttcataaaatttcagatttattcctatatccccaaaatttatttcatcatggggttatgaagctttggcctccacttcaggtgaatattaaccctcaacattggccatttggcatttggccaagatatagtcagggcacctcaaactatatacttgcatttataggcatctatctatctatctatctatctaatcatccatccactcatctaaaataaaatctcatgaaataatacttgcccttattatacataatgtcctctaataatttctattatatttcattttttaaattgctcattatgacctacgaagttattttcttgacccaccaatgagtcgacacttagtttgacagaggatacccacttgccaagaattggcagcattctctaggagaagtaatgcttaaaatcagccaaccctgatattcagtttacttggcaggcagagtaggggtccagcctcatgacacaagggttaagatctcccatttcattgtcttgttctgatccacactcaataatcatcttagatagtttgccctgtggtttctgcatagtctgctcccctgtcttggacttgctgtttctgctttgccccactggttgtctgattacaactgctattcacttcaggacttggcagagatgcccttttctcccagaagccttttatgactctaggagcctgggttaggtctccttctgtgtagtcaaaactgactgtattggtcttgcttgtttactagatggtgggaactaagagcctacagactgtattttatttatctttgactccctaggacctgacatcgtgcttggcactcagtatgcaattggtaaatatctgctgaatatgcaaatatttgtctagccatgtacatattcctactagagagagacactgtcctgaccagccattcaccaactaaacattagaatttgggcttgtttggcaaatataaatgatattgtaaattcttgtcaattgatattttgggacttatagctctttctcctgtgggtttagtttgcatgagcccatcctcattaatttcattaactctggaggaatcacaaaatttagtttctagaatggcagagttgattcccaaacctttatgatttcacctaattaatgttgtcttccaaagtcttgacagcagccatctgatgtctgactgtgatatccctattttgcccccttgacatcaattttaagttcagggaaaatgtttgaaatctaaggctttttaaaatacagctaccctctatatcttcatgtcaattaaagtgatggccatagaaatcagctttaagctatcttctactttctcttgatttggtataatatctgttttctaaattgcctttgaatatttgaatttcttttgtgggatttatcttttcctttttgaagctcagttttttaaaggaaggctgttaacaattttccaaattttgtttttggtctcaaaccacattcattggtgctcaatgaacacatctgttcatttaaaaatcagagctggtcatcgcaatagactttagagatatcccaactggaacttaggtctgcatgggcctatggaattgatgttattaataaatcatcttgggttacttatttcttacttgtggtgagggagggataaagatgcaaatttccaaccaggatagaaaatgaagaatactagcacttgagcaaaaacctcaagcagaaaaatatgaagaacagaaaggagtgacaacagtggcaacagcagccatatttcagtgcctccaagtagcaacagtcttcaggatggagtgtgtttcccccagtgactggtttaatagaagcaagaaaacagctgctaaggagagctatgtgacaaggggtaggaggataaaggtcttataaatgagtaaaacaaaccttatgaaactactcgatacaaacctacaggctcaatgactttatattgttatcagtcatttcaaaaagaaaaattaaggtcttctttagagcagcgcacagagaattctccagggaatgacagagagcagaaagcagaaaatatattcagaaatgaactactgacggcatatttgacctgtgacatttttgttcttcttatcctctggctaaatttcacccttggatatatgtaaaagctcttactaaattaaatggaagttaaatgtgcatgctcataggacaaatttggcctgtagtatctttccaaggatattaataaagtacgagaagtgaaaatgattgttaggccatcagagttcctgcttcagataagaaatgctgggagagagaggagacaatgcattattttctcctttggagaggctccatgtctgtgctctctaacatcagtaccttctcactgacacttacatgagtccacagaagcatgctgtcttccaactaaacagtctgatccatgcagcagaaggctcccagacaatgtgaaagcagaatggattgtgaaatcgtcaagtaagggaaaatacggactttcattccaaggtaaaagtgtgagttatcacattaacacatctttattggtgagtgagataggaatgctaccggggaaaaagtactaggttgggaaaccaaacaagtgagtgagtctaatgtctgttagaaatgaggtgtgtatctttgtgaatgcagcaaatgacttggctacactaaccgttgggtttgtcgcctataaaataaaatggttgaggaattcgggaagggattatctagctagttctggcaaaaggctgctcatgttgcagactgaaggtagctggagcttgggaaagggtatgctggagaagtcagagcacaccctaggattaatatggtgtattctagctccaatattctgtggtttataaaatatcaaattatccattaaagtgctctactagccattaaagactatgataaaagtcataaaggaggaagaaagtcaaaacaaaacttcatctgagaagattctgacaatgttcaaaaaaaaccccaccctgtataataagagtaataataacgaactgagtaataataatttatttagtagctactacataaatgtagagctgtgttgcagatatgttacattcaccatccctaaccctcactacactctgcacattaggtgtgttagattgtattttttaaagatggacacaacaatatctcccattacacatgcttttctagaactttgtcccatcaccatcaggaggtggaatctaatttccttctccttgaatctgagtggatctgggactcatttgtaatcatcagaatgtggcagaagtcactctgcaggggttctgaggctagttcctaggtgtggctcctgtcttgttagctggaatactaactctcttgaagcctttagtgtctaaataagcaatctggctgctttgatgttggtaactgccatgttgtgagaacgctcacacagagaacacatggagaggccctgagccagtgtgaagagagataacagacaactccaacttttccagcaaattctcttcacattgttccaggtccagccaccattggactgtaaacacatgagcagcccaatgccagagctagctagctaatcccttcccaaactcctgatccagaaaaactgtcagagataataatagtagtgttattattttaaacgactatgtttggagttatttgttacttggcaatagctaaccagcagatttccgtacttttggtacctgaaattgggatattaccataaacaaaaatctgtaacattggctttgggaccaggcagcagtaagaagccagaagggacttgtagagtctgttagtgaaagcctgaaaagttttgaagacagtgttagcagaagccttgaggggcctattggtgaggcttaaaggaaagtgaaggaaatactacttgagctggagggaaggaaactctttttatgtagtagtgggaagttcagcaaaattgtcaccagcaataatgtgaaaaatagagactgtacctaatgaactcaaagatgtagctagggagacttctggaaaattgagggtgttgagggtgctatctggcttctcttagctgcctatattaaaacgagagaaatgaattaaggaaaagctattccatttttgagtggaagttggaagaattttaaaggatccggaacagccttttcagtcagcaaaaggttcttgagttaagaaatggcttcctggaaaagatgacacccacggcgagactgtaagattctttattaagacctcataaaaatctagggtagtacctctctgaccctttagacagaagttctccaaaggatcaaaagggcattcctcacagatactcacagttaaacaatagggcttctaacgactttaagggcattgctgcacagcaggctcacagggaaccaaagtggagaaggacttatcttgaagagatgcatggattttgtctaatggagtggattataaattaatatgcaggaagcccatacattttctaaggatattgtatcagtttgggctaaaggaacagagatggtataaagtgtaacgaagtctttggaacctcaaccttttacaattaggaagtaagctgagaagtttcctcagttgcaaatacagatcacttcttacggaacacaagggatgccccaaagactgcaaccaaggactcagagggcaaagccaagaaccatgggaaatgactcccaagaagtggagctgagttccagtgaaggacctggagatatgtgcctggatggattttgtaattgctgtgtctcagtgactgttgtgtgcctcccccttcctcctttttgtcttttgcagttatctaagtttggtactaggctcagaatatccattgtatgttatacatgtgtggggtggtaacttatatctgtaggtctacagttggggaaggatagttctcagggtaaagaacccaaggaacaacacctggacttgatttagatccttgaccttgagcctgatgctttctgcaagctcttgatttttatagaaaaaaatatagtcaaaaagcacagaacctgtcatatttattgttgtgacttccttttctcattgacatctaaagcactgacttaggtcttacttcctccatgaagctgactgcttcatgactgaaaataagcacctttggagcaggaaagaagcttgtgtttgcccagcacatgattcagggttttacatttattaaacattatatgcttgatgatagtgaaaaagccttacacctttcctccttctacagaacctagggaatatcctcctccttgctgcagaattcttagttccaacactgtcaatcctgaatgactcagaaactattcatgcatgataaaccatgtatattatggaattttagcactgaaaaagaccttagaggtccaatagttcaaccccttcattttacagatgaggacattgaggttttattggtcagtgggatgatttaccataaagtggttaagtgacctgcccaaggttgtgtaattaatgacagagccaagactagaaattcctcctgtcattacattccttccttcaacaaacttttctgagagcctgctatttgcaaggcatgtgacagattctttccttctctgtttccctttgtactcactagatgatgttcaacagaatcaggaagcagagaagcattcaagccagtctactgagtcccttcttagtagttctagaaaaggtgtgatgggtggaggtgttaaaactattgcccttggcacagtattgtctgtgaattggtactatttatgccatacactttgtgtaacaccttgccacagatcatcaagaactaggtaaattggctattttccaaacagaatatttttcttgctcaaggggctactttcaaattgtacacgatttcatttagttcaaaattttatagcaattgttcttaccagctgctctggcctatttcctaatctttcccaaaacctgtcactggcttgcagtaagatggagttcaactaggagctcctcctggctttcagagccttcttttggcctctttctatacacagtttggtgaggtcttggcatcttttatcaaaaatttccccactccttttgttgcacaactccctacaggaggaatattctccatttccaagaacattaagaagtttcttgatattcttggaaaaaagctcactgaagaacccacttcctctttaatcctttagggaatgcaagtgtggaaatgtggattctcccatccttaccactttcttttttgtctaatgtttattactgacttgatatatagcttggaaagtaaggtttatatctgatgagtgactctggtagtctctggtatgttatcacacactcaagagaacttaatacttatcttttgagtataaaatttcccactcatttagttagctaaatcccaggaacattgctcagttttagtcacaaggatgtttatacattaagaagtagatacatcctcttccttaagaagattttaaaattaagggtttattaaacaactgacagaaattaacactcaatgccaagaaggaaaatactgtattttaaaggttaaataaccataggcatttttggagctctagagaagaggtagatacttccaatagtatttttatgaaagaaatatggagaattacatcatttgaacaaaagcatatgttaaatttaaataacaaatcaatgcctctagaattctgaaatctttctctagaaagaaatcctaatgttccgacgtaaaagaatggggtattttattcatggagagaaaaactattgtgataatttattgttcttaatttttggttctttttaataggaaaaaaaatcaagataaatgaatggttaggtattcccactattttaaccaaataggtaaaatccataagaaatgtccttatgacaagttttttttttcattttttacagacaaaaaaaaagataagaaaaagtgtacaaatgtggtgaatccacaggtactttttaaacagcagggtagctgcaggatcatctttaatcagctcccaaacatactcttcacatcaggggagtttcacaggggaagtggggatggggacatcagaggcctcagaactgcccaatttatttagggaaaggaaatacaggtggaaaaaatctgtatccacaactcccactccatgttggtggtcactcccgagctaactagtcaccaacaacatttcctgcagatgagatagttgcattcccaaagagccacaaaatgggacaaattactgtaattaaaaccctgtttccacagagtccttgttctgctaaggcactggtggaggggtaactgtggaggactccgtctgagctctgtgtgccacgtcatcataccaaagtggagctagaatggggcagacacatgatgttgggtttagcgatttgcagcagcgagagtgcagcagcccatatgtccgcgtgtccctggaagaggaagcacttggtacaaacaaggcagcaggattgggctcagtgggaacttcctcagcagcatcctgctctcccagccccaccctagcttgagatatcagctccctgagggtaggtgaggcgattgccatcttaatatgtggtccctctttccccaggggccacctcttgccttatcccagctttccttatagtatattgcaaagagcagtgattctctggaaggttaaaggttttacgcaaataaaagaggtggggtggtgctatgatcaaataagcctgaaaaatgatggattaaacaaaacaaatagttgtatgggtggattaaaaagattaatttcctttcggtcaatctatgcagagtatgacttttttacggggaggatgtagtattttgcatctcaaacttttctgatcagagaatccctctctcactgagtttctgccaggactatacttcatggagaggagaaaaacagcttccggatgggggaggggatggaggagggagccctttgtcatgtataaatgtgaactgctttctgaaaactctgaaaagtaatggagggggataccttcaggggcctggggaccccagaataagaaagaagagtgagagccaaatgtgaaagccatttcatctcaggctgctgtggtctggagaaacttgagctacatcttcaaaagtctccctatcccaatcatttcttcaattctatcttttcctcaagctgccagcctgtttttcttctttcccttaacattaaacctctaaactgcctgctctgcttcttcgaatcccacataatcggcatcccattatgttttggctccagtgcccactatctaccgacagagatctacctaaagtccctcagatttcactgtcacatcacacttcatttgccacatgaccacaggacggatggatgtcaacaggggaggcagaaccttccaatctagactgagtttcgaatggctcaattggctcccataatagtggcagtgatagaattgctaacgttttttgactacttattctgctcagccactattttaggcacttcatattaacactaaatattaacacattgaagactcacagtacccctgtgagggcataagtaacttccttttttccttgagtggcagagtccagcccctacactgttattctccctgctcatcctcactggagggaataaagtttagagaaaagtgactacccccccaactccatctgcaagcctgagatggtcgtagggtaagggtcatctatttttatgagaaaatcttgtttacagggaaatccccattacactcaatgtctaaagccaacagaagcctcttgataatagtaaattatcaacattttcacatcaaaccagggatgatgaatataaattcgtaaacttattatatgactaaaatgaggcaaatcctgggtgaatataagtttatgcttcaggaactcatctttatattttcaagacccttcacaaaattaacaaatttaggaattccactttgatttatagcacttaatcaagttacttaaaacgtctaactcttgtacagatttacaaaactgccaccatgctagattaattgcttgggtcacaaaagaaagattccacactgatgctttacaactttatatttaggtgccttgcccgcctttgcaggcaggcttcagtgcaggagccgtgtggccatgtgcagctcctctgtggggcagcagctggactccactaaaagtggaaaactgctcgttctacattagactctctttcgcaatttcggtaagttcttcagtgacaggagccagcctgccaaaatgtcagcaacaggatttggtccaacataaacacccagcattatgtggctaatgcactgaattagagttacactgctaccctctattcctgctcaaaaacgactttccagatcccagaaaaacagatctgtcagcatgaagattgggatagctgtcaaatagagaagtcaatgctgtttaagtcccttgtcattagccaagtctggggaaggccgtaagagtttcaggcttctgatgcacccctcgcttgggttcaccagatcttatttttaacttcccaagatcctaggcagatggtttgtgtggaaaggaagaaattgatgattccatgtgtttaccaatcaatcaactgtagcacaaagcccagtgttcaggggtcctaaccatcagtctaaggcaggctcagaacccaaacctggtccatacattacaacgtgagaaatttcatccacagtgacagatcccatgaggttcgatggggccagacctctagggacaatactgaagttgcttttgacaactcttcactctcctatcatccctccccccatcacgaagtactcaagcttcctaagttttctataatgttctgacagattccatctccttgtcctctttaccttgcagtccatcccctgttctgttccacttcatgtttctgtaagtgaacatctaacaaacagattataaactattggtaactagagagccaacttaattattttggaaacttattcttgttgttcatctttaaagaaacgttctgtcctataaactaggaatctaggatgtcttagagaaaggagaattccataattcccaaactttaggttgcatcaaaatcatacaaagaacttgtaaaaatgcagtttgcctgtagtggggcccatgttcactaattgtctgcatgcagcttgggatttggcactttgagaaacatgggcctatacagagaccaaaatttttcctccttcccaattcctggatcctgcacaatctacattaaaaaaataataactcttccaatgattcagatgcagctgagctacagaactcatgatgaaaacaccagtctacgtagttcccttatctccctctagaatatctccctaatcagctgttgataattttaaagctcaattttaaagaaacagaaatccttctcccctaggtgacagagagttgcgggtgaggagagctggtcatttagaaggtgaagaaagaacagcacaatgaatgttagagcaattgtagctataacagaaaaaagaagggtggatggctacaaattctgactgcttcacaatttcttccagggcaaactttttttgtgaagggcaggatagtagattttttttcctttgtgggccatatggtcagtgttgcatctactccatctattgttgtagtgtgaaagcagctatagacaatatataaacaagtaagtatgactgtgttccaataaaactttatgtataaaaatgggggctggcccacagggtgtgggccacagtttgttgatgcctgttgtagagtcaatataataaatatttttaaataaaattatagaggaagaggagatgataactttttaggttctaacagcattttaaaaattgttataaaaaacagctagtaagggaaaatttgactagcgtacttactgaaagtgaacccccctttgtaggtaaatgagagtggcatattaaagccacctggcctttcctgtgggcacacagaaggggaaataaatagaaaaagggaaaaatatgttaatttaaaaataaacagttgataaatgctttggaaagaatgaataataacctgtaactacagggtgtgatatggagatgctgtggaaagagcaaagaatctgtagccaaaagacctttactcattattcaagtaagtcctaggcacaacctgtgggctgagcactgtgctgggcagtgggaaaactgagacctggcccttagaggggttagagtcccatagggtacaggcccctagccaggtggttaaaactgcatgtataagggtagtagagagccagggcaggatgacttgtcatagcctggaggtgcaagagggcttcctggaggtggtggcacaggcagtgtcttaaagaatgaagagcagttggccagattttttttttttaaagaaaggggagggagaaaaggtattataagaagaggcaaaagcatgagccaaaaatatgaagataagaaagagcaaaatagttagcccaagcctggggaggggagaagccttgggccaatggggctgtgtatcccactgtaggagtatggcatatctgatttacttccaagtaggacatagtaccccagtatacccagttcgtttccttaacccctgcatacaactctgtaagtagttccttccttaaaaaacctcttcaaaaatcccagctgagcatgctacctgtcttctgttttcctcctaggaccaaaatgtttggcttgagaatatgggtaagcacatcctcccttcccccttgagctatcagtaagaaagtcacaggtcaccagtaacttaccaaataaatccccacgtctgtcctcttcaacctccctcatataccttcaaggtaggtggtgatgagctgaagatagcaaaattggtttcagcttttcctgaaagagcttatgatttagttggtgagctagatatataagctccctatcacaagaaaggataaagtaactgctcaacagaggaaggtataagcaatgtactgtggtccctgggaaagaaggtggggagttgtagctggtgaggtcctgaccccacccagggagtggtggagatgatgtgtagaggtgtgtttgaagtggagcatgacatctggagtggccatcatcagggaaagacagagtaggatgcacacagatggggctagagaaagggcttggcgctgtgctgtacttgaagtataaacgttaatgtgtcagggatgggaaggcatagaaggttaactgaatgggtgggggatatccaggcagtgccaatggcatgaaaagtgattggagaagttaagaatggacacaaagaaaccagttgcaagaatacaagagagaaattattaaacggaaagacaggtacacttcacatcgggaaaagaaagtccccagagtccagagggagaactggcaagaataaataagcaattcagctgtgggagactaggggaaggaatctgaaattaggtgaagctttcccacttagacaactgcagatatcactcattgaggtagaaaatataggaggaagagctagggaaatataatgcgtgaaattggaggcacattttattaaaggtgctaattgaggcaccctgggggttttgctacttactaatgttacaatctgaggcaagttgcttaacctttctcctcctgggttctctcatctacaaaatgaggacaacaatgttactacttcatagggttctatgaaggttaaacggtaatgtaagtaaagatttagcactaagcctggcacaaagtacttgacacatgccatcgttgttatcatagggtcatctctatagaaatgggagtttggagttcaagagagaagcagagagccagaagtagagaggtggaagctctctgagaagcagagaggtggaagctctcttagaagcagagaggtggaagccctcagagaaggtaagcaggttctgagaaggacagaaatcctttggggagagaggggagtggcatataagaaatgtagcaagatggccaattagaagcagctgcagtttgcggaactcatggagaggaatggaaggggcgagtggatacagcaccttcaactgaaatatctaggttgttgcattgggactgatcagggaaacaactagacccatgaagaatgaagaaaagggtgacggcttactcgggagcaacacagagccaagggaattcccacccctagccaaaggaagcaacttcaccagtgatacctccaggtatgggaagaactgaggcaaccagggtctagagcagactcccagcaaaccacagcagacctatgaagaatagtcaggctgttaaaagaaaaacaaacaaacaaacagaaaataacaacaaatcacaaaaaccctatccaaaggtcagcaacctcaaagactgaaggtagataagcccacaaagataagaaagaatcaacacaaaaatgctaaaaactcaaaaagccacagtgccccttttcctccaatgaccacaacatctctccagcaagggctcagaactgggctgaggctgagatggctgaaatgacagaagtaggcttcagaatgtggataataatgaactttactgagttaaagaagcatgttgtagtccaatgcaaagacactaagaatcatgacaaaataatacaggagctgacagccaaaatagccaatttagagagaggagcataaccgacctgtaagagctgaaaaacatattacaagaacttcataatgcaatcacaagtattaatagcagagtagatcaagtgtaggaaagaatctcagagctggaagactagcttctggattaagacaggcagacaagaatggagaaaaaaagaattaaaaggaatgaataaaatctccaagaaatatgggattatgtgaagtgactgaatatctgtgcctgattgatatacctaaaagagacagggagaatggaaccaagttggaaaagacacttcaggaaatcatccaggagaacttccccaacctagcaagatgggccaacattcaaattcaggaaatgaagacaaccccagtaagatactccatgagaagatcaaccccaagacacaaacttcagattctccaaggttgaaatgaaaaaagaaaaaaaatgttaagggcagccagatagaaaggccaggtcacctacaaagggaagcccatcagactaacagtggatctctcagtggtaaccctacaagccggaagagattgtgggccaatactcaacattcttagagaaaagaatttccaaaccagaatttcatattgaccaaactaagcttcataagtgaaggagaaataagatcctttttagacaagcaaatgctgagggaatttggtaccacaagacctgcattgcaagagctcctgaaggaagcactaaatatggaaaggaaaaaccattaccagccactaaaaaaaacacacacacactgaagtacacagaccagtgacactatgaagcaatcacataaacaagtctgcgaaataaacagctagcatcatgatgacaggatcaaatccacacataacaatactaaccttaagtgcaaatgggctaaatgccccaattaaaagacatggaatggcaagcaggataaaaaacctagacccattgttatgctgtcttcaagagacctgcctcacatgcaaagacacatgcaggctcaaaataaagggatggaggaaaatttaccaagcaaatggaaaacagaaaaaaagcagggttgcaatcattgtttcttacaagacagactttaaaccaacaaagatcaaaagagacaaagaagggcattacgtaatggttaaaggttcaattcaacaagaagatccaactatactaaatatatatgcactcaatacaggagcacctaaattcataaagcaagttcttagagacctaccaagagacttgggcttcacacaatagtagggggagactgtaacaccccgctgacaatattagatcattgagacagaaaattaacaaagatattcaggacctcaactcagctctggatctagtggacctgatagatatctacagaactctcctccccaaaacaacagaatatacattcttctaattgccacacagcacttactctaaaattgatcacataaattagaagtaaaacactcctcagcaaatgcaacaaaactgaaataataacaaaccatctctcagaccacagcacaatcaaattagaactcaagattaagaaatttactccaaatcacacaactacatggaaattgaacaacctgctcctgaataactcttgggtaaataatgaaattaaggcagagatcaagaagttctttgaaactaatgagaacaaagatacaacgtaccacaatctctaggatgcagctaaagctgtgttacgagagaaatttgtagcactaaatgcccacatcaaaaagctagaaagatctcaagttaacaacctgagatcacaactaagagcaaacaaacctcaaagttatcagaagataagaaataaccaatatcagagctgaactgaaggagacagaaacacgaaaaccccttcaaaaaaaaatcaacaaatccaggagctggttttttgaaaaaattaataaaaatagacaactaagctagaacaataaagaagaaaagagagaagattcaaataaacataatcagaaatgataagggggatatcaccactgaccccacagaaatataaactaccatcagagaatataatgaacacatctatggacataaactggaaaatccagaagaattggataaattcctgaatacatacaccctcttaagactgaaccaggaagataatgaatccctgattagaccaataacaagttctgcaacagaggcagtaatagcctaccaaccaaccagaaaaaaaaaaaaaaagaaaaaagaaaaaagaaaaagcccaggaccagaaagattcataactgaattctcctagaggtacaaagaagagcaggtgccattcccactgaaactattccaaaaagttgaaaaggagggactccttcctaactcattttatgaggccagcatcatcctgatgccaaaacctggcagagatacaacaaaaaaagaaaacttcaggccaatattcttgatgaacattaatgaaaaaatcctcaacaaaataatggcaaactgaatctggcagcacatcaaaaaccttatccaccatgatcaagtaggcttcatccccaggatgcaaggctgattcaacaaacacaaatcaataaatgtgattcatcaaataaacagaactaaagacaaaaatcatacgattatctcaatcgaagcagaaaaaacattcaataaaattcaatatcccttcatgttaaaaactctcaataaactatgtattgaacctcaaaataataagagccatatatgacagacccacagacaatatcatgttgaattggcaaaagctggaagcattccccttgaaaactggcacaagagaaggatgtcctctgtcaccactcctattcaacatagtattggaaatcctggccagggcaatcaggcaagataaataagtaaaggatattcaaataggaagagaagaagtcaaactatctttctttgcagatgacatgatcctatatctggaaaaccctatcatcttagcctaaaagcttcttaagctggtaagcaacttcagcaaagtctcaggatagaaaatcaatgtccaaaaattgctagtattcctatataccaacaacaggcaagctgagagccaaatcataaatgaacttctattcacaattgccacaaaaagaataaaatacctagaaatacagcttacaagggaagtgaaggacctctttgaggagaactacaaaccactgatcaaagaaatcagtcatgatacagacaaatggaaaaacattccatgctcacagataggaagaatcaatattgtgaaaatggccatactgcccaaagcaatttatagattcaatggtattcccattaaactaccatttacatttttcacagaattagaaaacactattttaaaattcatatggaaccaaaacagagcctgaatagccaagacaatcctaagcaaaaagaacaaagctagaggcatcatgctgccagacttcaaactacactacaaggctacagtaaccaaaacagcatgatactggtacaagaacagacacatagaccaatgaaacagaatagagaacccagaaataagactgcatacctataaccatctgatcttcaataaatctgacaaaaacaaggaatggcaaaaggaatccctacttaataaatggtgctggaatcactggctagccatgtgcagaaaattgaaactggacccactccttacaccacatacaaaaatcaactcaagatggattaaagacttaaatgtaaaaccccagaactataaaaaccctataagaaaacctaggcaataccattcaggacataggcattggtaaagatttcatgatgaacactcctaaagcaattgcaacaaaagcaaaaattgacaaatggggtctaattaaactaaacagcttctgcacagcaaaagaaactatcatcagagtaaacagacaacctacagaatgggagagaatttttgcaatctatccatctgacaaaggtctaatattcagcatctacaaggaacttaaacaaatttagaagaaaacaaccaaacaaccccattaaacagtgggcaaaggacatgaacagacacttctcaaaagaagacatacatgaggccaacaaacatatgaaaaaaagcttaacatcaatgattattagagaaatgcagatcaaaaccacaaggagacaccatcttacaccagtcagaatggctgttatcaaaaagccaaaaaacaacagatgctggcaaggttgtggacaaagaggaatgcttttacacggttggtgggagtgtaaattagttcacccattgtggaagacagtgtagcaattcctcaaagacctagaggtagaaataccatttgatccagcaatcccattactgggtatatacccaaaggaatataaatcattatattgtaaagatacatgcatgcatatgttcactgcagcactattcacaatagcaaagacatggaatcaacttaatgctcaccaatgatagactggataaagaaaatatggcacatatacaccatggaatactatgcagccataaaaaggaatgaggtcatatcctttgcagggacatggatggagctgtaagccattatcctcagcaaactaacacaggaacagaaaatcaaatacctcatgttctgacttacactttcaagtgggagctgaacaatgaggacacatggatgcagggaggggaacaacacacaccggggcctgttgggggttgggcacgaggggagggagagcatcatgacaaattgctaatacatgcagggcctaaaacctaggtgacagattgatagctgcaggaaatcaccatggcacacttatgtaataaacctgcatatcctgcacatgtatccctgaactttaaataaaagttggaaagtaaaaaaaaaccaaatgtatatttggtctctgcccctggttcctgacacagagctcctaaaaccctcggaatttcctgagtgataaggatgctaggaacatcttttgttctaatattttatttttgaccccagttcctgatacagagctcctaaatcccttggaatttcctgggtgacaggtgtatctttcattctaatgaggtgactcttggtgggcttctggatcacttcaggataggaactggccaccagaaagagcaggccatgattagagggttgaaactttcagaccactaccctcatcttcacaggaaggggagaagggcttagagattgagttaagagcttctgggctggtgaatatatcaaggtgctgggagggcagtgtgcagagggagggcctggaaactccaggccatccccatgccttgccctgtgcctctcttccacttggctattcctgaattgtatctttataataaaccattaaatgtaagtgaagtaacttcttgagttctgtgagccattctaacaaattattgaacctgaggaaaggttcatgggaatttgtgatttatagaaggttaattaatcaagtcacaagtacaagtggcaacctgggacttgtgactggcatcagaagtggtggcagtgttgtgggactgagccctttaacttgtgagatctgatgattactccaggtagacagtgtcagaattgaattaaatgtaggatgctcagatggtgcccagagaactggagaattgctaggaatggaaaaatcccacatatttgggggttagaagtgttgtatgagtacagaaaaacagtttttttcttttaggatagaaggagatgacaaaatatttgggagccaaggatttgtggagctgttgcaggcagatgcagaaggtcctgaccttcctaataggcctaatctggtaattttttttggaggcccttggtgggctgttcctccatcacatgggacatatgcaacctgggggagggcggtatacgttttttccccacaaggccataacctaccatataactgcttgattctgtcacaggaagcttatctcctttcctttcctttcctttcctttccccttccttccttccttccttccttccttccttccttccttccttccttcctaccttccttccttcctccctccctccctgcctcccttccttccctccttccttccttccatcacactgggtgtacgtaacctgggggatgcctatatataatattatttccctaaaaggccatctcctaccacttgaccacttgattctgtcacaggaaactcttctttttctttctattctctttctttctttcctttctctctctctctcctccttccttcctttccctctttctttcctcctactcccctccccccaccccttccccttcctcctcctcctcctcctcttcctccctcacaaccccatatccctctcccttcccctccctcttctcttttttctttcttcttctgtcctcttcctctgcttttcttttttttgttgttgtgcagctaggtatcatgaaaaccctcatagttctaataaaaattggagcaaagttcacaaagtgtggtccatgtgttagcaatgcatggtcccaggtatcacccacaaagattctaacaggggagttctacgtgcattaaaatttgataatcagggtcgcttccaagatggctgaatagaaatagctctggtctacagctcccagcgagactgacacagaacacaggtgatttctgcatttccagctggggtaaattgttcatgtcattgggactggttggacagtgggtgcagcccatggagggtgagccgaagcagggcagggcgtcgcctcacctgggaagtgcaaggggtcaggggatctccctttcctagccaaggaaagctgtgagtgactgtatttggaggaatggtacacttctgcccaaatactgtacttttcccacagtctttgcaaatggcagacccggagattccctcccgtggctggctcggtgggtcccatgcccacagaacctttctcgctgctagtgtagcagtatgagatcaacctgagacgctggagcttggtggggggaggggcttccgccattgatgaggcttgagtaggcagttctatggtcacagtgcaaacaaagcggcagggaagctcaaactgggtggagcccaccgcagctcagcaaggcctctatagattccacttctgggggcagggcacatctgaacaaaaggcagcagacagcttctgcagacttaaatgtccctgcctgccagcactgaagagagcagtggctttcccagcacggcatttgagctctgataacaaacagactgcctcctcaagtgggtccctgacccctgtgtagcctaactgggagacacctcccagtaggggccgacagacacctcatacaggtgggtgctcctctgggatgaagcttccagaggaaggatcaggcagcaatatttgctgttctgtagcctccgctgatgatacccaggcaagcagggtctggagtggacctccagcaaactccaacagaccttcagctgagggggtctgttagaaggaaaactaacaaacagaaaggaatagcatcaacgtcaacaaaaaggacatccaccccaaaaccccatccgtaggtcaccaacatcaaagaccaaaggtagataaaaccacaaagatggggagaaaccagagcagaaaggctgaaaattccaaaaaccagaacatgtcttctcctccaaaggaacacaactcctctccagcaagggaacaaaactggatggagaatgagtttgatgagttgagagaagtaggcttcagaaggttggtattaataaacttctctgagctaagaagcatgttctaatccattgcaaggaagctaaaaaccttgaaaaaaggttagacaaatggctaactagaatagccagtgtagagaagagcttaaatgacctgatggagctgaaaaccacagtatgagaactttgtggagaatacacaagcttcaatagctgattcgatcaagtggaagaaaggatatcagtgattgaagatcaaattaatgaaataaagcatgaagacaagaatagagaaaaaagagtgaaaagaaaggaatgaagcctccaagaaatatgggactatgtgaaaagaccacatctacatttgattggtgtacctgaaagtgacggggagaatggaaccaagttagaaaacactcttcaggatattatccaggagaacttccccaacctagcaaggcaggccaacattcaaattcagaaaatacagagaacaccataaagatactccttgagaagagcaaccccaagacatataattgtcagattcaccaaggctgaaatgaaggagaaaatgttaaggacagccagagagaaaggtcgggttacccacaaagggaagcccatcagactaacagcagatgtcttggcagaaaccctacaagccagaagagagtgggggccaatattcaacattcttttcttttctttttttttttttttttgagatggagtcttgcactgtcacccaggctggagtgcagcggcatgatcttggctcactgcaagctccgccttccgggttcatgccattctcctgcttcagcctcccgagtactgggtctacaggcacctgccaccacgcctggctcattttttgtatttttagtagagatggggtttcaccgtggtagccaggatgggctagatctcctgacctcatgatccatctgcctcagcctcccaaagtgctgggattacaggcgtgagccaccacgtccggctcaacattcttaaagcaaagaattttcaacccagaatttcatatccagccaaactaagcttcacaggtgaaggagaaataaaatcctttacagacaagcaaatgctaagagattttgtcaccaccaagccttccttaccagagctcccgaaggaatcactaaacatggaaaggaacaactggtaccagcaactgcaaaaacatgccagatttaaagatcatcgacgctatgaagaaactgcatcaattaataggcaaaataaccagctagcatcataatggcaggatcaaattcacatataataatattaaccttaaatgtaaatgggctaaatgccccaattaacagacacagactggcaaattggataaagagtcaagacccattggtgtgctgtattcaggagatccatctcatgtgcaaagacacacataggctcaaaataaagcgatggaagaagatctaccaagcaaatgggaagcaaaaaaaaaaaaaaaaaaaaaaaaagcaagggttgcaatcctggtctctggtaaaacagactttaaaccaacaaagatcaaaagagacaaagaaggccattacataatgataaagggatcaattcaacaagaagagctaactatcctaaatatatatgcacccaatacaggagcacccagattcataaagcaagttcttagagaactacaaagagacttagactaccacacaataataatgggagactttaacaccccactgtcaatattagacagatcaatgagacagaaaattaacaaggatatccaggacttgacgtcagctctggaccaaggtaatatccagaatctacaaagatcttaaacaaatttacaagaaaaaaacaacctcgtcaaaaagtgggcaaaggatatgaacagacacttctccaaagaagacatttatgcagccaacagacatatgtaaaaatgctcgtcattactggtcatcaaagaaatgcaaatcaaaaccacaatgagataccatctcacaccagttagaatggtgaccattaaaaagtcaagaaacaacaggtgctggagaggatgtggagaaacaggaaaacttttacattgttggtgggagttcaaattagttcaaccattgtggaagacagtgtggtgattcctcaaggatctagaactagaaataccatttgacccagcaatcccattactgggtatatacccaaaggattataaatcatgctactataaagacacatgcacatgtatatttattgtggcactatttataatagcaaagacttggaaccaacccaaatgtccatcaatgatagactgaattaagaaaatgtggcacatatacaccatggaatactatgcagccataaaacaggatgagttcatgtcctttgaaggaacatagatgaagctggaaactatcattctcagcaaaatatcacacaaggacagaaaaccaaacactgcatgttctcactcataagtgggagttgaacaatgaaaacacatggacacagggaggggaacatcccacacccaggcctgttgaggggtgggggactgggggagagatagcattaggagaaatacctaatgtaaatcatgaattgatgggtgcagcacacgaacatggcacatgtatacctatgtaacaaacctgcacgttgtgcacatgtaccctagaacttaaagtatgattaaaaatttttaaaaaaattgataaccgatggactacagggaatggttccagaggctgccggtataaagaatcagaaataaaagaacctttgcctctgccaagagactgaagggtagtggtgatgttttgaaacaatatttttttaaactatattattttcttttgtcctgtgattcttttttgttatctaatataagaatttgtgcatgttttaattgctgtcctttggacatcttctggagatgctggtggcccctaaagaagggaggtatttccgggttttctgaaagttgtcagttaactctcttctccagtcctgtaagatctggagtctccaaggcctcccacctgcagcccatacctgtcttgaccatggtaggctgcacatcatagccttggctgcttaggtctgaggctagtcttgctcctcccaagtcagggttcttaaattcccagcagtgagcctaggcttgtgtgtctctctgtcacagtctttcccttactccctctatgctggcacaggttatgtttgagagttttcccccagtttctttgctaattgctttcatttcccatcagaatacaggcccaccctaagcttcagtcaccttggctgcgtccctgacatctatcctggctcctgcagatcctttcaaccagaggcctagattctctttcttgcacctctagccacagactatggtcttattgcaaattgactgattatgaggatctatatgaattcgaatgctccctttctgactttgagttttgcttgccttctggaaagaaatccactaaaacttggtaccatgagccaggcacgtctatatgtgtgttacccctgcctccaattagctcctcaataacccaaagaggaaagtaccatcttcagtttttatgtgaataagggaagtagggctcagagatgttaaataatttgcccaaaatcacacagctattgaggggatacagatgattctaacccaggtcttcatgactacaaacttcatgtttgttgttctgttcataatacctggccttctgctagtgttcccatctgagtttgccatgacatttgagatcctacagcaaatggtctgactgctcttctgggctagctagcctgcagctaggttagtttctcccagcacctgtggcatctgcatcagcttcctccttttcctcctccctagtggacccccacgtgcctaagcctgcctaagtcatgcaagtaggaggtaatggcaggctgattacttctacatgctcagtccccactcaccacaatccacaatatgttgagacattgttaccttgaagcaaaggaagtttaagcatcagggccccttactttcatgggcccctgagagggtcttagtagtatgggcacatggtaaattaggtataatcacaattagtcaaaacctctggatcttcccactcagacttccctctccatcacgtttccatctagtctggaagtgtggagtgctgagtcaccatgggcatttttaggatctggctaaggggagcatttaatctgggcttggggtgatatatttgtgtagttcttagttgcttctgttcatgcttaagtcactgctagtggtacaatttccacccactgtgccttctcccctggcattgcaacatgccaggtctagaggtctgttatgatatgaacacaccttatggcacccagtactctaggattctggtactggaataataacaaggtttgaatgtgtgggtttctaaacaacttttggccaaccacactagaaaatttgagcaatctttctatcctctctatggaaaataatattacaaaaaaagtttttacataaagtggtgatcaaagatttggcaacaaaaaatgttgagataaagtgttatagagatgtatcaagcagttaattaaatctttttctggatttggttatttgttagctttttacaatttgtaatttgctgtgattgatttcttttttcactattttcattatttacataagaaccccaatttcatacctacttttgaattcataattgtatattatttttcttaaaaggggatccccaaattgcagtccccacaagatcggatcttcccctgacagtgacatttataaaatgtctagatctaggcatgtgacttgtgaaaagtcgaagattttaagaacagctttattgttattagtgtttttctctttcctttgggaaattaaatggctcaaataaagaacaatctctgtcctttacctccctggtaccagctgtaatctagcagtgcccatccagcgtccatcagcatttaagcagaaaggaggacatgtgagatcgaaacggtcagaaaaacctctttaatgtagggcacagaattggaaaataatgcaaatgagttctctcaatgtctattagttacatacatacatgtacataaaatgtgtaagatttagtttttgcattctggggaataaccttgcaatacaaagacataaaattactcaaactttagtatgcccactaatattttctttgctgacaaacatatatagaagctgtatgtaacagtcatatagggaaaaaagatgtaatgacatctttaattatctcatttataaaactacttggatgaaatttccaaaagtaatcgttcaaactcaaggctttttttcccccccggggatgattttctctactatttggtttaagtgttttcaggttaaatgaatggatggacaaatggaaaataatataacacttgtttgtggatcaaaatttgattaatgatagaaagaccagcattgttttcactgatgattaaagtgaacaaaccaaaggaaagcttaagtaatgtgtttttacattaaattgtgatgaagtagacctataataaaattaatgctctgaaacctcaactggaaaaagaaaattatgaaacctactaatttttcaaactatatgaaaaaccttttatatataatgcacattaaattcatgtggatcagaatgaggtaaggaaaacatttcaattatgaggactggatttcatcccattcttgaagatcttcttgtaagcctcattctgtttgttcagacagaaaggctttttcacatttttatcaaacctgaatgtctagaaacaggaatgtaggctttcacagttcaggaggatttaaaaagagaactagataacaaagatcatgaataggaaccatatcggaaagcgagaaataggagttgacaccaaaacggacctttccctggcatttgatctgtacccacatgaacttggcccactctgtgccctctccttgggcgcaatcatctttgcgtgctgttgtggtccagatgtattcctcccggcttacagccaccccttcacaagtcccctgaccacaactcttttccatttctactctccttgtcaccactcctattttgattcttatcattaaaactttcatgcactatcctaatagaaaaagccatctcaaacacttctcttatatagtatgtctggtgtgacaacccggaatacgactaacatgtcatcacaaagccacataggagatgtggtttctccacccctcccactgtgagagggaaggaaaagctgccaggggtccctttcccctgctgactgactctggagaaatactcagcagaacagaggaaggctaggtcaaattccaagacaataattccagcagtaggagaatatctaaatcgactgtgagatatcatacttatgcgttattaaaatcactgagatggatctatatgtatgaaaatggataaatctccaagacatattgagtgtaggaaaaaaagtaatttcagaataatagtacctaatctgaaaatccaaaatccacaatgctccaaaatttgaaatgtattgagcacccacatgatgatcaaaggaaattctcactggagcattgtggattttggatttttaaattagagatactcaaccagtatgtataaggcaaatattcccaaaatctgaaacacttctggtttcaagcattttgggtaagagatatgcaacctgtgtctactacaatgtgtcatgtggacacagggctctggtacagagcaggcacttacatatttactgaatcttgaataaatgaatttatgaaaaaatatccagatacagtcacataaaataatgttacatgtttcaatggatatatatataaagaggaaactatacattatatatgttagatatatatttatatagtaaatacatgttaaaaatatataatcattatatcttatgtattatatgtaaaatattgtgtcatactgtatatattataaaatatctaatatattatttatattatataaatacaaataaaatatagttatacttttaatgtattttaaaagtaatgtatatattatttaaatataaataaataaaggaaatgatctcatacccacagttattactgggaaagtgggagaagcctgggagactggggtgagttgtcaaagaaaatttagtgttacttgtaaagttttaatttttttaaaaggaaaacatgtgcaagtattacttgtgaaatttaaaacttctatggcatcattcttgctaagctttatggatgtgttgccacatgcaacaaagaaaaatcttagaaaattcttatagtggctgtacatggcaaatcatgggttggccttaatgatacaatgcctagattaccagaaagccagctaactatggttggttcccctcacccctttcctgctctttcttgacctctaaaatcgcaggagttaactctcagttaaatgacagttgtacctgacttggaggggccctgggagcaaaggaaggtgagtagcaacatttcagagtagcaaatttcattctccttcctccgacactgtggccctatccttcttccactggttgatgctcctgctctccaggcctctaggaaacgggcatccatactgtactgaaataccctacccaagtgtgtcatttatcacagctaagaaaggaggtgaccaaatgaaacacactaaagtagaatgattgctatgcccagcttaacctttttaaggttatctcctttacccaaatgacactgtaacttaggcaatttcaagctgaggggaaaagaaggatattttgggcagagcacccccagctcccaccataaggttttactattaggcattagggaaagacagaaagaagaaagtgttaaggagacactgaacattggttgtagttgagtcagatgactatcttgcatttgaacctttggtaggttcaaactgttgacagtggataacaaagattgaagggaatccctctccttggacacatgaaccaccacctatggcactgtcatctcctgcctccctccacttagtgaaaaatgggaccttaagcagtgtcaatcttccataaaacaaaactattccacaaaaatggttaattgaacactgaagcaatgagtctggggataatgaggtcctgtgggttctatttgctaacggcaggaattgattatttcacactgcacatctaattaaagtggagaggagtaatgagcagtgaagttataaaatgaatatgataatcaattaggtttttacttctgcttaaaataatttagaatagcccatctactgtatattgaaactaatataatcagtttaacagaccttgatgcattcagagagaacaacagactgccaaatcctgcctatctcctcgtaggacattatcaaaacaatatcttgagccttggtgagaaaaatcacaaaaaaaccacattaggcagaacatcacttttccattatgtcatacataccaaatgctttctggtcctgcttatgtttacagaacaaagtgggtcaaaggaatttactgagatcataaagggcaagataaatgctggagctgagcaccccagtagctgctagacttgatggaattaaaaatggaaaattaacctatgactcaggaaatcaaccttttagatagttctggaacactaagtgtggaaggacattcatttaatatagtacagactaagaacagcactgtgagatttactagatgtactagaaaagcatggtaagatgaaagagctagtatgtgcacatgtgtgccttgtgtgtgtatgtgtgtgctgtgtggactatgtgagctctatggtgtgtgtacatgaaagtatgtacacacacatgcttgcacagctgtgactgaagcaatttagagttactctgtgttattatatctgagttaagtgatgagaactgcaggctaatggttaaaaaatgttcaacagctctttttcatgtcatatcagtggattgtaaaatactgtggtgacatattttactgagagttttactttaatatgaggaaaacgattgagcaacataggacttgaaatatgaagtactatactacagtcttctaaaaagaatacgctgggtgttagtttgtgatcacaaatatatatttctactgaagaaaaaggaaaagatgtcatgtatatattcaaaatccagacagtgcttgtacatcagttagataactgttaataagacctgaaagggtgagataactgttccatggcacttcttggaatgatcactgtctgacactcgttgagcttttgtgggtgaggtcattcgtatgctgcaaaatgtcactccagtcattcaaatggtaaatgcttaacttctagagaaataaaatttctaaaaagagatctgtaaacacatctcaatggcacaactggagaagaaaaccccatcatccgaaaactcagagtagccttgagttgatgctcatcatgcagtgaagatgggaaaactacagggtgaaacattaatatctctttgttgtgtctgttagcttcacaaaagcatttgacaccatgcatggaactgagctctggaagatactaggtgtggctgcattgagaagttcatgaacactcttaggctagcctgattgcatggttggtcaagttggagtggggggtaccgagacagaaaatgtataaataatacttatatttcggcttgtcagcttgaggaaactaagtgcagagtattcctgggcatctgaaaaacttccaatggaataggccacattattgatgaaagtctttgttataaaacttatttccaaaaataaccatatacaaatgactaggctctaggaacatatccacaagacatagtttatcatgtcatggttttagccagtactaagcattgacaataaatatgaagaataaataggtggatacagcagcaccagaaagactgtatatgtagcaacaaaatgttcaagggtaatgctgcatggcaggttttcctacggtgttttacagagcataagcatcctatgacatattgacaggtattctgaggcaaaagtttgagaaattctacatactataacagccctgtctccctcctggttccaaaacctgggattctgcgagtctaggaagggaaatggatggaacaaagagtagaaacctgccatgtctggtgttaatatgacatgaagatcaactgcccccacatcccaccccgctccaaacaaaacaaaacaaaacaaaacaaaaacaagccagccgggcgccgcggctcatgcctgtaaattccagcccttcaggaggccaaggcgggtggatcacctgaggtcagaagttcgagaccagcctggccaacagggtgaaaccccatctctaataaaaatacaaaaataagccgggtgtggtggtggatatctgtagtcccagctactccggaggctgaggcaagagaatcgcttgaacccggggggcagaggttgcagtgacccaagatcgtgccactgcactccagcctgggcaacagagtgaaactccatctcgaacaaacaaataaacaaactaacaaaaaaataaataaataagccctgcagaggtcatgcatgctaatgaatccatatagacttccctattcctcttccggagcagtttcttatatactagctatgaatccctttaccatggcaacatcacaaaagaaaagggccaggagaagggttaaaggtaaaagacaggattccaagttcaatttgaatttcagataatcaatgaataattttttggtacaagtgtgtctcaaatattgcataagacccacttataggaaaaaataaaataattttttatctgaaattcagattgaactgtcctctattttcgtttaataaagctggcagctccaaccaaagcacatagcctgtctatcagtgtcagaacagtgcccaacacaacacacaattctctgaggcccaagatgtttggagaagggacggttgtggaatctccaagaacctctgctcactaaaatgcagtagaataaccaaaagctaagaactcagcagattcaccgaagcacagcttcagccagtgttgcataactagaaattagggaatcagaaagtgaggaaccaaatcagcctgaaatgcagttagagcggatgtggtactatgtctgagcaaagctttctggctgagggaggttaaaagacagtgtaacaggtgacagagggcttttcaagcaatgactgaggttccaatcaaaagacaaacttcacatatgcacagtggaaaacggcttcttgcttccaaggtgggcttttcggtcacactcatttcccctcacacacatatactaattataataaatattgataacataatcacgaacacgaaaaccagctagacctaactgtcataggagcagagtggtaaattctggtttgggttgtcagaacaattgatagatgttttataaagatcatgttttttgctacaaacaaaggcagagttcatctatcgtgtttccaaaatacattccctactgaatgcactgccagaaaccattttcatctttgttggtataaatcccagaaaatcaaatttgaaaaatgaagtgctgattggaattctcaaactccagggtgaaggcagatgctgttactcagtgtaattattgtctctcatcacaggatgaagtctgattacattatggtcagagggaagtaacagttaacattgtcagataggaggtttcagcattctcagctctgtttgacccaaatcaaacagaccagaaaaagaatctccttgatctaattctattgctcttgctttagtgtctgtatgttacctctagagtgggctctgaggaggcctctgagtagtgaagacatatttaggaacttagaatttaggagatacaacaccaattttataaacatccaacttaggaatgacccatatctatgaagccgcaaaactgttgctactgtttcaggaacggcctccaagtcagtgcccccatccctaggagagctgctgcagcttctggagccacactgggttgtcaagagatgagtatgtgaggaccataccaactgtccccctaaaaatgtagggaaaaatctactggagaaagataatttccaacctcttcccaagcctttctgggcagtaccttggttccaacttccacaggatgctgtgatttcaatgagagtcagtcaatcagaagccagctgatctcctccacccccattctaccacatcatccaggaagagttcatttcaaagggaattctcagaagcatatcattaaaaacccaataagagactagatctgctgcacttaccaggcctgtaccctcaaggataatcaatcttaccatgacttttatcctgtcatctttggccacccacaaaatgcaagaccctccaggcaactgtcatcccatatattattctctgcttccttgccccacctctgtctcatcccacccattcctccttccactgctggcctccctgagaacctgcccactctgctctctggaaccctcattccattgcagtttaactctcccacacactccacattttcatggaattttccttcagccttttcccttcactgacatctcactttccccttaaggacattgccttctctggagccctatcaaggggaggatgtttattctcccacaatgtaaatatcagaggggccagagacagtgttggccttctggctcccagataccgtttcagaattaaaaactattcctccgttgagatttgtaacatttggtcccactacccactctttccagtgatgtaacttaagggtgccctgtgtatattggatcaaagagtgaaaaaatcatccagtacccccagccaacctgggctcctggttcacagttttcctacccacctaatttcttctcaatatcttgaatgactgcagcacccacaaaggaactccatttaacaactctagcctcaaaattccttaatctccaatgatctgtgtgaccacttctgtctctacttctttacctcctagttgtccatctgttacagtgagctttctgcctgcccctacactctctgagactgctttggcaaaggtcactgatcactttccacccagatccaacagattccttgaagttctcatcttacttgaccactctgcaatgtccagtactgtgaaccacatccatctccttcaaactcaacctctagctttccttctgagatcttgctctcttgcccagctctcttctgcctttcacagttctcctttgctggatcttctgcctcagcctactctgccaatactggggctccttaataagcattctgcctttggtcctcttttcctcttttcctggctacccttctccttatgaaatgaaactataactgaggcagtttcaagccttggacccccttatctgctctcatggctacaacagtcaattatacattcatttctctaattaagcctttgctttgagcgctaaagctatacattcgtttgcatagacattcccatctcgtgctcattcttaacatatgcataatttaaccaatcaaccctccctccaaacctacttttcttggaaaatggcactgtatccactcagaaacctgagtgtaatcctaggttattcatcttacctccattctaatcagttctctttgctatgtatctcaaatgtttgtctcatcttttcagtccctaccgtggctggcttggtcgaggtccttataattacgtagcttgactgctgttacaacgtcctgtctaccttccctccagtatccaaattactctgcacattgctatcagtgctctttctataacagaaatatggccatgctacttttctgttaaaaagccagaacggctccctactgccaagaaaataaagttctaaattcaaaagcatggcttttaagcatctcatgaactggtctctctttagctttgtttcttgctaaacaccatcctatccacacaaaccctacaatccaacccaaccaaatgcttttgcaacatcacagaccctctgtgtgtcctacacctctgcacatttgcttgagaagttccctaggcctcagtgctctcttctttacttccctcccctattaattctgccatatatatatatatatatatatatatatatatatatatatatatatatatatgattactctttgaagatgttgttcaactactacctcttccagacaggtttttcctaaacctatctgggaatagttggcatccgttttccatgtcccagggcaccctgtacatctgtgcaccataggtgctctttgagattgtgagccagttgacacaggtactgggtctcatttaccttctaaactccaacaccttgtacagtgtctggtacctagcttgaattcaatgaatttttattcaatgaatgaataggagccactgctcctttagttaaggataggtctttatgcttcccagtgctcctgcagtagaatgtcttatgttctccacctcatttagaatagcacagtacttcatgtgtttcacagagtaaatacatgattggcgaaagaataatgttttatttccaaagtttgggcaaggctgtgtgtgtgtgtgtgtctgtgtgtgtgaaagagagagagagagagagagatagaaacagagagagagtgagaaagagagggaccttctgttccctgacagggcttgtgctcttggcatccaaagtagaaatacagcatatattttgtcatgaaaacaatgttaaaaatagtgattagattacataattcctatacttattcaactttatgggccatattactatagagttacattgtgggctttaaagttatgtaattcagctaaattagggactacgctggtatcttggaaatcctggaaaacttactggctgtgctagatactgtgatgcgccatccagataccccttgaagaataaaggtcgtattcctccagctgcggggagcatgttagaggaaagtactcactgtcaagcctatctggggattttctcagctggaaaaaacctgcctgatttaaagccatgctccttacaggggcaggactacatccaacgactgaccattgtgagggtagaaaggccctgtccccagccataacttaggacaactctgaaaggcctgcccagctccagagccccttgttaggtcaactgaggctgttgtcagctggcaaagttgcaatacagctcatcttctccgtcctctaagtcctgctcctgtcctctcacttccacaggtgttggccccaggggcacgccctaataagcatccagctcagactttgctcccccaggaatccagcctactaatatatggggaaatgcaacctgagctcaaaataatccactggcaaagtaatttggggatgcaatgttcaataaaatgaaaattatctgtgttctgactcaggcttagtatttataatcttttatcctggagccaaaagatagggttcccatgcccagaaccatagttaacttttctgttgcctacaagtaaatcagtctgggcaatttgtcttctatgattgtttggttagggttctttaccaggcctgagatgagtgccctctccccagaattttttttattttttagaaaaggtctcacgttgtcacccaggctggagttgcagtggtatgatctcagctgactgcaacctctgcctccagggctcaagtgatcctcccacctcagcctcccaagtggctgggaccacaggcatgcaccatcatgctttggcctccaaaagtgctaggtttacgggcaagagctactgtacttgggccccagaagtgtttgaatggaggtttgaaggtattcctcctatttgaagaattcattttcttgagtaggcaatattcatcctagtttatagacacaactgaatataaatagagccttttaggctgggtgcaatggctcatgcctgtactcccagcactttgggaggctgaggcagatggatcacctgaggccaggagttcgagaccagcctggccaacatggcaaaaccccgtctctactaaaaatacaaaaattagctgggcatggtggtgggtacctataatccagctactcgggaggctgaggcaggagaatcccttgaacccaggaggcggaagttgcagcaggagaatcccttgaacctgggaggcgtaagttgcagtgagccgagatggctccattgcacttcagcctgggcgacagagtgagactccatctcaataactaactaaatagataaataaataaataaataaataaataaataaataaataaagcctttttccccaacctcagggcaaactgagaaaaatgggcatgtgattccccctacaactagatgggaaaatggaaatgttggtcgggattctacttgttttctcttggtgattctagaacaatgctcatttgttttgttgaaaataaacaaacaagcaaataacacaatacaagcaactctttttccatttcagattcattccacttagctatctcttcctttaccctctactcttcactgtccttggcagacctcccttctagtcatttccctgctgtcactggctacttggataccagagtcatgggcttcctctatatgtccatcccagctgtcaccttggacaattttaatatccatagggaataggtatgcattttaccaagcttactttctgtctctttgatgcctctggtttgaatcctctacaaacttagaatctgtgttttttgttctgatcatacccttttctccaaagagtctggaagtgatgactgaatggaatacttttttgcagaaaccctcaactatccagtcccttttcttgtgcgtttattacactgaaagacagctccatcaacctgtttatctctcccaccagattaaaaactcctgaggtgctcataaatggtgacttcaagttgaagaccttaatgggatcacaaagactactagacaaaacaaatactcacaccagaaagcagagatccgtgtacttactcactctcatgtgtgcattatctttctctctctcccccacaaccccttctttatcaggtatcatttattcatttcatccaagccatatagccttcaaataggcaggatacaaaggtgcatttctctgatgtagcacctagaataaaccttgataactgtttggtcagtactgtgctctgcaaaagtgcgattgaccacagagctatagagaagtcaatggtccatttactgattgtttctttaattgcattcatgaggaaatgcaaagatcaaagtgtggtcagttccaaaagagaggatgagatggatcatgggtgatttcaaagcagaggtaggcattcatgcttaaggcctgcaacaaagcaagctggaaagaaccttagaaacaatatgatttttattctatttctctggttgctttatgagtgagttttacctctatcaaattctccttgagcttttcttttaaacctgttagaggattgggtatattgagactttacaaatagtagtttgtaagcagtttgtaaaggcttaatatactctttgagcaagagtaaaacaaactcaaggaactgactcaaggtttgaagcagcagcctagggaagcaccagctccactgttctccttcttgtgtctatagctgcataattagcatctaagtgccagaagcactgagaaagctgggaagagagagaagcagagccttcctttatgccatgaagacctgcggtgggctccctcccctctatctccctatgttcctctcctcttctttgtttccaattactcccagcctggtctattacatttcctaaactatttacttgctctccaggcacctcatctccaatatactccaaagagttcctttaaaaatacctccccagagcacaactatcaccatagccccttctgctttggtggttctcttacaaccaaatggaaaaaaaaaatcccctggcttggcattcaaagatttctataacatgactccacttattcaataaagaaaagtaagaaattaaaacaatatgaaagcatacaaagttaaaagaagttcccatctattcctttactccctctccctaaggcaaccattctagcaatttctcacttatttttctagccttatttcttctgatttcctgcacacctccaaagctctggctaaacaaatatccctgccaactctacacgggtttccttgtgtccctgctcccaagactttgctcatattattctttttttaacttgtatttttagttgtaaatggacaaattatcattgtatatatttatgaggtacaaagtgatgtcatgatttatgaattcaatgtggaataattaaataacactaacatatccatcacttcaaatacttatcatttctttgtggtcagaatatttgaaatttactctgtcagcaattttgaaatgtacattatttattatattcattatgcagtacaatatatctcaaagtaaaagacaacacttctcccatctagttgaggctttgtaccctttgaccatcatctccctatcccctcctcccagcttttggtaaccaccattctactctctgcttctttgagttcgattgttttagattccatgtataagtgagaacatgtggtattgtctctctgtgcctggcttatttcaattagtataatgatccccagttccatctatgttgtcacaaatggcaaaaagtctttccttttaaaggttgaacagtatcgcattgtgtatctgtaccacattttctttatccattcatctgttgatggacatttaggttaactccatcacttggctactgtaaataatggtgaagtgaacatgggaatgcagacatgtctttgacatcttgatttcaaatcttttggatacatattgatttcaaatccagaagtggcattactggatcatatagtaattctatttctagtttttctaggaacctccatatagttttccacaatggctgtattaatttacattcccaccaacagtgtacaagggttcccttttctccacatcctccccaacacttgtcatctcttgtctttttgataatagctattctgacaggtgtgacttggtatcttattgcagtttttaatttgcatttcactaatgattggtgatattgaacattttttcatgtatctgttcatagactggaagaattaatattgttaaaatgtccatgttactaaagtgatctatagattcaatgtattccctatcagaattccaaaatcatttttcattgcaatagaaaaaacaaattctaaatttcatatggaaccacaaaaacccctgaatatccaaagctatcatgagtaaaaagaacaaacagcatggtcctagcatacaaatagactcatcgaccaatggaacagaatagagagctcagaaatgaaccacacatgtagactcaactgatttttgacaaagatgccaagaatacacaaggagaaaaagagactcttcaataagtggtgttgggacaactatttatatgcagaagaacaaaaccggatgcttatctcacaccatattcagaaatcaactcaaaatggactaaagagttaaacttatctgaaactgaaaaattactagaagaaaagatgggggaaaaaactacatgacactgatctgggcaataattttttagatttgacccagaaagtgtaggcaacaaaggcaaaattagacaaatggggttacataaaaataaaaagcttctgcagaacaatgtaaacaacagagagcagaggcaacctatgaattgggagaaaatattgtaagccatacagctgatcagggattcatatctgaaatagataagatatttataagaaaatccaataactctacagaaagaaaaccaataattcaatttaaaaatgggtgacctggccaggcgcagtggctcatgcctgtaatcccagcactttaggaggccaaggtgggcagatcacaaggtcaagagattgagactattctggttaacacagtgaaaccccgtctctactaaaaaatacaaaaaattagccaggcgtggtggtgggcgcctgtagtcccagctacttgggagggtgaggcaggagaatggcatgaacccaggaggcggagcttgcagtgagccaagatcatgccactgcactccagcctgggcgacagagcgagactccgtctcaaaaaaaaaagggtgacctgatagacattcctcttaagaagacatataaatgttcacattattctttaagactgagatgttctttcttccatctttgaatgtccaaattctgcccatcctttgagatttaactttcatgtcacctgctctgtaatgcttttctcaacctacttattaaatcctctccttctcctttgaattcacagagtatttcttccaattcctgcttagagcacttgttatttcagtctctgctctttgggtacaaagccagcctccactgtttaaatgtaagctccccaaaccagagacccattctccgttcaccttggcattgcctacagcatgtaccctggtaccctgggcctttctatatacacagcagggactcaacaaattctcattgaggaggagataagggtctggagcctccaggctacagctttggctttcatttcaccttttaaaatgccaatggcatcatctgtgatgagtgggttctgttggtatctcaaagagttaaaggaggtggtgagtcatcagggctctcagaacactgactggttccaggtgactatttagaataggcagtcagaaaactaaaacagaaagaaatttttaaaaaactccaaccttaaaatgcctcctattttaaagtgaacaatacaactctttccaaactacggagcggaacaatctctctcattatttcaatgaaaccaaaacagacatttaaactccaaaacaacaacaaaaagccccaaagcccctaaccttccttggccatgtcaggctgcttgcgcaatgactctgcagggctctctagggaaccatgaattcggtttcattttctaatctgaagggagttattttcagcataaattggtaaagtggaggtgaatgggaaatgagagagggttgtcaaaggggagacagtttcacagcagtttcagagatggtcagatttacttactttctgcattagaagcagccctagggacagttaatagaaactgttaacactgacataaggcagaaattctttcaaaacaacatacttattaatttttttgtatttggtttagtttatacaagcctcttgtatataaaataatggaataataaaagcctgatcagctcctagaatcttaaatattgtaatgaactatcccattacctgttgctttgccgccttgattcatccacaacaattttcatcctatttgtagttttgccaaaaaaaaacacatcaatccccaatcaatccctcccccaaatggtgagatcattatcattccatttgtgagcctacctctgcttaaagttattggtagaactatatccaataacagtgaaaacaactcaaaaaccctttcagatagaagtctcttcttcaaaactttaacctcatttgtatttggaccttacaaaaaatttccattcttttttcaatgattttctattcaagtaaactttattcattctccaaacaaaactctagtctgtctcaatagcaatatcaagggaggaaaagagttactgaaactcttgactataattataaggaaggagagtgattataagatgctgtggggaagaagaattatgagaagggagatggtgtgggcaagaagacatagaaatagaaaaggcctggcacacaacaaggggctgggcagtgatatctgaggccatttctgcatgggtacaatagtgtgtgcctttggaaaaggccagtaaacagagctcctcctctatcataagccatgaggttctaacatgagtaccgattttatttcagcagagatgccaatcccatgctctctatagccaacaatgtcaattggggaaattgtggggccagggaaggcactcacggttcttgtctccatgaaaagcctcaccagccacccagacaccagggggccaatcctcacccttacccccagcatccaatctgccccagatccctgtccactcgacctcataaatgcttctgatgcccctgcctctctctcatcatccctgtcctttggcctggacttctgctatggcctcctaacttgtcatgcagtcttagtgtcctctgtcaatcccttcttcccatgtcaatcaacctgtcgtcccagcctttcactccccagatcctaaccacacctggcttttgtacttcctaaaatgctccttccaccacaaaggcctggaaagctattcatgccattgattctctctgcttgtaatattccttctagccacatttctaccttcacccccgcttttgggattttcctggtcttaaccggaggttggcttcctggtatgtgctttctcagtaatacagacgtgtacttctgtaatcgattgttcagtggctgtcttccctgtcaatctgtacatactctgaggtcagaggctgtatttgtccatgtatattttattctgtaatatggaataaaacaagaacttataggataaagattaaatgagttaatccaggcagagaactagaatagtacctgatgtatataaggactgtgtaagctgtggccatagtaatactaattagcactatgcctagaacaaaggatgtgctctataaattatttgttgaatgaaagaggaatgaataaatgaatgaataaattaatgaattcagcaatccagatggcccccttttcccaaccagcaaagatgtatagaaaactatcacagggaggaattattgatcttcattgtctactgccatcacaataagtggtaaaaacagcaagtttggtttcctgggattttgagttcattctaccatgttgctgaaaaaatattcaaagcaaggagaaatggaattaagagataaagaattgtaatgtcacaaaatgtatttccatgcttctcaatcttgtcttaactaaaatatatgcttcttaatgagcaccatactgcttaattatttccaggctgaatccttcagaaaaccatgcatgtcaggtagtccattccaacacatgtttatacaaaacatttcatcttaggttgccaaaaagggaagggctttacccatttgttctaggacattccatagatctggttcctcaatgtgtttaagggaaaggcatcagtcacctgagtgcacatcatgctctgctggcctaacagaaacacacgcgaatgaacttgggctcccagcacagtctgtagtagcaggactgacacacctttcaaaagctggaaacaggagggagggcagccaagatggctgaataggaatagctctggtctaaagctcccagcgtgagcgacgcagaagacgggtgatttctgcatttctgtctaaggtactgggttcatctcactagggagtgccagacagtgggtgcaagacagtgggtgtagtgcaccgtgcgtgagccgaagcagggcaaggcattgcctcactcgggaagcgcaaggggtcagggagttccctttccgagtcaaagaaaggggtgacagatggcacccggaaaatcgggtcactcccaccctaatactgcgcttttctgatgggcttaaaaaacggtgcaccaggagattatatcctgcacatggcttggagggtcctgcacccacagagtctcgctgattgctagcacagcagcctgagatcaaactgcaaggaggcagcgaggctgggggaggggcgcccgccattgcccaggcttgcttaggtaaacaaagcagccgggaagcttgaactgggtggagcccaccacagttcaaggaggcctgcctgcctctgtaggctccacctctgggggcagggcacagacaaacaaaaagacaaacaaaaagacaaacaaaaagggcacagacaaacaaaaacaaaccactgcagtaacctctgcagacttaaatgtccctgtctgacagctttgaagagagcagtggttctcccagcacaaagctggagatctgagaactggcagactgcctcctcaagtgggtccctgacccctgactcccgagcagcctaactgggaggcaccccccaataggggcagactgacacctcacacggccgggtactcctctgagacaaaaattccagaggaacgatcagacagcagcacttgcggttcatgaaaatctgctgttctgcagccaccgctactgatacccaggcagatagggtctggagtggacctctagcaaactccaacagacctgcagctgagggtcctgtctgttagaaggaaaactaacaaacagaaaggacatccacaccaaaaacccatctgtacatcagcatcatcaaagaccaaaagtagataaaaccacaaagatggggaaaaaacagagcagaaaaactggaaactctaaaaagcagagcacctctcctcctccaaaggaacgcagttcctcaccagcaatggaacaaagctggacggagaatgactttgacgagttgagagaagaaggcttcagacgatcaaactactctgagctacaggaggaaattcaaaccaaaggcaaagaagttaataactttgaaaaaaatttagaagaatgtataactagaataaccaatacagagaagtgcttaaaggagctgatggagctgaaagccaaggctccagaactacatgaagaatgcagaagcctcaggagctgatgcaatcaactggaagaaagagtatcagtgatggaagatgaaatgaatgaaatgaagcaagaagggaagtttagagaaaaaagaataaaaagaaatgatcaaagcctccaagaaatatgggactatgtgaaaagaccaaacctacgtctgattggtgtacctaaaagtgatggggagaatggaaccaagttggaaaacactctgcaggatattatccaggagaacttccccaatcgagcaaggcaggccaacattcagattcaggaaatacagagaatgccacaaagatactcctcaagaagagcaactccaagacacataattgtcagattcaccaaagttgaaatgaaggaaaaaatgttaagggcagccagggagaaaggttgggttacccacaaagggaagcccatcagactaacagcagatctcttggcagaaattctacaagccagaagagagtgggggccaatattcaacgttcttaaagaaaagaattttcaacccagaatttcatatccagccaaactaagcttcataagtgaaggagaaataaaatactttacagacaagcaaatgctgagagattttgtcaccgccaggcctgccctaaaagagctcctgaaggaagcactaaacatggaaaggaacaactggtaccagccactgcaaaatcatgccaaaatgtaaagaccatagagactaggaagaaaccacatcaactaaggagcaaaataaccagctgacatcataatgacaggatcaaattcacacataacaatactaactttaaatgtaaatggactaaatgctccaattaagagacacagactggcaaatgggataaagagtcaagacccatcagtgtgctgtattcaggaaacccatctcatgtgcagagacacacataggctcaaaataaaaggatggaggaagatctaccaagcaaatggaaaacaaaaaaaggcaggggttgcaatcctagtctctgataaaacagactttaaaccaacaaagatcaaaagagacaaagaaggccattacataatggtaaagggatctattcaacaagaagagctaactatcctaaatatatatgcaaccaatacaggagcacccagatgcataaagcaagtcctgagtgacctataaagagacttagactgccacacaataataatgggagactttaacaccccactgtcaacattagacagatcaacaagacagaaagttaacaaggatacccaggaattgaactcagctctgcaccaagtggacctaatagacatctacagaactctccacccaaaatcaacagaatatacatttttttcagcaccacaccacacctattccaaaattgaccacatagttggaagtaaagctctcctcagcaaatgtaaaagaacagaaattataacaaactgtctctcagaccacagtgcaatcaaactagaactcaggattaacaaactcactcaaaaccgctcaactacatggaaactgaacaatctgctcctgaatgactactgggtacataacgaaatgaaggcagaaataaagatgttctttgaaaccaacaggaacaaagacacaacataccagaatctctgggacacattcaaagcagtgtgtagagggaaatttatagcactaaatgcccacaagagaaagcaggaaagatccaaaattgacaccctaacatcacaattaaaagaactagaaaagcaagagcaaacacattcaaaagctagcagaaggcaagaaataactaaaatcagagcagaactgaaggaaatagagacacaaaaaaacccttcaaaaaattaatgaatccaggagctggtttttttaaaggatcaacaaaattgatagaacgctagcaagactaataaagaaaaaaagagagaataatcaaatagatgcaataaaaaatgataaaggggatatcaccactgatcccacagaaatacaaactaccatcagagaatactacaaacaactctatgcaaataaactagaaaatctagaagaaatggataaattcctcgacacatacactctcccaagactaaaccaggaagaagttgaatctctgaatagaccaataacaggagctgaaattgtggcaataatcaatagcttaccaacgaaaaagagtccaggaccagatggattcacagccgaattctaccagaggtacaaggagtaactggtaccattccttctgaaactattccaatcaatagaaaaagagggaatcctccctaactcattttatgaggccagcatcatcctgataccaaagccgggcagagacacaaccaaaaaagagaattttagaccaatatccctgatgaacattgatgcaaaaatcctcaataaaatactggcaaaacgaatccagcagcacatcaaaaagcttatccaccatgatcgagtgggcttcatccctgggatgcaaggctggttcaatatatgcaaatcaataaatgtaatccagcatataaacagaaccaaagacaaaaaccacatgattatctcaatagatgcagaaaaggcctttgacaaaattcaacaatgcttcatgctaaaaactctcaataaattaggtattgatgggacgtatctcaaaataataagagctatctatgacaaacccatagccaatatcatactgaatgggcaaaaactggaagcattccctttgaaaactggcacaagacagggatgccctctctcaccactcctattcaacatagtgttggaagttctggccagggcactcaggcaggagaaggaaataaagggtactcaattaggaaaagaggaagtcaaattgtccctgtttgcagatgacatgattgtatatctagaaaaccccattgtctcagcccaaaatctccttaaggtgataagcaacttcagcaaagtgttaggatacaaaatcaatgtacaaaaatcacaagcattcctatacaccaacaacagacaaacagagagccaaatcatgagtgaactcccattcacaattgcttcaaagagaataaaatacctaggaatccaacttacaagggatgtgaaggacctcttcaaggagaactacaaaccactgctcaatgaaataaaagaggatacaaacaaatggaagaacattccatgctcatgggtaggaagaatcaatatcatgaaaatggccatactgcccaaggtaatttatagattcaatgccatccccatcaagcaaccaatgactttcttcacagaattggaaaaaactactttaaagttcatacggaaccaaaaaagagcccgcatcaccaagtcagtcctaagccaaaagaacaaagctggaggcatcacgctacctgacttcaaactatactacagggctacaggaaccaaaacagcatggtactggtaccaaaacagagatatagaccaatggaacagaacagagccctcagaaataatgccgcatacctacaactatttgatctttgacaaacctgagaaaaataagcaatggggaaaggattccctatttaacaaatggtgctgggaaaactggctagctatatgtagaaagttgaaactgaattccttccttacaccttatacaaaaattaattcaagatggattaaagacttaaatgttagacctaaaaccataaaaaccctagaagaaaacctaggcattaccattcaggacacaggcatgggcaaggacttcatgtctaaaacaccaaaagcaatggaacaaaagccaaaattgacaaatgggatctaattaaactaaagagcttctgcacagcaaaagaaactaccatcagagtgaacaggcaacctacaacatgggagaaaattttcgcaacctactcatctgacagagggctaatatccagaatctacaatgaactcaaacaaatttacaagaaaaaaacaaacaaccccatcagaaagtgggcaaaggatatgaacagacacttctcaaaagaagacatttatgcagccaaaagacacatgaaaaaatgcccatcatcactggccatcagagaaatgcaaatcaaaaccacaatgagataccatcttacaacagttagaatggccatcattaaaaagtcaggaaacaacaggtgctggagaggatgtggagaaataggaacacttttacactgttggtgggactgtaaactagttcaaccattgtggaagtcagtgtggccattcctcagggatctagaactagaaataccatttgacccagccatcccattattgggtatatacccaaaggactataaatcttgctgctataaagacacatgcacacatatgtttattgtggcactattcacaatagcaaagacttggaaccaacccaaatgtccaacaatgatagactggattaagaaaatgtggcacatatacactatggaatactatgcagccataaaaaatgatgagttcatgtcctttgtagggacatggatgaaattggaaatcatcattctcagtaaactatcgcaaggacaaaaaaccaaacactgcatgttctcactcataggtgggaattgaacaatgagaacacatcgacacaggaaggggaacatcacactctggggactgttgtggggtggggggaggggggagggatagcattgggagatatacctaatgctaaatgacaagttaatgggtgcagcacaccagcatggcacatgtatacatatgtaactaacctgcatattgtgcacatgtacccgaaaacttaaagtataataataataaaataaaattaaaaaaaaaagctggaaacaggaaaggtgtctctgagttggcccaaccctgccaaatgctattacgtgacaaagttttattaatttattgtcatttaagtctgtggtattattattttattatttttgagacagagtctcactctgtcacccaggcaggagtgtagtggcctgatcttggctcactgcaacctccacctctcgggttcaaatgattctcctgcctcagcctcctgagtagctgggattacaggcgcgcaccaccacgcccagctaatttttgcactttttagtagagatagggtttcaccatattggccaggctggtcttgaactcctgaccttgtgatctgcctgccttggcctcccaaaatgctgggattccaggcgtgagccaccgtgcctggcctggtaatatttttaaatagttttcctgcagatagttcatttggatttataaataaacgctgcctcgtcatcatatcagcaatatctgatcttatttgttccctttctctaaaattaacttttttactgttaccctgaacccatctattctaatgctgaattctgagaaaattcatagttggttcccctcagttcagtcatcagtttgggaaagtggtatttaatttaagataattgatagttataaaaaataattctaacaaagaaattgagccttcatcctgatacatgtaaaactaaagggtgctacatcgaaatccattacagacaatgagaaatactggaaatttagtcaactgacctattttcttgtggagcaaactggatcttttccccaaaatgctgaagtcctgggcctgtgagggagctgaggatagtcgcattctttgaccttcttctgggtttcctaggcggaagggtgggctctgggactgtctgaattcacgtctatccatgccagccaagtggagagcctcctgagctttcttcttttctttttttaacatgttgaccaggatatctgaaacttgacttaaggatttaatgcctgatgctagcttatagtaatcaaaacacaaatgtcctaagtgtcattaatgttcctaacatttgctatttatcatgtggtaaagactgaaggaaggcttcaacttcctgaagccccatatatagcaatggacaatttaggaggcttgctttctatatagcaccactgtatgaaaaattagcaaacgcaaggtctttacaatgttctgagtttaaaccaggtacatcttaacaatcttatgaaagtgcttataaaaagtcaaatgaaggctgaatagtagtagacaataggctatgtatacatcttcccagataaaagatgaatttactcacatagcccatgtatatgtatcagccccctgggcgagcacgcgcctgctcgggaggcagcagcagagcagagcgggaggatggtgaaacccacccggctggcagatcagccgtcttcatcctggcggccggtgcggtgacaaaggttcagccagagcaccccaagctcagcacgtgcttatgtagagttcactcagatgggggctttttaagccactaatgtttggtctcaaatgtaacagaaaagaagcgaattgttagcacagacatatcattttaaaatgcaccttctgtaggccattgagatatgccaggaccattgatgataaaggataaaaccactcccctctaccctacttcagtgttcattctgtgttcacgatgcctagaactctaagagatttttgtccaatctgctaaatggaaagactgtaacccctactgagaatctcagagctctaactgcatatggggtaagatgaattcaatgcctttgcatcgctagagaaggctcattaaaatgggagtctaaatgtggtatgtgtcctaaagggtaaacttttcagaggaaggggatacagagagcactgctacttagaaaggcggacaggtacccagatgatatttattcttggacaagcagcgtggaagtcatttgaccttcatcttcctcctcagctttaactcccacttggtgatttctggaagcataatcaggtttgctctctctgatgtggcttccattccttgccccaaaacaacatgtacttaccaaaaatgttcacagcttcttagtgtctaagcattaacatgacagagaagaacagggctctggccgaacacgctgctcctctttgtatggaactgattaccaatgtcatcatacacttccattggttcacacactgtgatggcaatatccatcgactccatcgactcactcattcagtgatatttgttggagcttgtgctatagatgccaggccctgttctaggcatcggtatagagcaatgacaaggcagagtagtttcttgctctcacgaagcagacgtcctactggggaaagacgtctcacacatgcatgcatgcacatgcacacacacacaacatcagaatgccacatacctaatctgaagaaggtcaagggtgactgggcagctgctatacattgggtgctacaaaaggcctaagagtgacctttaagctgagatctgagccataagaagaaccagccagaggaagaacatcaatgcagaggagaaacaggaagtttccctaaagagaaacaggcccggaagtggctcccaatgctacagtcctgtgatcccacttcctacaatgcacaggacagctcctgagatgaagaattatccagccacaaatgttgatagtgccaaggctgaggaacctcgtgttagaagaacaacaagaaggtaactgtgactgaagcctagcacacgtgggacgaggcatgagaaatgaggtccgtgggggaggggatggtgtaggcagggcaagatcatccaggccctcgtaaaccagagcaaggagtttggtttcattcttcatatcatgggaagccccttgaagactttaatgagaataatgatgcgttctgatgtacatttcataaagatcgcaatacgaatctatcttctgtgctgccttccttcttctcacctttcccctgtcttcttgtcctccctattcccatttatgggaatggcctttgtgctaaacactttgctgggtcatggatccccctgtcatatattttgtgaaggggtgtgtgaactttattcaagctgaggatgtcaccaacaggacatcattttcagtctctttccaagaagatctgatgtcgttcgcagtcatttgggtgcattactgtcttttgtgaaactcaattataatcactttttttatttcctggaagccatatctttcccatttgttgtgtcacagtcttagccttctgggttctacaaagaaagatatgaaaacatcctccaacctgactctgaataactgtgagatttcaggaggttttcttagtcgttggtctttgataagcacagctttgagaggattaaatcttagctgctattcttccttcttctgagattgcttattgtcttcatagtcataactccaattacatcacactccgcagtgctcaaagcacttatgggcttttctcagcaggtcttatggtcctgctcctgaagagtagaaagcaatgtcactgagtaggtacagagctaataaatgaagagctaggatttcaatccaggtatgaattgaagtgcagtattctttccactctgactcccatacaccatcattttgaataagagtgtcagatggagggagccctgtttgaattgctgacagttagtaaagaatctagggtaaccccacatgaatggtgatgcctggattcaccacagtgaaggaggggaggtgatggatatctctctttcactctcttttaaaaataaacatataggaacaaacttggactgttctctctctgtcatatctcatttcatccctcctatatgcacagacattcataagcccagaaggggattaagaagttggtaggagtatttaaaggagaagatcctagactaggatcaaggccaggaaaagaaacagagctcagactggggctggggccaggactgaggtccaggccgagaccatgccaggagatggatggtgtaagaggaaggaaaaggaatgtgagggtgacaacaccatgggcagcactgacggatgaaggcttgtgtgtgtgtgtgtgggtggggggggattctcagctgaacctactgttccctggccagctaaaactcacttgaatctgacacacaggatctgctgatactcaagtaaaattagagaccaaagttaatcaggcaacatgtctacctcccatttggtttgttcttacctctttattactgggtttcctttatgtagactattttcatgcattttgcataaatagctgaagctaaagcatcttttggtaatttaaaaaaagaacaaaaatatctgtttataaagaactgaccgaaaggatttcttgtgcatgtttaaattctgcaaacgtaatgaaaatgtcaaatctttttacaagaagcttgaaagataaaatgagaaacaataccaaagaaatatctgggaggcctgagttccacccaaccccacaggggctccatagaagtaaccacttcgtctgcaactggaggcagcacatgctcccatgggctactaccactttcagcacccaaaatacactgcctcttggagccaataagaattctatcttatttggtactgatcagtttagctaaaaaaaagaattctatcttgaacactcatctatactcacttccaaatttgggaacatttgtaagtgtaactcaaagcagtagatctggcttttaaataaaaagttacatttaaatcaatctctgctcttcataagctaaataccatttgtcatttttcagccatcatttgagtttcacccacgcaccagccacagattctgggccatggtgagtctgtggtcagcctgttgtctggtcagcttgctaaagataaccagctaacttactggctcagggctaacacaaagagaacacaacagaggagccaaaaaatatattttaaaaaattaatgttaaaagatggtgtaaaaaggctcatactttgaaataaactaaaatgttccctgcaagagtaactatgtcaggataaaaacaaacacatttttttcttttatagaaactctttttcactggttgcaatactttgctgaagggacctttgacttctcaatggaaagaagcaatgtgaaatggaagctgggtggggagctcagccatgtggctcaggaaagactgctgtttacccctttcaaaccaggatagaggaagtttcttcatcacttcagaaaggatactgatttcgttatctctctgtttcagaatatctcgtagctttctatattcttcttcttttaatggttcttgacaatcttggtctttgctttcagaggagactgtattgttttcaaggatcttcttgtcattcaatagtttctgtaagataaaataagagcttagtacccatatctctagtccaaatttctttgtttctttgactctttttcctttaacaattccctgcacacatcaggcatgtgtgacctgtctgatgcaggtgcgatgtctttgcgatgcagttgcttttttggcttggcatgttttctcccttctacctgccttctttcccctcctccttcctcaaccctctctccccatcttatctctccttccctaaattgggaaatgcctactcaacattatctcttcttggactcctttccctttctctatacatcattccacttaatttacacttttattctagtacttatcatgtattgtgattattctttacaacatctgtcatctccatgacttgcttattaaactttgtcttatctatacctggcccttagtaactcacaacaaatgtttattatcttaaagaagtatgcaaaaatacaagtgagctaaaagtaaaagtgattatattcccagccccttgtcatgaaaattaaaacctaaggcagagaaaaactgaaatatcatatgggtatatcaaactgctgaaaaaatacagaatgcaattctcttgatatagcttgaaaatagttttttaaaaaatatggaactattctgtgtagaaggtagagattcctgacaaaagaattagaagtccatggcctgagtttatttattggcaagtaagatacaatctctgaagaaactcagtgataatcatactattgattcaaagatcgtaccattttctggacatgcaatgctggatcctaaccttccaagaactggtcaactagaaaagtttttttgcagcttgaacatggctgaaaatggcttctattggggaaacatttaagtttacctttaaatgatgaaaacagtgatgaactttacgcatatccgcgccaacctctaatctactgtctgaatcctggtcttccaaaaaggatgttattagtttttccagcctaaaaatacataatgtatgagaagcaactgtgagctagaagctttaaaaattctaatggcattatctagttggttaacatttgaagtacagaatattgttcccacctctttacagaagtacagatttgagtataaaaattaagggaaaagaaacattgacaaagtgaaatttatagtgaagccattatttgactaatttccagtgaattttcttatgaagctttcaatatagaaatcatttgatttctatggtccatccattctagccactctgaatttctatgcccctgtgcctggctgctgcattgctagaaaaagtaatgagaatgtattttaaattaatttcactaaaaatgcatgtgactccgcttcagctggcacctcagtgataccccactatttttttaatcattccaggtgatcttctattcttcacagtgcctattccaaatctttctacagcccccaagcctgccactactctttcactctctgtcaataaagtcacttctttattggtgaaagccatgcagactcctttgtttcctcctcctttgcctcagagtgtctctgcctcactgctcaggccctcttcctgcttttatagattgtggatattcttcctctttctgaaggccagtttctcccctgggctctctctctgcttcttccagggcttatctagttaattacctcttttcccttaatcatctctttatctcctctctatactgactccttcctctttgcttacaatcatgttgtttttcctatcctaaaacaaaatgaaatagaaaacaaaacacctccctttggagggaccatccaaccactctattctaaagtcctagtttggccgggtacagtggctcacacttgtaatcccagcactttgggaggcccaggtgggcggatcacttgaggtcaggagttcaagaccagcctgaccaacagagtgaaaccccttctcttctaaaaacacaaaaactagccaggcaaattggcatgtgcctgtaatcctatctacttaggaggctgaggcaggagaatcacttgaacccaggaggcagaggttgcagtgggttgagattgtgccactgcactccagcctgggcaaaagaacaagaccctgtctcaaaaaaaaaaaaaaaaaaagtcctagtttattcatagcaccacgtgccaatgtagcattctagtactttgtatcagagggaaattcttggctcttatttatctttgttcttcccgtccccctaacattaggttctcaacacaaatatgttcactagttactggattcactgccatggacatggttcccctctaggttgagatggaactcttaataaggaaggtttaaggatgacaatcagtatctatgatgttatgtatcataatacagcagcagcatatctttctagtactattatgaaaatatttgcatactttcagcatcttttaaaactgtatctacacatttctcttctgctgttactatcagcccacccagataaaatgtaatgatttctatcatagaacagccttggatttcatttgtacctcttgtaatttgtgacatgtgacagctatatatttacaagtgtgagacaatttataccgttacttttaaggagtttctttaggtgaagagatacttatttgcactatttgctgattgacagtgtgtttccttttggattagagcttcaaaccatcagatatacagagggatttattcctgatacattttttaaaaaatcatgtaaattattatgaaaacacatgtttatgaacaaaattccaaacaatgcagatgtgaatatattaaaaagtgaaaactcctcccactcccctgccaccattcccctccacctttttttaaaaaaatttgataccttgggaaatccactgttaacagttaaaatatattattcttattcttaatgaagcagatacctatatttatatattcatttatacattttggtttgttgtttttacaaaaatgagatcatagtctgaataatgctttacatcattatatttctaaagcatttatggcagatgagcttttccatcagtgcatacacagtaaaggtatttcatttctaatggctatataatattccatactatggatgtactactattcctctcttgatggacactgaggtgacatactcatacagttgctactttcctctgtaacccatgatgagaccttgatctacaaacctgacttaatgaggtttaaaaaatagtaatgtttagctacttgtattttccctgaatacatagcagaaattttgaaatttcaaaaatcactgtgggttctagaatatacactcgttttctggagtgaaagcactttgtgatttccagagtccataaaatttctagcagacaatattaagttggaagtaatggttaatcaattctttcttcttgctttttctttagaaaacaacttttgaatagtttaatcacaagtacatattctaggaaacgttctctgaaggaaggctgaagtggactcctagctcagaaggaaacctcgtaagatacaagcctgctgatgagctggaccactcacagattgctcacgtgcactgggctttggtattccatcaaggctcctctcccacacagcaacactgtagaatacaaggaggaccagggacatgatccaaagaaatgggcaagaacttctgcctgagtaaaagaactgatcgctttactctttctgggacttgattagtctagtacataactaagaatgaagatcagccttttgacatgctattttgctttcagcacttgagaacacaaagaaacatgcctggtctttccttcatacatttgatttactgttgggtttatttccttatcaggcaaggacttggtctaataattaaaatgcagaaaaatgcttaattcagatgttttcgttgtactcctctagtagttgagagtgaacaaatgaacccaaattccccacattttcctatctaccaaaatagtgtccaagtttatacctagtccctgctccctctaaggggtctcccagctgccagaactctgctgaacagtggaaaactgtttgcagaaaagtctcgctaaggaggtcaagtgagtacaataaagtctattttttaggacaagcccaagtcaacaagagctttccttattctctacttacactagaagaaaagaaggaagaaaaaagaatcctaggggaaagagaaaagaaatacacaccattcagtaacaagaaatattgtaataatttagtgtgtctgaacacatgacttcgctgatggtaggtgatggtttgatgtctggtgactatacagatctcagccaaattgactgctaatgaaatacctctgacagcctgtgtcctggttcagcaactccatcatattagaaattttgatatatggccacataattagaactgaccatatttcctaacatgtgctttaccttcttgaggccactgcactcccctctctgctccttatattccttgtacaaaaaaaaaaagctctctctgtagccatatgtccctaaaaatttaggtttaatagcatgaataaaaagacaaagcaagcttctcatcattaatgacagccaacattgagcatgcactaaatgctggacactcttctgtgctatttgcatatatcatttccttaatttttacaacaacccatgagaaaagtgctattattatccccatgtcataggtgaggaaactgaagcacagagatattacgtatcttgtccaagctcacacagcaagcacacaggtaaaatccaagttttgaagcacaatacttaccatactataacaaagttactcaaagtatttgaataccatattgggtgatgtatttctaaaagggagaacccacacctgcaagcattcattgaggaggcaaataggtggacgaagaagtgggaaataactgaaaagcagttgcttagatcttagcaaggccacggacccccatgacttgtaacggcaaaaaaagttgggaaggaatcagaatgtgctgtatttgaagattacttaaattaattatggcatagctatgtacatagttaagcagcaatttaagtgacggcaaagtgttgtacttattgacattaaaaacactcatactatatatggatagcttaatgatgaatccctctgcagggattctgcaagtacactgtaacacacataagaagactgaagagacaaaaaggaaggaaaggcatgagggaagggagagagggagggaggggagcagatcagcagtcccgaaatttttggccagctagttgtctttggctcaagaacattcatcatcttttgttgaaaaaagagaccagcgacccaagctaacctcactcttcttcaatatttttatgattatgttatgtttaactgttttaaaaaattcatcatttatacattgagtgtgattaagatgttctcattattctcaaataatctttgtaaaaaaatatgaacatgttcgtgtcagcagtgggttctagaaattggctagaaaccatatctctatggcactggctgtgggaaagttgggagaacagaagagtgggatattagaaacaagagcaaacctaacccagggcatggaaatgctggctgtttccaaataactgggacagcaatgggaggtgtgccccaggagtgggaggggagcctggtgctgtaactggggcagagatagcagaagcatgcagcagcacagtattattctagagaatttactataaacaaggctcgggggatgcaaagcaatgggactgcatcctctaatatcaagctggaaatagtgagggggatgaaaaataccccagttggtggggcagagcttccctgtggtagaaccatggaaattggtattccagagctgatggttcttagctcaactgtctcctcactggtttggggagacgatttgacagctcattccagagagctagaaaggagttctgatttataaaactaacttgtattaattataccaaatacatatcaaaatctgcctcactgctctaaatcattttgccacttaaagatgtctccattgagggtgagttgtctctgacagggttaaacatggggatactgacaaactaaagctacatattacctgagcaaagatcgggaaaagaatgggagatagtgacaaagatataaaaggatgtaaaggattattttctatggctgaataatactccattgtgtacacacaccacattttctttatctattcatctgttgatggacacaggttgatttcatatcttggctgttgtgaatagtgctgcaataaatatgggagtgcggatatctcttccatatactgatttcctttcttttggatatatacccagtagtcggattgctggattgtacagcagttctagttttagtttttggaggaaactccatactgaaatcctgtcatttgcaacaacatatttagaaatggaggatattatgttaagtgaaataagccaagcacagaaagacaaatatcacatgttgtcactcacacgtgggaactaaataaaaaattaactcatggagataaagaatagaataacagttttcagaggctgggaagagtagtggggagagagaggataaagagaggatggttaatgggtacaaaaatatagtcagaaggaataagatccagtattcagtggcacaatggggtgactatagttaacaataatttattgtatatttcgaaataactaaaagagtggaattggaatgttcctaacacaaataaatgataagtgcttgaggcaatggatatcccaattcctctgatttgattattacacattatacgtttgtatcaaaatatcacatgtcctataaatatgtacaactaatatatatccataatattaaaaattaaaaaaactttagaaagtataaaaggaaacttgataattattaacttaaaggaatatgataactaggaagaattgagagaatagttacacaatttaaaaaattgactgtggtagcataagaaatatggcagaatgattggttgaatgatcttcattcatcaaccctctgtgggttaaaactttctcatttgtaaaatgtgtagaataataccatctttacactattagctttacgaaatcagataatgcaaggaacgaagagagaatacgcctggcctattaaggctttgctattcgactggaccaactttataggaatcggctatgagacttttgaaaatatagaattttcggctccatcccagacctcctgagtcagaatctacatttaacaacattcccaggtgatctgcatacacactaatgttaagaagcattgcaacaaggcaactggttattgaatgttgacacaagaatacatacacatcttttcagttcggaacaccaaacaaagatgtaactggaaatgttctgtgaaggaggaactaacatcccttgatagtcaaccatgtcctgagcactctgctagtgactttacacatgttttcttatttaagtggaaaaagagccctttagggactatcatagtctggttctctttatacccgccttgtcccagttattttattattactttcattcaatatccattaaaacatgtcaggcactttcacatatattttgttattcatctgttccataagtctataaattattatcactctttcacagatgggaataggaaagctaagagaagttcagtaacttgcatattgtcactaaggtaggaaattgaaacactgagatttgaaaacaattcttttgactcaagaatccccactctttgcattcatactacaaagactctcagttaattcagaaaagtgctttccacatgccataatctctgacatactatatttgtattttcaatttagaatgttcctgtgaacttttaaccaggaaagatgcaaacaacatagttaatgagaatatcaaataaacataatgagatcatcaaataaatagtaactagtctgccatattaaaaaaaagagtttttaacaggctgaaatggtagggggcaaaggatggggttctttttgggatgtggccctttaaaacatacagtattgagatagcaggtaatgcacaaaaggaaagttcagataacaataaattcataattatgattaactacataactacacaatccaccaaggacatgaaaagctgaaggctgagattgtgccaataggactatgaccaaaggaaactatacaaaaatttttcagggtcattagtttcatgtttgctttttctgagattctgctgaaagaatcaattccaattgacttaaaagtagtcacttcaagagtttttccttttgcagtttcctggtctgtgacaggtattatatacattatatgctcccctagccctaaccagttagtgaaagacatggacccttacatgcaaggaattgagttcaatgtcagcaactctgttggaatgagctctttttttaaataacagtagggggccagaaagttcatggttttggtgatgcagaggaaattcctatagagttttccttctgtagggtaaattcatcttagtaatgcatatttccttcacctcaacaaaagcacagtcatgtagtacctcaaatgcagaaatgcacaacttcttgatacttttagtgatttgaaatagcaaatgcgaaaaatcaaaattaaaatccagactggtttgcctttttaatggtgaagataaggcctatttataggtgcatgtatgcattcatggccaggtacttctgtttacagaatttcaaaaactattttgaaataatttttaaataaactaagacaactttaaagacagtagggcatattttacaaggtcctttaaatgcaatgatgaagggttttgaaaagttatacgattgattttgtttttgtcaatccagattttcatatatccaatttacttaaaggtatatatgtcttatgactaaacattttaaattcagtaggtagagacgggctcaggagtctagaacaaatgtaaataagagatgaaaatagctggcctggctgaggagaagcagaggctgggccacaggcactgctgcccctggggaccttaagtgggatacgagaagtatttgagactctcaccaccaagctcccaccacttctgtaggaggccaaggacagcgtgcttgacctcaagctggcagctgacatcctatctgtgtgccagaaaccgcaggtttacagcattaccaatgtattggaaggcatagggctaatggagaaaaaatatccaagaacagcatcagtggaaaggcatggggcctggctgcaatagggctggagattgcagacaagctgactgagctcaaggcagagatcgaggaaccgcagaagcaagagcaaaaaccggaccagcacaaggtgtgggggaagcagaacatctggaacatcatagctgcttggcctatgtgactcatgaggacatgggtagaggctttgctggagacaccctcctaccatactggccacacagaccctgtctggtagcagcccacaggcacccatcccagaagtccccagtgggcaacagtaagagattcacctgaacagcctgactggccccttcaaggctggtgaacaaggaggcatggagctcaccacctgtggctgtgtctatgccgtcaccctccagagcccacctgctgtctctggccctccatctctgcccaagccttccctgttccatctccaggaaacctcacatgcatgtaggactcagttgaccaccccttacctctgaccctgacagctccggagcccagtggtgagctgagctcactcccactgggccggcagcatgagacactggccccctgcagtcttctttcctgctggatagcagcagctgcagcaatgataccaatgcatcagaacccaaccccgctatctcctttgaacccctcaaggcagaccctacaggcattctggaactccccgaagagctgccactcttggatctcacacaagaacacatgagctcagagctgctggaggcattgatgttctcagaaatattctccctcctcctccatctttctccatctgccaagatcatgagatcatggttacacctacaacctggatgagagtaagggtgtctgtgacctctttgatgtgtctattctcagcctctgactgacagggacatgtcctgtgtggctgagacacagactgtctgacctggaggctgcctggggaccaacccctaccccatcactacacagcttgagagccacaggctctggacttctccccgccccccttcactgcacagttctggccacaaatcccactcctgcaccagcacctggactgtcttagagatcaggggaaagctccagccccctgcaccatgaagccaaagtgtttgcctctccttttctggggctttccccacctcatgtcctcctggagccctccccaagcccagtttggctgacacctagtggcacagaacctaggacccacattccacctcccaaggcagcccggccagcccaatgtcctgctccagccatgcccctccccctatacccatatggcaggggaactggatgctggccagcatcaccccagtgtcttttgctgccccccaccctctggccttacggctcctcctggacctcttgtgtatgctaccctgctgggccctcagccccgtgtacttgtagggggtaggagtaggggtgggggagggtgctaacagaatggaacagaggtctctagctaggactctgggtggctcagtccctgaggattggcctaacctcccacggtcccatagcctcccactcatttccatttattcatttacctttatttagagccatttgcagagagttagaaagatttacagtaatgaggccgggtgcagtggctcatacctgtaatcccagcactttgggaggctgaggcaggtggatcatttgaggtcaggtgtttgagaccagcctggccaacatgctgaaaccccgtctctactaaaaatacaaaaattaaccaggtggtagcggtgcatgcctgtaatcccagttactcgggaagctgaggcaggagaatcacttgagcctgggaggcagagattgcggtcagccaagatcaccccactgcactccagcctgggcgacagagtgagacgctgtctcaaaaaaaaaaaaaaaaaaaaagaagatttatagtaatgaatggattcttacataaagattatttttatactttttgcagcaaaaggaaattgtaatatttgtacatgcccaagtgagtaaagatcatgcctatggctaaaaaacaagagagaagaaaattagataaattaatcaatccatagatactaataactccctctttaaattctacatttactttttgaacttcttttttctgtaggcaaacactgttgattgtgtttaatgttaacacaagtacactcatctacataagtctataataaataagaaactgacttacaggaaagagaatggtggtgaggtgggagtggagaagggagtcagtgagcaggagatctagcagcaggaaaatgtggaagataagccacattcaggaagggggaaatgacagtcaacagaaacaaggttttagaaaatagaagaggcctcctatcatcatgacgaaggctgaatgagctgtgaaagagaagttaaactggcttcgaagctgacaaaagagtgtagtagagagatagctacctagggaaaggactgggcaaagaggcaaatctgagactgttgagaagccaccaaagcagcccctctgaccagaacaggggccagagatcaagtctgaggatcaaggaatgagaggcaagacggccggtgggagaacaaggttaggaaggtgggaaaggtgggaaggagtggagagaaagacaggcctcaagtggataaaactagagcacacctttgagaaagaagtttattgggaaatttgggagaataagggccagttggaagtgggctagccctaccaaagctatttatctccatggttaaagtttccaaactagggagtttcctgacagttcattaatttgatggagtagtggaagctttacccatcctttgctccaaatctctgaacttctttttctatggttctgtcttgtatgaaattaaatttgtagacaacattgaagtttagaaatatacatttttttcagctgtttctttagctgaaatttttaaataacagctttggtttatatatgaaaatgcagaacctacatacatatgcacatatatatgtgcacatatatatgtatatgattatatacatagatataaaattaacggaaaacttgtaaaagttttaaaagacatattaaaaggattttgttatgtaaaaatgcaaagtaaatccttgtgggtgtgtttccatttgataaaaaataatgtattttatcctttcatatggaaaacagtatatagctggaaacgtgttcatgtaatattaaatctaaagcaagtgtatgtaaattgaatcatacattatcattgagttctgtattaattgaagatgggtttacaaggcaaagacagatcttaggatgcaataaaatctgataaagagtattgaaaacttaagtgtttaaaagaaaatgaccatgaaattgttaaaacaatgatgcaggacctacaaaaaggaaaagtgcaaatttagagagcaaatgaagaggacaagaacatactgggagttttagtatgttcctgaatgggaagatgcaggattgtaatctctccttgaatttaacaataaaaaagtaaacctaataaaagtcccattgcagttttgttttccagaaaaaaatacatatacagagacaaccaacaaaattttgtatatattttttttggacggaggggtccacaaatcctcagaagtcaaaaaatgaacttttgtatagaaagcccatagaacctctgttggagatgtacacatatacagatatagaaagacgtcacaattaaatgaaaaacacaagttaaaaaacagcaaataaaggatgagtccatttttattaaaatatatatttatatgtattcattaaaaattttgaaggattacaaccagtaataatacttgttatctttggtgaaatcacaagtgatttctatcccccttttttttttgcccgttatcacttttgtacaatgaatgcgaattgttcacaaaataaaaatcataaaactcttacaactctcacaactctcagagcaaagtttaaaaaactcaaaaggtaaaattctaaaatatattataaattataaaaacatataatttataactattcaagttactttccttaagctataggagagagatataccatacttgctgttaggttcttgaaatgaactccacagtgaaaacccaaagctgttccttctgttgcttccagacgggtttgatttgttgatatgatctaattacttattttatggtcctgcttacagtggttggtgactatttctgcatttgtttatccatcctttgtgcaggctatcaggaaccaggtgttagggattgatgtaatttattatttccataagtgcacattttcacactgtgggttttctttaagtggtagaacccatataaaactgtaatcagaataaacatttgtttcaggaagtcttaaaaatatccagctctacacatacaaaaagattttctgtgaaaagcatactggggaaagcaagagagaaagacaaatattcttggttgtgatgaagggtcccatttcttgttttaaagaatttcctggagctcacaaaacccaaagagcaaggaacattaacactgagaaagcattaaacaactggaagaataaaacagtatgttcatgttttcacactcaaaactttctaatttagaagcaagtacttggacttctgatgaaagagctgtctaggccaaaagaatccaacatatcagccatagtccaacaaatggaattgccatttatgcctcatcctttttaaatttgcttttgcttttcattcatttggcctattagaacccaaaacacttaattaaactttaggagactaaaataatcattaaaatacagaaacagccctgagatggagacaggcctttttaatcatatgagataactatttcttaagaactcaaatgcttccataaactacccaaggataattaatacaagctgtagaccatgcttttagttttggttttaatatcttcaaaatgtagtgtcaggaccaaaaacactttgtaccaaagtggagaaatttcatctatagtgaattatatttcatgaatgattttagagatctgatttcttataaaatgcaagggagccattaatgacctctgggatatttaatccacaaagtttaggttattgctttatagacagccattattagaagctggtaagaaggagcctaggagtcaagggatatgaattcaggactaagttagcagataatctgctaaattttttttttaaaactgcccaattacttgggcctcccctcttcaggtggtgtgaattaatcatttggtaaatactgatcatgatgcaggatgtttctcaattctcaaccactgggacattttagaaaaggactatatttgaattacgtgacttctgcaacatgtccctaaaatgactattttccacaaagaacacagaaaaggtgcttcctcagcccacattatcagtaaatatgataatgcttcctcagcccacattatcagtaaaaatgagctgagatggccaggtagagattgcaaagaggaattaaatttgcttaaatttgccattgcatatagggagagtctaacaagacagggaataaaaaatcaataatatgctatctcatttacatttattcagagcgtttattgactgcctattgtcaaccaggtgttggttatataaagatgaataaaacacatccaagtctatccaccttaacttcccttggattttggcctttgaaaacctttgaggttgtgttaagtggtactttaaaaaaaaaaaaaggtataacagcaaatatcaactaactaactgtttttaaggcaaaactattcatcaaattatgaaaataaaaatataaactctgatcatataaaacaaagctaaaatagggttgcaaatattgcaccagacatatttatacaaaacattatttgttatttacttgaaattcaaatttaatgaggcatcttgtatttttagttgctaaatctggccaccctaagctgaaagccagaaaacctgcaggcattccagcttggagctgaccggtgggtgctcactgctgggatgtgtggacccaggcatgaagaaaggcctcaacaactgctcttagtcattaactcatttaccagtaataaattgaagttaggcccagtgctgctgctcttattctgaaagaataaaacgtagtgcaagcattgcccacagcatctaaatgtttccccactaataatatactacattttcaattgattttaaagctaataattcagagagctataaaactgtttagaacccttagggggccagaatttgtgaagactgattttctcaggcaagaatccaacttgatagaaatctttgtaagtcacatcacttctctggatctgtttacgcatctttaaaataaggaagccacacttacggctttgctcatattgattcctctatctgaaatgttctccctgtccagctttgcttttctaaatcttgtcttgattcacgagtctgcacatccctgttcttcccagtcaaaagtaatttctattccccgcaattaccccggcacttctcttgtgacaggtagaattttgactttatattatagatattcacatacttatctcacttacaagattgaaggtctctgaagccagaatctgtcattaatacatctttgcaaccccacccttccatcccagctcattttgtttgctgccaatgttgtgggctaagtaagtaccttttctgtgttctctgcagaaaatagcctttttaggggcattttgcagaagtcattggctgagcattttctgattcaagacagactctctaaaattttgtgctttgtactaacctgagcagtagcaaacaggagtagaaatagctaaagcaatgaaaatactgttgcatacactcctgagattatgtaattgcagtaggaagtctctgcattatggaaggctgactgggggcacttatggactatgcagataatctgcctttgcaatataagcaaggatcagcatcaaaccagaaagcatggccagtatgagtgcacagcatgcacctgagtcagaaaaggcagaaccagaccatgaaagaaaaagtacctaagcaagagtcacaagaaatcctacactagtagagaattggcagctaaaaatagtcctacacactaaattattacaaatctagattacattgaatatttatgaaagtgagtttaagtcataaagtgtttttcaagaaaagaaaactgagaatgttaaaaggagaatattaaactcaaaccattttttttttttgagatggagtctcactctctcacccaggctggagtgcgttggtatgatctcggctcactgcaacctccgccttctgggttcaagagattctcctgcctaagcatcttgagtagctgggattataagcacaggtcaccacgcccggttaatttttttttttgtattttcagtaaagatggggtttcatcatgttggccaggctggtcttgaactcctgacctcaagtgatccgcctgccttggctcccaaagtgctgagattacaggtgtgagccgccgcacctggccaactcaaatcttttatgcacaaacattgtgaaacctttgctttcctaactcagcaaggaaacatgatgctttggaggctgaaagcccagctcagccaagaaagttttgaaatgtgcctagggaagccatgggcaggacagggttacccagggagtccccagacaggaacctgtgtttacaaggtttggcatgaagtggtctcagggcttcttaccagccatctgagcttctagttgtgtaactgctcaatgaatgccacgtgagaaatgtttctgtgaaataagtgatactgaccgaaacaagaagtctcctatgtatctgctattcttctttggctgatgacaatgaataatgaagcaacaaactttgggaaagtcagacatttgacccaaagggtggctaataagaaaaattaggctctgtcctgtgtttcttagtaacaacctcataagttagtggccccatgattacttgaactgtgaggaatttcattactggcatgaactcatgagttttatcagctgtggttacttctacataaactgtctgatattaaaacaagcactggttaatatacttctaacacaccaaaaatcagtcaaagacagtggtggatatctactttatggacctattctctgtcttagtagaagcaagtctttagaatgaaaagggggatacgttttcctaccagaggagacatgagtccttttcttgcctcctactggatatcccagaaaatatcatttctataagacatacccagaatgagggaacaacagtgaagaaaatacagcattccagataggccttagtttttgataccgaaccacgcacaccaattctagaataccacttgcattttgccacataaactccttagaagaaggatttaagtttaagtcaccactgtaaacctcacacctttatggctcaggggtcacaaaagagcagatcttgagacagaccaaacaggattcaaattctgactatgcatctagttagctgaatgttatttgcctcatgaggttactgggaaaattatattagactacatatataaaaagtctaatataaaatgtctaatccaatgcctactggcaaatgctcaataaatggcatttatttataccataattatgaacatttgctgaatgatttgattataacatgaaaaacactatgaggtagagaatatttcatgtctgtactttaacataattttaaatgtctttattttgcctgatcataaagtaatgcatgttcattgcaaaatgtatttagaaaatagagaagaaaggctgggtgtggtggctcacacctgttgtaatcctagcactttgggagggcaaggtgggcaggtcacttgaggtcaggagttcgagaccagcctggccaatatggtgaaacaccatctctaccaaaaatacaaaaataagccaggtgcaggggtgcgcacctgtagtcccagatactaggaaggctgaggcagaagaatcgcttgaacccaggaagtggtggtttcagtgagatcgcgccactgcactccagcctgggtgatagagtgagggaggccctgctgcaaaaagaaaagaaaatttagaagacaaaagattactccatcctggaacccagagataatactgtaaactttaggcgtttatctttccagacttgtttgtaaacacatatatacacatatatttatcatctatgtacatagcatatacatacatgtgtatttttcatcacaaaagtgagatcagaatattttataaaactaacagtatagtttagacatattcccagatcaatatgtagatacatgtatatatatgtagataatatatgcatattatttatatatgtatgtcttcattgacatggataactgttgcgttatgttccataaatgtaccataacccaattctctattataaatagtttgtgataaatatctttgtatctgtgtccttagggacaaatttctagaagtaaaattgctggacctgaaagcacactcagtgaaagagtttgtattaatgcttttcagggctgcccagcaagtggtaacatgaaaaaaattttacaaaggacttgccccaggcctcaggaacaggcttccctgtctgtcactggcctcattcactctactagctgtgtaagagctcattataccctcaccaactcagggtctcatcgcctttttcatttttaccaaaaaggttggccaaaaattgcacctcattttaatttgcatttctttgataattaaccagttgtttcttgatggttacttgcattctccaaacttacaggaaaagttagactatcagggaacataagaaaaagtggcacgcaggaaaaagaggaaacttgtggctgccaatttcaattcagggtttcagactaaatagacaagtaagtatacagtcctgtactctgcccaacacatgctagttgactgatctggaaagcacactgatgagcaaagcagctgagaagctctaatagcaggaggtgggctcatgaaaaagaaggggaaatctgatttctccaggaaattgtggaaatgatacaacaggcagtagctaccttgaccataataatgacaaatttttgaggatgtggcaaaagtcgtaagtatgctcagttaatgataaacacagagggaaccactggggaaattgggtttgaaggatgggaatgagaataaagagtactttgaggaatagagtagaaaaatatgcagtcttaagttatcactgagtttagcttcttagagttaggtttcaagaactaggactaattatttgctaggcaatcagggcaggctgagatcagtccttgggctgtcttggggaatgtttgtctttttgcctataaggatataaaggcaggcaatacagccaagcttctacaaaagagcctgtgaacaccagaggcaaaggtgaatgctcaagctagggttaatatgaagaggaaatgggggatagtttcatgaggtatcttacattttatcttggtgtgcttttgctgtaagttggatgtatactgcgaacacaaattcatgtgctatttggagtcaatgctccattatgttgtgcccaactagaaggctctgccaaactaccattttttaataggtgtaaaatttaaaagaagtagaatttattccaatgcttagctgaatacgaagataataccatttcacagaccaatgaataacacgaattatccttattccatttggaagcattgtctactttatcagcactaggaaatcctacactggggttccttaacaaaatgaaaactttggatttttcttacaagttctcaaatctttatctgaatgtcagagggacaagtatccatattgtactgagaagagagctgaaaaataaaagcaaagtgtctaattctagatttggtggcagttctgagagagcgtaggcttgctttgacattgcatatggacaattctcgaaacgtcatttattttcattttatttttaaacacttgatctatacagacagttatttggataattttgcagtaagttctttgtgctcctgatctttattgctcattttgtatatgatcatttacttgccttaattttaatttttattattcttaatagcagatgccatgcttcctcatatggtctttctaggcaggcaccaggctttatgattcttctgcttctttgacagctctagcaaagtactgctggtgctcaataatcctcaaggactgataattaaggcctcaggacagatccaaatctccattttccgcaagcccagggaatcaaacaggaggataaatctcaatacctcctcttccaagtctcaggtatgaagctaagacaaactgttctctctgaactctctttagcccacaggtttgtaagcaaatgagataaatgagaatatacacccaaaggttaagttcttcactaatacaaaaatttggcaccacctcctacctcaaaacaaagcaaaacaaaacaggtgaacaaatgaaatccttctcagtatcaacaataacaacaaatctcaattcatcttgcccatttataagactgtgtgatattcacaatttcataaaacatttgagtatttttagtacaactgttatacagatgttgaaatgctaaattcagaaaatggaaaacaggaggtttcgttgacatgtccagttttgaaagaacagagagttcaaaataaacacaactaggcagtacctgaaagaagcattaaggtattaaaataaagtatccctgctgaacttctacaaagagatgcagagaattccacctggcatgaatcctgaagaagagggtgaaagagaaaacaggggcctggattccacatctcgatgttggacataacatttacaagtcccttgcaaaatcatctaggggaaaaagtcttcaccaccctcactcaagcccaaagtggctgcctttcacttctggcatgtttctcatgcactcagatatgagtatgtgcatatacatgttgctttctttttcctgtctgtctgtatcttttagaaagtctacaatgagtacatattacttatccacttatatatattacatcatataaacacacacatttgcaaatttttaaaaaaatcatcactttattttaaataaaatgtaatgtttatgcatcagctctttttatgattcaggctgctactttacttttgaatttccaaatatcttaaaggtttcggcaaacatctcctattcagggagtatgtggaactctgttatgggtaagagtgtggacagtaagatgcaaagcaaatagctccagtttggaagcattttatggacattccattctggcaatttatagtttttgttttgtttagccttttagataagcagtcttatatcaactgtctaagaaaagcaccactttgaaatgactaattaacagtatgcaatattacagtccaaatatacaaaaatcatacaaatgttaatgatgaaaataatttgaagattccagaagcagatgtaatttagatctcaaaaccaactacatatattgcacaataaattggtatatgccaagggagaacatttgtttttaattagctgtgaaatttagtataaaagtagagtaagaaaagcattttttccaaggttcattaattaaatgaaacattgtttttctgtcacttggaggtgtaaaatcagcaagtgacattaattcttttaagaatgacctttaattttctgtagaaattttagtaaatacagccaggtaaaaataaccaaaaaaaatcacttgtaattccagtaacaattttatagttttcttttcgggcactttttcttcctgtgtgcatgcatgagtgtatgttctaaagagggtcattaaaacatgatttgcttctttgttttccagtagagaagcttgaaaagacttctataaatgaagtagattcctcagcaataataaaaattgtatcaaggaatcatagtaacaggtaacactgatggggtgcttgtgggcctggcattgtgttcagtacataacacgaattaccccatcaatcctcgtaagagccttgtgatgtgggtgccattactactctcacacaaaagatgagtaacagatgcatggagatgatataaatgctcatgcatgatgaaaatattgaggactacagaaaaggcatgaccatcttaagatagctagtctccttagactaggagagtcaagatgagaattcaagcctcttaactctcagtctattcatataaaagttccctgcctgatcttagtgactaaacagtttagaaaatagttgtcacaaaattctgagtatttccagtaattcctcagtcattcatcctcatgaactgaaatccacaaggcctagcatccagtggataccaaatcaatgacacagaagtgatttcttttttttttttttgagacggagtctcgctctgtcgcccaggctggagtgcagtggcgctatctcggctcactccaagctccgcctcttgggttcacaccattctcctgcctcagcctcccgagtagctgggactacaggcacccaccaccgcgcctggctaattttttgtatttttagtacagacggggtttcactgtgttagccaggatggtctcgatctcctgacctcgtgatccgcccgccttggcctcccaaagtgctgggattacaggtgtgagccactgagcctggcctgggacacagaagtgatttctatcaacagaggctggtcctggggaccctgagtagagatccatgtgatttgaaatgaatggttcatgaaagaagccagagggggcctgagcgccaggcagagtattcactaattcatgcaacaaatatttactactgagagcccatgtgctaggtactgctttaggttctggggcaggcacagtgctgaacaactcagacaacgtcctggtcctcatgcagcaaagcagggagagattgacaaaggacaatgaaacattaaacaggacactgctgctataaacgaaaataactctgtatacagggggtaacgagtgacgggggaaggtatattctagatcaagtggcccaggaaggtctttctgatctgagacatttgatcaaggaagtgaagaaggcgttttcagggagaaatggtgaggagaccagaatgaaagagatgcttgcagggaacggggtcttagcagttgccacaggctaggccatttagggcctttgcatttgggacctgggtcataggaggggttctgaatagtgaggtgtggttaatatcatttgaacagtttcatccattacaagaaattaggcacaaactttcttgagatttttcattttcttttcttttctttttttttttaatttgagatggagtcttgctcttgtcacccaggctggagcacagtggcgcaacctggactcactgcaacctctgcctcccgggtttcagtaattctcctgcctcagcctcctgagtagctgggattacagacacccaccatcatgcccggctaatttttgtatttttagtagagatggggtttcaccatgttggccaggctggtcttggactcctgacctcaggtgatccacctgcgtcagcctcccaaagtgctgggattataggcatgagccactgagcctggccgagatttttcattttctaataagcagtctatataggacagagttcagtcatgtttcaaacaatcttcaatagatggtttagactcttctgtaggcctttctctctctctctctctctgtctctctccactctctctctctccaggtctacttctcatctttgaggttcatagtttcctgaaatccactcctcctgcctttacagtgaagattcttgcagagtgcaatccggagggcttgtcatgtcacagaacttgtggaggatgagtcatgattttgaaatgtttttaatagtggttttataactaaaaccactttggaggccagtgacaataaactgaatataaaaaggataaagcactattggtccagaattaagtactgacaagagactgtccctaaaagactggtttggtatctaattttcactaggactgtattaactcaaatactgtagaatatttatttattttatttgtttgtttcatttgatttttaaaatagtctgaggatcacgttacaagacatatagtcattgggatggtatatatcaaattatatgagatggttttgaaaaattattctgtcttacgctttttggaataagttatcaaattttaggctcaagagagccactgtacctatagttgaaatttattcaacttcaaacatattgaagaactaaatcaaattaaacttttgtttgattagccaataaaaaaatttgaactgcaacttaaatatggtggaaatggcttctcctagagttacctttaaatgctaactttcaaaggatgaaagcattgatgggtgttttgttgtcacttcctatataaaatctttcctctctgtttcctccccttcacagaacactcctccacctccatctctaccagctgtctatcacagcaggtgggcatcagcaaagagcgtgtgtgtctggacatcttcccctgtctgtggcacaccaccttcctgagggattatttagtttgtctctgagcctcccagctcctaacacagtgcccaacatggtcctgttagtactcagtcagtgtttatccactggaaaaaatgaatacaggtataaatttgttttatttcaaagtgcgatttatttgatggataaacgagcatttaagactcttcctttaggcatatttatttgcatttcaatataaagcttggacatcaatgaagcttttattagtacaaatatgttcttttgaaacaaattctgtgtgggttttataatactatgtgtttggatttaaactatatttagtcttaaattatttaatgttataattactttttaaaagaaatgccccaaaccgattggacttggagtatgagaaaaaggacagaaccacaagaaacttctaactttctggcttgggcaacagtacagcttggagagacattgactgatggaggatacagtggtagagaccaggtctggggaaaaatggagaggaattcagtttggggcatgttgagttcagggccacctgttaggtaggagctccttttctcttcattgttaaatatccagtgactggaatatttaattccatgtaaaaatacactggggaggagatgtggtgattgatgtggctaagtgaaaggatgaattcagttggcaatccacctatagtaagcttgcacgtaggaagattatgatcctatggatactaattgatagagtttggctgtgtccccactcaaatctcatcttgaattgtagttcccataatcccaatgtgtcatgggagggacctgataggagataactgaatcatgggggtgtttacccccatgctgttctcttgataatgagtaagttctcacgagatctgatggttttataagaggcttttccacttttgctggacactcactccatcctgccaccccatgaagaaggtgcctgcttctcctttgctttctgccatgattgtaagtttcctgaggacttccaagccatgctaaactgtgagtcaattaaacttcttttctttataaattacccagtctcagcagttctttctagcagtatgaatacagactaatacactaattattacatacctcaggttagatcagagaatttcctaactgactcttggtcttgacctcagtattatatcaactcactaccagtcaccctaaaatttaaatcatcacttttaaccttcctctgaagttccagaattcaatctgtgtatttcttcgtcatacacaaaaactgagcctttcttatctttcctttcccaatttttccacctcttgataacctgttttacagtcataagttatcactattttcccttttttaccccttttatatgtgaaaccatcacttctattgattcttcattaacaagatctctcagacttttctcttctctgttcttatcgtcaccattcaagtctcttccctcatcctcactcccaaactgattataatgtttttctgatttctcactccagccaattctgtccaattctatgagaggagtaatcttaaaaaagacgtcatcacataaattctttcatggtcaccctgctaaagctgcaactcctgttttatttttccttttcagcttctgcaatctgaaatgctctatattttagttatcttgtgtactgtctctccacaagaatgtaagctccatgagggcaagaacattattttgtttattcccatatttcccgcacctaaaacagtgcctagcacaaggagagagcaaaataaacattcattaaatgaatgaatgaatttaatactctcagaccacaattcatttcctagataccattaaggaagataccagctcctctgcatatggtattcataacccaccatgaggtcaccattcatctgtctagtcctattcttcaattcctccatgagaacttcaggctcctgccaggccagtttcaattcagattctcatcagttagtgtttgctatatgcaaactcctatgttggtctcctgctattctctacactccttaccccacccctcccaccctctcacattccctttcagaatctttgttagaagggtgccttcttcctcttgacatcctttagaaatttttcagcttactccatgggtgaaatcttcagtgacttccctcatttctgaattcctacataattattttgctttttattatcatagtgagtaaataatgtattaaccatatgtaataaactgctattacatttttaaacatggaactgaaaagagtgcatagatcacatttggtttaactctctcaccttacacataagaaaccttaagtctgcagagtcattaaaaaactaatatgggtagaataaaaactagaattaaagttaaaattatcagcatccatttattctctccattaatatattcctttgttctgtgttttatatatacatatacatgtgtatgtatttgtgtgtatatatgtgtctgtaagttttccttaataaaactgtaactccttggaattattttttgtaattttttgtatcctatacctctaaccccccaccaaagcacctattaaaatgattagcgtctagtaggtgctcaataaattcagcttgaaggattaactgcaagaagacctctttttctgttagaaaaggatccagatgtttagaggtatccagacactttggggcaagagttaatgaggtccaattcaatttcatctcggaagtgaaacgttgctaacagaaaatatttgactcgcttagatttgggtcaggatacaatgcttccaagcctagccaaagatctacaggcttttttttttttttttttttttaccaaagaaacaattgtatatgtgtttagagactcaatcacaatcaaatcttcaccgaagaagttctgtatacattaacttggctatacagcctttatccagctgtctcttttcaaatatacccagccaccccaccccccaaaaaagatgtaaactaaaaatatcataataactggaggctgacatctgaaatcctcttaaattaaagcatccaagtccatgcaacaaatatttacattaagcatagaaatgctgggaaatggctcaaaaaatctgatagggctagtcattaacagacatcttcaaactgcacaattcatactagataaaataccgtatctactaaatatctgctttctgatattcttcagagaatgtctgatggtaatatccttatgccatgccaatcaacataaacctgcaggaatctgcaggacagagaagtagaagaggatgagagcaattctgccactgtgtcctgacaagctctgggacacatactctctcagtaccatcatccccctcctgcctgtctcctggagagtttgggcgcaataagaggactgaagctgattcacattcctgaataaatatccaggggccctagaacacagagcagtacagactaatggtgttaaatagcagtagcactttaggggtaaattttaatttatcactttcattttaagatgataaaagactcttaagtccgttgaaatgtaggttgtactaatgttcaatctaggtaattatgggaaacataatgataacaatttaacataaacaataaaaacagaacacattgtctgaataatctgcactgtcagttgtgaacgagtgccaaatttactacttttgtgaaactgtatgatttgctttggcagggtgattttcgtttgcaacatttgttctccctaactgctagtcagaaatcactaataagacacaatgatacatagcacacttctcttgacagcagacaagtcatttcattgggaaatgctgaagtttatttagtagcacgtgaactagttttacatgattcctgagcccaaaagtaattattgatatctctgcattctcgttgtattttgtttatatcttctcataatgtttatatatcacatcattacttgtgctcatgtctgtcaccaccactaaattatgagtttcttgagagcaggatctaggttttgctcatatttgtgccccactcagggcctaacatagagttttgtgaatgttagataaataatgagtgttaaatgaatgaacaaataaactaattgcacaaaaaactactggcaaccctccatactgtctataggatctgttgaggttgacatttgtatatttctcatctatagatcaacagaaatcaatccaggatctataagtccttcagtatttcaatctattgtcacaattttagttttcattctatcgcccaaactcttgtgaaagaaaaatttaattgttatttgactgctatgccttctaaacagaaaaattcatttatggaatacatggcaagttagtaaaagatataatataaatattatacaatagtaagaatcataaagaagatataacaaaatttgctcattcttattgcatatactttactgcatttttcttttgttaaattacagtctgtggtcattccttgagaaaggatctagggtgctatcctttcggtctgaaagtttgcatgtcggcagaatgccttttttcatcttcacatttgaatacaaatttggctagatacagaaaaatacatttaaagtactttttgtttgtttccttagcactagatgttcttgttttcagaattattgatgagaagtttgctctaaatcagattattgatttagagtaattttttttcctctctggtaactttcatgattcttttctgtattttgtggctctaaaaattttctacaatatgactatatggcttagcacttggtagcttttcattctgaagttgcatgtcttatttttttagttctaggaaattctgagatattatttcttaactattggctcctctgcatcatctctattttctcctcaccaacacctattcatcagatattggtaaatatagagctattctctatgacacttttcttttaacctttctctttatccttttatctcatattctggaagaaatccttagccctgatcttcctagctcaccaatctgcccctcggttttttcattctgttattgagccatctgttaagttcttaatgacaacaactatattttttcatttccaagatttccccttgattttgcttcataaaagtcaactactgttcttgttttatagatgtaataccatattctatttctctaaagatattaatcactttgggtaatgtttagttctaaggccctatgggttgtacaatcttcttgttcttatcattctcagacttttggcctcatatttctaattccagccacacctgaaccatgggctcatctttcctggactctcaggtatctcagcttgagcagcttgtctgggatgaggggctgaagcagctgccagtgcttgagcgtcttcttatttttctttttttttttttgagatggagtctcactctgttgcccaggccggagtgcagtggcgcgatctcggctcattgcaagctctgcctcccgggttgacgccattctcctgtctcagcctcccgagtagctgggactacaggcgcccgccaccacacccggctaatttttttgtatttttagtagagatgggtttcaccatgttggccaggatggtctcgatctcctgactttgtgatccgcccgccttggccttccaaagtgctgggattacaggcgtgagccaccacgcccggctgcttcctcttatttttcgtgagaataggggatgggtaaataaagctaaagacagcaactggtcttcagaacttctctgggctctctgtcagctacctggggcccttccctgtctctccattcttaacactgcagaggaggagggctcaggagttcacaggacaaactgccccactacaacagctctaccaaatgctcattggctgttcctagccctctcctgctccagggctccacacttccagacgtggagcaattattatgctgcacccatgccttagtctatcctttactcttgtccatctcaagtcccacctctcggtccctcaggaattccttgaagtctctagaccatcaagaagtcggcttcctgtttttaggtatgacgagagatccatgtgtttatcccagtgctataattctctagatttgatacaatagagggaacctgcagcacactcagtctgacatactgaaaccaccatattcaaaatcttacccttaaactaagcctcctgaaaaacatacaggatacacaggaattcgcagaaacactggtactgatttttttttctttttttgagatggagtttcactccatgctggagtgcaatggtgcgatctcggatcactgtaacctctgcctcccgggttcaagcgattctcctgcctcagcctcccgagtagctgggattacaggcatgcaccaccacacccggctaattttgtatttttagtagagacgaggtttctccatgttggtcaggatggcctcgaactcctgacctcaggtgatccacccgcctcagcctcccaaagtgctgggattacagatgtgaacattggtagtgattgaatatgttgcttttagactcagtttcccccttcccatctttgactctgcatcacaagaaactacattcctagacttttttagcaactggcttctggataacttcagccaacaggaagcactggtggaagactgaaagggggacgtgagagaagccaaggatgttcctctggacagtgtctcgactagcacctgtggctcttcagtggctgcagcggctgtcacacagcactcagtatggtctagcttctgcctgtcagctcctgctcttaggttctggtatcatcaccttctcctgttgtccctgcaatcctaggggcatagaagctcctgctgttactgatctctggggtgttgcttcatttcctgtttagtttctcagcaaaactgtctcctggcagtcaatttcctatattaaattccttttgttaaaaggcctagactggttctgttttcttggctggatcctgacttgtagatcaaaattctgaagagacattttcaaagacaataattggtaattcccttctttgaggggaaaggaacaccatagtgaagatagtttgaggttagtgttctcaatatctatgatatcccaagttgtttgaagaaatgacataaaactttttttaaagtgaatttttgtcaatatgcttccccttaattgcaaatatgccacaaagcagtcttgcaagaaaagccttaggggcctatcatgttattaaatacagtgttctggaattaggaaacactaccccgtaggagtgaaagctttgactataacagaaaccttgctgaggcttctcaagctttagacctacctcaggggcagctatgaaatagtttaaagacaaccacttttattctctctctaatttaccattttctccattgagggagggttaggtgaaattatagtatatctttagaaatcctatgtagctctatttctcatttggaaatagagaatgccatggccttcaaagcctggcccattcttactacccaacacatgcttaataagcagcacagaaacaagaaagcccactgtgatcagagagagaatgagagccacattgcaccactgatatgccatatggctgcaaatctaaaggctctgaaagatgccgcagttgtataaagccctgaatacctgctttcattcccagttagagtgttcgagctataatatatgggccatccatttattaaaagagagagcttactttggcatgggataaattggtgcttgtggcaagatgctgtttaatacaaaggatgtctcttgaattcctttcagatctgagacccacagctcaagagtgtttggtgtgtgtgttttaaaattgcatgactattatacaattccttttcttcagctggcatgagaaggatattcccatcctctctttgctctgttctttacttcctcaaagctgaggcggcaaaaacactgccagccttatccagcttttcatggaaagccgccactcttaactggcgcctaaatgcaatttcagactgtcccaggagaccttcatgctttgaggtgaattcataacattagggccaacaaagaagttaacacaaactttcactgttaaagaaaaagaaaaaaaagtctgcagacttactgaaggagctctgcttctgtgagtgcctctgtcctctgctccccagtgaccatggccagttcatccttcagttcctggatttccttttgtaggcgtttaatcacctacaaatggcaaagaggcagagaaaatgtcaacttctcattaaggtgaacttggtgacagagaacatacagctcttaaaattatggacaattttatggacacaaaaatgggtaatggtataaaaagccagctttgttaaatcttaacgttttgtcaaaatagttctagattttttttttttttttttttggagacagagtctcgttctgtcacccaggctggagtgcagtggcatgatcttggctcactgcaacctccgcctcccgggttcaagcgattctcctgcctcagccgagtagctgggactacaggcgcatgctaccatgcccggctaatcttttgtattttttttagtagagacagggttttaccatgttagccaggatggtctcaatctcctgacctcgtgatccacccaccctggcctcccaaagtttgagtttacaggcatgagccacctcgcccagcctctataattttttttaaaacaaataaaacattactgatgtaactggaaccccctattggtatcccccctccgtccttcctggggtgatcactgtactgcatttaaggggtctgatttctctgtgtgttttcatacatttactccatatgtatgcatgtactcataaataatgtagtgtatcattttgcatgccctaaactttatgtaaatgttacattactgcatgtaattgcaacttgtttttgtccttcacattatgtttttaagcttatttacattgcttcatgtggctctagttcattaattttcatggatatatagtatttcagtaaaggaatatatcagaatctatttgtctcctgttgatgaacatttaggatttttacttttgctattacgaacagtgttgctatgaacattatgaatctctttgagcacgtatgtaagagtttctctgtagtgtgcactttagaagtaggatttcctggctggagagtatgtgcatcttgcctttattatatattgttaaattgctcttcagagtagtacaaatttacattcctatcaactacagatgtaagttcctgtttccacatttttgtcactatgtaatattgacaggtactttcattttgccaatctgttaggtgtaaaatgatatctcattttagttctaatttgcattttcatgattatttgtgcagtaggtcattttgcatatgtatattggcagtttgggttcttccttgctcaaattatttattcccattcttgtccatgtttccatttacttgtttttcctttccttattgatttggtagcttctttctatattctggatgtgaatccttcgttagttttatgcaatgcacctgttttctctcaatctctgtcatgtttttcactttgcagtgttctttttgttaaatgaaagttcagaatttcaatataatctaattagcaccttcttcctttatgtgttgtacttttgtgtcatttgaaagaaaatctatcttatcccaaatcataggaatatattcttatatgatcttttaaaagtgttaaaggtttgattttcacatttaggtggattttactttgtataaggtatgaaatagggatcaaattttaatttattttaaatggctaaccatacaagatttgctattataattatataatatgtttatatatataaatgtgtctatttctgggctattggttaaacacatttgtttattttactatatatggcaataccacactaatttaactactaaatcttaagaaagttggcatctagataagataagcccgtttcatcctgttcttttccaaaatagacttggctattcttggccatttgctcttccatgtacattttagacccaacttgtcaaattctaccaaaggctctcctcaaattttaactggaattattacatttagttaaaaggttaatttcgtcagacatcaaattaatgatattaaattatcccatccataaacatggtatagctttccactgattcctttcaataaggatctataattttctttttaaataccttacgtgtctttaattatattttatatcaggaatttaaaagtttttgttgacactgtaaatagaatttttataaaattatatattctaactgttggcttctggcatataggaaggcaactcatttttatgtatggattacataccaaataattttctgaaactttgggggttctatttatcattaaatactcttggatgttctatgtaagcaacataattatctgtaagtaatgacagatgtttttcttcttttctaattcttatatatcttatttcttgttattgtctcattttcctagctaggacttccaagttcaattcttaagacattcctgtcttatttcttctaaaatttcacctttaaaatgatgttttcaaagtatggttgaatgtttaatgtgctcaaacactttttctgcaactagggatgaaataatataatttctttctttaaactctgaatgtgatgaatcatattaattcatgtgattagtattttagtataaaccatctcaggcatataaaatagtataaaagaataccttgtacccactacttagcttaagtgaacatccatgtaccctgtacttaagaaatagaacattacagacctgtctgaagacctcacccctgcatagtcttccctgaatgaattccccattaccattatcctaaattttgttttaacttttctcatttttttcttacaatatacattgatgcattctctagtgatagattactttgaattcccaaaataaacccaactagttcatgatagtacatgtcatattaataatcttcctatcataatgcaaaattcctaaaagaaaaaaattagcaggcttgatccagctttcatcctttctggaatatttggtagtactcaaaacttgaaagaaaaacaccataggatctggtctgtccttccttcctttcttcctcttagtagctttactttctttttttttttttttttttttttgacacagagttttgctcttgttgcccaggctggagtgcaatggtgccatctcagctcactgcaacctccgcattccaggttcaagcgattttcctgcctcagcctcctgagtagctggaattactagtgcctgccaccatgctcggctaatttctgtatttttagtagagacaaggtgtcaccatgttggccatgcacctgacctcaggtgatccacccactcggcctcccaaagtgctgggattacaggcatgagccactgcgcccggcccgctttactcattttctaacttcttttgcttggggattgtcagactaaaggggttatgtaaatttgaatttcaaacctacatgaggtagagctagggtttcaaatttttcaaagtagttttcagaaaaactactttttgttttacctatagtccatttgaaagcggacaagctgccctgacatctccatatggtagtggatagatttttttttttatagttgtcccttttactggttttatgttggggaaaagagaggatgtcttaggttcagcatccatcttgcaacatcccagggctttaatctctattcctttgctacaacctcctttacatctccactccaggacaactgcagcctcagcttagtttttgggccctggagaattcccttacttcctttcaaccttacatatgtatttcaaagatgcttaggtatataggtgagtttcagattatttgggccatatcaacaggaccagaaatcccaaagaacatgatattgagtattttgaacatgtcactgttcctagaattttactgaaatgtatcggatcatgtgggttttgtttgcttcttttttaaaaatattcttaggatcatcaatctatacagaatgaaaatcctgagatagtaactacattggcacccttctctattaaactaatattgatgccatattttctatttttactaaggcttttaagtcaaatctaataccaaattattctcctgtcttattgaataaaaatctcaaaactaagccaagtttttttggttttgagattactacagttatgcctcccatccaattactgaaggaaccctggcattagagacatccttaggagatttgagctcatgcccagtcaccacaggctctggccttgttcatagttcttttaccaccttgtctctctgaggtaccaatactttttttgttttgttttgtttggtttggtttggctttttttgagatggagttttgctcttattgcccaggctggagtgcaatggtgcaatctcggttcactgtaacctctacctcctgggttcaagcaattctcctgcctcagcctccggagtagctgggattacaggcatgtacctccacgcccggctaattttttttgtatttttagtagagatggggtttctccatgttgatccagctggtttcaaactcctgacctcaggtgatccatccgcctcagcctcccaaagtgctgggattacaggcgtgagccaccgtgcctggcctgaggtaccaatacttttaaagaaagcagggcaaatccttatcggctggctccatatttgccattaaattttaaaagtaagacataggaaatgccacccaagttttgtcttgagtggtttgtaggacaaattctcaactgtcatttgtgcctcagacaagctctatacataaaatgactgacagtaatgtcagtttttagaggcaattataaaagagaccaggaaacaacacttgtcaattaccagattaatctgcaccaggaagacctcaacatttgttcaattatcagctattagcttttgattcctgatttctcttttcttcaaatctctcacagacctatatcaaacacataataatgtttacctttcttcaaattcttcacattccttcaaagaaaaatctctagccaaatgcaaaaaacaaacaaacaaacaaacaaacaaaaacaaaaccctccaatgtctaatatgtttattttccttaaattctgaactagtttttgtcttggggctaataactttgttaactctctttctcattcagcactgtaatgctatagggcttctggaagggtagggacagcaacaaaatccaccctagcagttcagttccacctgaatcttgactttgcatgctgtctcctctctccagcaggaacactgtgtgatgctgatacctgaccagggcctttgctgaaacagatcctgcctcactcattggtttctgcagaagagaactccatcagaggagcttggtgctttctgaggcaagaagaacataacagacagccccattattcctttgtcctccttccccctctgtccttccatggggagaaagaggagaaaggacaaacaatcaagaggaagtaattaatatgggtaacaattaatttgttggtttttttttgatttgagaaatttataagtgaaacactgttggtaggatttcacttcttttttttttttttttttttttttttttttttttttacagtgcagattactaagcccctaccagcttattttctagagaaataagaaaaactgagtgatttgaaaaatgatgcaatcttaattatggaatttgatacaattgagatagtttaacattttcaatgttggcataaatggattcagtgttgcatttcatttacagaaaactaacaaaatagagaacagaaaatatctgcatttatgatgagctaaattattaccatgtaaatttttttgcttaaaaacagttctttgataaagcaggatttactgttataaaactagaagtttgacagatcaagccaataatgaattttaaaaaactctagaacaaataacagaacaagtatgtaaaatatggttctactgaatggctattaggacttttctttctttctgagcttttatataagatggactattattggcccggcgcggtggctcacacctataatcctagcactttgggaggccaaggtgggtggactgcctgagctcaggagtttgagaccagcctaggcaactcagtgaaaccccgtctctactaaaatacaaaagaaattagctggttgtggcggcgtgtgtctgtggtcccagctacttgggaggctgaggcaggagaattgcttgagaggcggaggttgcagtgagccaagattgcaccactgcactccacactccagcctgagcaagactctgtctctaaaaaaaaaaaaaaaaaaaaaaaaaaaaaaaaaaaaaaaaaaagactattattgtctctagatagttaaactgatgtattttgaaaggctaagttctgcatatagatgtaatcatgtgtggttctgttgtatgagtccttaggattccctgcatgtctttgaagtgaaacaatggggagctgcaagtaggaagagcaagtggcttttgagttagattgcctgcgtgtgaagcctgactctgctacttattagcacttatgactctgagcaagttatcaaacatctttttacctcagttttgtcatctttaaggtggagatagagatagcatctactcataggttatttagaggattaaatgagttaatatgtttccactacttagaacattcccagtacagagcaagtgcacctacaagttttagctaatctttgatatactttaatatattttttaaaatatcgttaaaagttgcttactaatctggggttaatttcttcattaagaacagcttcattctttatgagtgccactcgctgtgcaaatctgcaggttgatatagactcctaagaaagcaaagtaacttcttaaaatattatggcatagagagatatttctttctagataaaacttatcttttattcacagaaaaaagatacacacctaaaaagtgatgtgtataaaactcacagtgaggaactatgcccctaaattaggaagctttgctctagaacaacagtccccaacctttttggccacaagggcctggttttgtggaagacaatttttccatggacagagggtgcaggtggtgtggtttcaggatgaaactgttccaactcagatcatcaggcattagattctcataaggagcgggcaacctagatccctcgcatgtgcagttcacaattgggttcacgctcttatgagaatctaatggcaccactgatttgacaggcagtaatgctggctccaccaccactcacctcctgctgtgcagctcagcccctaataggccacagacctggtactggtccatggctcgggggtcagggacccctgctctagaacattattttttaaccaaattttattttggcttaataaaattaccaatgacaaaaagtgagagatcacaaggtcctaagtggcagctggtatagtatgtgttttcagttgttgatcacttagaccagaaccacatatataaatcataatcatagcaagagccataatccacacacatgaaagatcacaaaataaagattcataataggtcaaaaagagaggtttgtcaaggcatcttacaatcaaagtcttggccttgtttcctcttctgaggagtgtctggattccaaacattaaacatcagctgactctaaagcaacccagaagagccattcagcagctggctcctgccaaagcatcctggttgcttcactcagcaacatttctagggacacatctcagagatatctccaaggtatccggatcttagtcatcagggcaaaatcaagcaagagaagcggatgggtcagctctcccatttctttgggtgacattgccaacccatcagtaggccttccaaaatctgtgtatgaggcttcttcaaactatcctgtgctatgtgaagtcaattctcaaatggggttattataacaatgacccacaaatagcccacagctataacaaatagcccacagctgtgaactctgtagggtactgccctctgaaggcatacccagctgaaaatgtagaaacccacccaagagcctcaactccgtctcacgtgctagcagtaaaaacctagattaagatctccagaaagaagagcccacatacatcaagattccttttctccaaggagagtgttgcaatcatagttgtcatgcagttccctcccaaactgtctcttaggacactggtcatcatggagtttctataaggaatgtgcgaacggtgcttttctgaaagggcaatgataacctgtggtaaagtagaaagataatgggattaatttagcaagaaaatgcactcctgacaaacaacagagcttcaatagcaataaaaatgcaaaaggaaataataactaaatgcacggtgaagcccaaaacttaagtacagaataaatatcttgacaacaatattcagtacaagatggtgaagactgaataaagtaaatgtagtgtaactgtagcattgtgagccccataatttttggacaaatgaaataacctgtatagaactggatacactattattctgtttttaacgattggaaaatttgtatgaaaacacaagagtaaaacatgcctgattacttcaattactttaatactaccaaaattgggctgtacaccagtaagcaagaactaagggaaacagtataggatagtggttgaggtcccagattctcatgcaagattgtctaggtgcaagtcctggctttcctagggcacatcactcaacatgcctcagtctcctcatctgtaaaataggaataaaaatagtatctacctcacaggtagttgagatgattaaaagagttaaaatgtgcaaattattttgaatagtacctagcccataacaagtgctgtatataggtttgctcccattgtaagcaatgggtagttgaccttggttcaattcaggcttgctcaccttactcttcatgagttccttaggtacttaataggaaggtactagatagatggatggcagatggagcaaaggctgctggggttgtcccgaaaggaggcacctggggctcagggttatcccgggcagacaaatccagtgctagaatgttcattacaaagcagcaggaatcagccacccacaggatgtgtctttaagggcatcacaaagccctagctcctgagaatacctccgccaatgcctgtcattgttctagtcctccctccttccaggtgtgtgatttccatcaccagaacctcctctactcttttggtttacaaaacgaaaagggagcattgctttctgaaggctgttttaagcaacatatgtaactataccactagtctcattctaaattcatgaccacaggtgttggtaaattcagtcatcctgtgatctctctctctcaaaaatcacttttcagctctcagaaatgagaccttcacacttttctcctttttcttcaaacctttgttcaccctctcctctcctcaatttcacttcgagctgatggccacacttctactagatatgatagatatagattcggaaccctgaccaggactatctcatgtctccatcattaaatcccctgtacattctgcccttcaccttcttattgtcctgctcctgtctaaggccagccctccatccttggcctcatctgctccctcctacttttctcctacaattacctcctctctcttctgaattaatttccctttcatctggacaattcccattctgcatgcccactacagtcctaaactaagatggctcttgccaaggtcatcagcaaccttcattgtaccaagagcactgattgccatcttactagacttctgagctgagtaagcatgcaacactggtactcactgcctcccttgggaaacactttgttcacgtggtaactgggacactacactttcctggttttcatctttcctcaaaaactagttaatgaatgtttcttttttcttattcccaaattacaaactttgtagtgccccggggctcagttcttgatcctgttttctgtcttatctacactttctccctatgtaatctcatccaatcacctggctttaattattatttaattcatttatttatttatttgagacagagtcttgctctgttaatgctgaagtgtggtggcacaatctcagctcactgtagcctttgcctcctgggttcaagtgagccttgtgtctcagcctccggagtagctgggattacaggcgtgcaccaccacacccagctaattttttgtatttttagtagagttggggttttgctatgttggccaggctggtctcaaactcctggctccagtgatccacccgcctcggcctcccaaagtgctaggattacaggtgtgagccactgtgcccagccattgcctggcttttaaatgcatttatatcctgatgtcttcccaatttataccatcaatctcaacctcttccctgtgctactatcatcttggcaactctacatctccatctggatttctattcttgattttctttcctctctgcccccaagcctgattctttcccagatctcacccattattattaaggccccaacatcaacccggttgctcaagccaaaaccttaggcaatcatccttgatttgtcttcatccccaatatccaatccatcagcaatttctattaggtttacctataaaacttgccaagaattggaccacttcttaccaccaccactccagttcaaacctctgggatcccttgcttgggaaaccacacacgccttggattagtctccctgcttctacttttgcccttccacgatctgttctccacacagcagccagagaaatcttcacacaatctaagttatgccaagttgctccctaatacacttagcataatatcccagctcctgtgtggtccatccctgttcgacttatctgacatcatgtcctgtcatgttccctgggcctgtactggccttctgactgttgattcagcctgtcgagcttatccccacatcagagcctctgaaattgctgttccttctgcctagcatgctcttgccccagatttccatacagcatacagctttctgcttccattattcacatctttgctcaaattttgttttctcacaagggccttccctggacaccctatcaaaaataataaacctatctccagcctgttaatctttttttatttttcttatactacttatcactatttaaaattatatttaggtacttatttgttatctgcttcccctctaggctttctgctctgcaaggccagagacgttgtctctcttcttcatagctcgacccccactgcggagaacagtgctcagcacttgctaacatggcagaaacaaagctgtctccctcagttctcgtggcagccctcattctagtttgacttcctatgaaattacttttcctagttgtcttgaaggtcatgttttgcttaagatgtagctccaccaagcagacagccctatgtggggtttggaggtgagcagtgagaggtggtagccataaggaggaacatcagatctgcggggggcatggtggcagaggcatctggttcttctgaggcagttgcagggaagtttctggaatccagtgccatgtggctatacagtagtactttgcagagcagtttagtggtgtggttaggtgtgtctcctggttgctctgtgtagcagccaaacccagttttctgacttttcttgagattctttatgtttaataaaccatgcttcttaaaatagctagagcagattttccagtttacaattaagaaatttgacaaatataaaatgtgctcaacaaatttttgttaagtaaatcaatgaatgcatgagaagattacttagtatgtcctaggaaggcagtatgaaggtcatcagcatggaatgaggtttgagagaaccaagtttcagtgtaattggaaaggaggtggggaatatggcagacccaagtcagagtggcaagagatgccaagcagaactctagcctctaagaacaaagaggacagattaagtatctgaaacaggcaaggtgtgcccaaatacccaaacaggggctgggctgacagttgtgcagacagtgtggcattattgcttataaataatttctctaagtactttgaagttcttatataaaacaaattcactttttttcctgctctaggaaacaatattgatgtcttttcattcaatggctttattgacaacttagagaacctaaaggagaatatgcttattaaacttcttgatgatatatatatatgtgtgtgtatgtgtgtgtgtatatatatatatatatatatattttttttttttttttgagatggaggtttcactcttgttgcccaggctggagtgtaatagcacaacctgggctcactggaacctctgcctcctggattcaagcgattcgccagcctcagcctcccgagtagctgggattataggcatgcagcaccatgcccaactaattttgtatttttagtagagatggagtttcaccatgttggccaggctgatctcaaacccctgacctcaagtgatccacccacctttgcctcctaaagtgctgggattacaggcatcagccaccatgcccaacccctgttgatattaaattaaatcatgtgttagtaaacttgcttttggttgcaagaaacagaaaatgtaacccaaactggttttaattataagggaaatttattggttcatgtgattgaaacaggaaaggctttagattagaaggaaacaaaagattaatgctactatcaaggacttagtttttgcctatatctcagctatatcttccatgtggtagaagtcagtctcttcttgcggccccacaatggttgccaaaagccctgatgttatatacttccttattcataacttaggtgagaaagaattctttttccctaatcattaaacaaaattcctgaggttcagtaggcatgagcgtgggtcctgggcccatccttgaactaatcactgtagccaggagaaagacagtctccaattcacttagataagtcaggatctacctggggcgctgggacgggctcctggccgagcttctcattgttatggacattgcagaggcaattcctatgtcctctctagaaagggctctctaaagaattagagatcaaactggaattatggattagaaaatatagtctcaaaaatggagaaaatgaaggcagtcatcttagggaaatctcttaaataaagtgagcttcttaaataaagtgagcctcagttccctcactcgtaaaagtggtattggaatgtctatctcacaaaaatgttttaaagattaatagagattatttctggaatagttcttagtaagcaaaaaagcactcagtgatatggaaggaaatgttctttatgaaacgtttgaagactgatcttcatcatataaacacagtcctgggccgtttctttagaagaggaccgtgagaaggtaccttatcagctctcaaggagcttgaggaatactataagcccagcccacctggagcagatgtaaaactttggaatgacccagaaatggcaggtattcaggaaagaggcagaggtagattattctttgtgaggctggtgtgagttcttaaattgggcaggagccaaatgatctgaaaggcacaggaaaatgcggtggtcataaaacctgactttttggccaggagcggtggctcacacctgtaatcccagcactttgggaggctgaggcgggcggatcacgaggtcaggagatggagaccatcctggctaacatggtgaaaccccatctttaccaaaaatacaaaaaattagccaggtgtggtggctggcgcctgtagtcccagctactcgggaggctgaggcaggagaatggcaagaacccgggagatggaggttgcagtgagctgagatcatgccactgcaccccagcctgggcgacagagtgagactccgtctcaaaaaaacaaacaaacaaacaaacaaacctgactttttttattgtttccttccatcttagattgcatgtacaaatacaatggtaaatattcctgaagttattctctaactgacaaggagtagaacctcacattatgcttaataatatctccaagtacctagaaactgtgcttgcaatcaataattctatttactatttaatgagttaaagactttaaacaaaaaagagctcagaagtgtttggaaaattatcctatgaaaattgacaaaatttggagtgttacaattggcactgacaccattactttttctcctaaacacaacacattcagttggaaactaaatggaaactaaaactctgagaaagtcccatttatgttgaataaatggctgaaggcaactctgattctgatttccatagcagtacagagcaagcacttcatttccagtggtttctcacttgatgtttgggctgatagaggctgtgggtcacaccgggagcactcagtgagatttaggacaagtatgtatgtctcccttttcctcccatgaactcaatttctaaggccaagatgtaccctgttattgtggcttaaaatgtttttgaggaaactttttggaaaaagtactgcatatacaaggagaactccaaaaccaaccatactctggcaaaaagaaagttatttacttgtgaacacaataaagtccattcaactcagagaggttgcaccctttgagcaggtgtgaggtctcacagttatggccaaaagagtaattataatgctgcatggaatttgtggaaccaatgtaggctaattaaggtaaagcaagttaccaaatggtttcccattccatctctgtcttatatattgaaaccgagagaggggatagggatataattgattaccaacactcacatggatttctattataggttttaaattactatattgctaagtatttatttgtatgctttgctgttctgctggctaacatgatagtcctgcctacttctcagtcattcatttatcctcattgtctaacgtaactcacagcacccagtaaacattcaatcacaatttgttgaatgaatgaatgaatgaagctaattaaactaaattgtgttacacttccagtctcattagtgccataataaagtactacataaagagaaattgattaacaaaagtccttgaattttgttattcattaaacatcttcccactctctttattattcttattcctatgtaccgtttggttttctcttctttctgtgtgaaattcaaaaatttctcttctaccgacctacttgctctctagcagctactcctagatttactcagcctaacatctccatgttcacagatgagtttttccatatttatgttctttcctctcccactaatctcttctctattatcttatgttgaaccttctattttcctgtgaagacacttgtgtatcagtgtaaatggctaacagctggagtgatgcagtgggtgaaaatgaaacatcggttacagagaccaaggggcaatgacatgtgaatgtcattgagactctgagcaaattcatccccctgggctggaactaagagctgacaggcttgcaattcccactgcctgacatgctctgccccatccttgattggctcgcctctattcattcctctgcgtggtatcaggccctaagaaaaccatcttcaactctcacctcctcagtctgagtcagataccctgctacaagctcctctcactccttttactttctcttcactgctctcacctggcttacagccacatacttaaagattacatctttaattcatgtctccctgcactagaccatgaggtttttggggaaaggactgtttctattttgttcacactaggctccagtgcctagcacagccctcagcacatggtaggtcattataaatatttgtttgataaataacttaatgatatagaaaatccaatgccacatagcccccaagactactcacacgaggctgtcattaagaattttgaagagaagaaatgtgaggagaggaatagttttagtgacacatagcagtttgcaaaggcttatagaattaaaaaaaaaaaaagaattaagggcagaacatttctcttgagtgattacaattggtgggaagtctgattcaactgatgaacctaattttgcatgaacagatggatataatggaaattaaaacagacagtgctaccatccaaaacaagcagacacatttctttgaaataaagcactttgaatacagtccattatgttttcatatcaatgttctataagtgttctattaagtaaaaagctctgttaagcataagtagtgtgtaatatttgagcaggaaagagcttaggaatgctgactcttgttaaaaacactagaatgatctgaataccaggcaggccttaatctcttggtgctgcctgactgggattcatctggttggagtgtggccatgtgcaccttgttcagatagggtcccttaggtttctctccatctgcgtttttagccaatgtgatgattacatagcatttaacatcgaggcaacatcagtctcagaaggattcattaagcagttaaaaaaaggttttatttttttcccctctaatcttttagctgcaacatttgttaacaagtccttctgcctcacaagactctgtacttctccactccaatttttgatcatgtttcttattttttattttattatttttttttagaatttggaagtagttgccatctttaacattcatctcacagcccttatactcaaaaagctaaatggaacttgagaaatcatctaattcaatccactcattttagagatgaatttttttttctgaaagatttatttagctaaattcagatgaatgttctctcccctggcattaaattcagaaattaaaaatagagcacatactggggtagattgtaatcagcctggggtagaagtaggaagggaaagctacaaggctaacagaaccatcatggggtcaaaattaccaactaaatgaagtctccccaaacagaaaacatgtcggttatctcaaagtcatgttcccatcgttaatctactagcctgaaaacaggcaaaaggaagccatttgtaacctctatttacaccaactactaaattttacaataaagcagtaagacaaaaagtgaaaaaaggtataggctgtgaagccaagtaaatctaggttctaatcttcaccctcccctagctgggtaatcttgtgggaaggcctttggaagacttgaattttaaaatctgtaagagggggatagtaactaacacctacaatgtagggctgttgtgacgtttcaataaaatggtatacacaaaatgctagtagatctaccaatgtttctggcagcattattcacaatagccaaaaggtagaaacaatgcaaatacccatcaagagatgaatgtataaacagcatgtgacgcagacatacaattggatattgttcaatttgaaaaaggaagaaattctgatacatgctacaatatggatgaatcttgaaaacattatgctaagtgaaataaaccagacacaaaaggacagatgttgcataattccacttacacgaggcacctgaaataggcaaattcatagagacagaaagtagagtagagatgaccagggactagagtataggggaatggggatattctgtctgatattataaaagactttcagaaatggatagtgccaatggttatacaactttatgaatgtacttaatgccattgagttgtacacttaaaaatgattaaaatggcaaattttatgttatatatatttcatcataataaaaaaaattctaatagaatgcctgatacatagtatgtggtcaacacatggtagctatagttattaatacatcccactctgcccattttacctgttctaagtaatgtagtgacaagttgatatacttggcctctgttagaagatggccccctactccagtctttgcaactcgctctgaaccagccaggtcaaccagatggagtttggcatgtcgtacagttgcagatcctggttccttgcttgacaaatgaatggtgaaaatgcagtgggaacgggttgaagcttggttcataggagtctataaaaaaattgcaaaacaaaaattatttgaacaatgaaaatttttaaagaatatcaaaagatttaaaataatatttctagtgataagacatttcccatgaagccaactgtcaactggagcaaaaccacttgtaactgagacctttaaagtaagttctttttaatgtattacctcttggattactgatgacaaatgtggatgggttgattcagaaagtgagaaaagagttctaatgaggtatagatcaagtcctcttgccaatataactttatttcattacctgtctataatccatgcattaaccttggcttaatgcttgaaaatgcttaatgttaatctcatgggaaaagaggtgagaatgtgtgtatcagaaaaattcatgatcacaattgtaaacaaaagccacagacaaagaaacctaccatcactgttactactcaacactaaagtggaggccctagacaatacaataaacaagaaaaagaaatagaaggcataatagtaggaaaagaagaaattaaaaatgtcactatgtacaaaaaaatatggtggtctacatagaaaatgcaagagcatctccaaacaaatggcttaagaactaaaaagtttagcatggttgctggatatgagatgaatatataaaatcaatgaggttctaataactcagagcaatgattaatcagaaaatataatattattcacaatggcaagaaagacaatgaaataataagggatgaattttctaaaggatatgtaatttataggaaaaatggtaagataatattaaaggacaaagagaactggagtaaatggtgtgcaggatattaatgcaccatttcatagatgggaaaactcaaaattaatctatatgtaaatgtctatatattaacctatatattcaatgcaattgaaataaaaatgctacaggttttgtttacagaaaaagacaaattgatcctaaatggcatacaggaaagaaatcttcaaataaaatgaaaagtaatgctgtttgcacttccttactaaagttgctccatcaaaaaataaaaagaaacaaatgaaaagtaattctgtgaaagaataacaataaaaggggactttcctgccatttatcaaggtataccacaaagctacagtaattagaacagtgtggtgctggtgctggtgcaggagcagacagctaggtcagtgagacatgctgtgctcactgaggagctctgtatgggacagatgtgacatcataccacagcaaagaaaggatgcactgatttagtaaaaggtgctggaataaccaactatccatcttgaaaaaaataaacttagattgcttccttacacaatgcacacaaagaaattccagaatagattaaagctttaagtgtgaaataacacaactttagcaccaataccataaaacatggaagcatattgtaatcaacccaaggaggtaatggatactttaagatataaaacacaaaaataaattgatttaaaatatttgaccaagataatccaaaatgtaaaaacttcagtgtgataaaatccatcataaaattaaagcactagaagatatttgcaatacatatggctgacaaaacattaataataaataaaggactcggccgggtgtggtggctcacgtctgtaatcccaacactttgggaggctgaggtagatagatcacttgaggtcaggagtttgagaccagcctgaccaaaatggtgaaaccccgtgtgtactaaaaatacaaaacaaaacaaaacaaaacaaaaaacaaaccaggattggtggggcatgcctgtaatcccagctacttgggaggctgaggcaggagaataccttgaaccccggaggcagaggttgcagtgagccaagataatgccactgcattccagcgtgggtggcagagtgagactccatctcaaaaataaataaataaatacataaataaaataaagaactcttgcaaatcagtgagaaaaagtaagcaaagaatatgactaggtaactcataaggaagaaatctggaaatggttaatgaatatttgataaaatgctcaaatttatacataatcagaaccacataacttagaaccataaggtttaaaaaataaagtctaacaaaataagtgttgttggagatataaggaaatgggaaattttgtgtactgcttgtggaaatataaattaagaataaattttgagagcaatctgataatatgtggcgaagttccaaatacatataacacacagccatcaataaactactagatatatttcctagagagaaatcttgggcaggtatacatatatatgtgtgtgtgtgtgtgtgtgtgtgtgtgtatctatatatctatatatctatatatgcgcaatatgcgataaggacatatatatgtggacattcactgcaacattattagggttagcaagaaattggtgcaagacgcacaacctaagtagacatctgtggcagaaaagattagtaaactgagataattcaaattacagagatgttaaaataaagcaacttgggatagattgacataaatggatttctaaaatagaatgctgggaaaaaatagcaagttaaataatgatatgaacattatgatagaatttacataattaaaaaagcaatattatctattgttcatgaagctataacttaggtcattaagtataaaaacatggaccagaagcatacggcaaattaatgatagcagttgtgtttgtgagggatggaaatgaaaggccaagaaagggacttcagctttatctgcaatattctatttcatttagttaaaaattattagaagcaaatcctggattggaaaacatggatgttggttacattattctctgtacttttttgtgttttacattttttggaacaagaaagaaattaatctgattcaagatacaagtgacaagttagtagtatcatcctctcaacaaaaaaactaaaaatattccaaatgagtattcatatgagtaaatatgttcagatctccacctttgcaaaatgagatttaaacaaagaatttcaatatggatgcacatgtgtgcagacagagtaacacatttgaatggcaattcaaccagaaattctttctgtaaatataaattcttgatatacaccagagttgatttacaccaactagcaaaataaaaagatgtcaaaatgctggcatagttttggtgatgatgatgtagctagtgagtcaaacaggctgaaaatttgacccattacttgttgccacaataactatgcccaaacctggccagtgtgtgattttgcctgctaaagtggatcagcaaataactgtgcatgtaaaaccgcaaactcaaatttagaacctaagttgaggtgttttggaagtgactgtaagttatttgcagaacttaaacatgggtttcatttcactgtgatagtcgcacaacaataaatcctacaatactgtaacaaaagtcaaactgacaatcaatataaacaaataacatggagacttctcaacagctgtctttagcttcgaaactgatattctgaaaccaccataaaatgtgagccataaacgaatactggtagagtgtacccatttcaaaggaatatgagattcacataaactaaaattgtatattctggagtctgtaattaaaatgcagtaatatgctgtaggagtccgtgcctacagttttgtaacttctcataaatattttctgcatgaagtagcagttggtgtcctcttagataaaaatttcttaaacctcagaaaacattctttatgtggagctttttaagtgttattggatgtgctgtgtctgctctgtgtttatttaaggatgtctttatgtctcataggcatggccctatgtttgtccttttaaaggtaaaattgtattaaaatgtttctgaaactgcctaagaacagatggcaccatttaggcagattcattcaaagttaagcacacattttaaacaaatgtgcttttggcactagcgactgtgcctttggaaaaattttagtgatgattaatcacctgcatgcagagagctttcacgtttcctattagcctatgtatatcactgtgttaggcagtacagagacaagaaggaaaataagacctggatgttgccctcaaggaacttacaatctagtcaggatctaaagccacaatgtgtgaaatgagaatgagcatgaaatgagaaaagcaaaatgtgcagtaaagaaagtgatctgttcttagcaatgaacatgctgatcctctaggtaatatctgaaaatgctagccattccctcattctaggagctcgccaccctctgcccaccacctggtttccagtgccaaatactctccagtcactttctccttctctatcgctttttcctttactctgctctcttctttgcagtccctaaaaataggtgtgtcctaagctatggtgaccatatttcctccccttggaaactcatcttctacagctcaaatcctcattgcataggctctgtagtgtaataaaaatcacacaccaaaaatctcagaatttggtgtcagataacctggtttcaagtcctggttctgtcacttactagtgttaaaagcttactagtgttataagcaaatttacatgaagtaattttgattttcatgtttctagaatgccatattaagacctgcttcattgcagggagttatattaaataccaactgaattactgagtgctgaagtgatctgggaagtgtaaaaggtcatattaacgtcgctgttgatattcactttattcagatgcctcctgtatccttatctcttacctcaattgttctgtatagcagattggaatgtccagcagtttgactgatcattgtcattaaaatgtcttaccagcatcttgtacataatgttcccaaaacaactgtatctccttccctccctctgtgtcccatggatggatatccaacccatcctactcctgctggatttctttccacttatctgtatctcccccagtagccaaatatcctttatctctcacttgggttactgtagtctctcccttctagtctcagtatttactcttgtcccttccaattgttctccatctctcagacaaagtagtattgttaaaaggcatatttgattaatgccaatcctatctacatcactgaattaaactagcatgctccctaagactaaatatctctcttcctctcaactgggccttatgcaactgtttatcaaaatcctttttaaatatggtactctggcacttgaattgaatatattattatttcaaaagtagcctaaccacagcagaggacattggatgtattacttcctggaacctggacaatctaaatctaatattgccagtaaatagcacatcacatgaagtgttactataccggatttgctccagcccttacatgctatggaatttctttgggacacacacacacacacacacacacacacacacacattagtttatttcatgactgcatttgattagtttttatgtcaacattacaatctattggatcttggtctttttgtcaattttgtgctatctacaaatgaaaatatcttgtatattctcatccaaacaatgtgtaagacatgaagcagtggggcagaccaacaacattcccagaagaccacctctgctctccacccggttaggtaactgttacaggtattctacaattgacttcaatccaagtacttttattaccttcaatttctctttatatccccaaggatattttgagagataaaaaaagaattgatttgatctataaaattttaaatgctatcagaaaagtgaatgaaattagtttaaggtaaaatcaatgctgactttttcttaatagcttactgaccattatttaataatcctttatcagtttcttttttagggcttgtatcaaaaatattagcttgttatcttccatatatgttttctttttcggaaaatggagaatagactttcttttatggggtgaaaattgaaaaacctaggctcactggactccttacagagtcatcatatctgcagtctatggttaaagaaagttatttttcctctttcttatctccagtgtagcaaaactttacttctcactgaagttccattcatctgaaagattacttcctacaaagcctctccatttccctcttcctccctcctagacttcaagctccttgaggacagggactgtgtcttatgcgtcattgcctagcataacacagtagtgttaaaaatgtttgttaatttgttgactcttgctcatttcttgtgttctggaatctctacagcatgctccataatttctaaaaatcttcaaataattctgtgactacatctgcaagctttttaagtccatggaatatagttcatttgagtctaaaaattagaactatttgaaacagctagattaactcaaatctccctatcagtcttgggcttcagttatttgctgtgcgtgattccagagctcttaatcactactctctacatcttcaattgccttttctcctgtctagaatgtcctctagcttatcactcaagtatacccttttcctactccccaaataagcctactcaaaattcatttatcttcatgaattccctggaactatccccaattggcattagccattgtgttcagaaaagacatttaacatttgcgcatatagacagtcattaatatccaaaccctggaacaatccaaaaaattgttgttccaaatggagtttcaaatgttcataaaaaaatccatttggaacattgtttaaatagtgttattgtaatgaactgtttgttctagtgcgtagtgaagtagtggtgtgatccactgggctacaagtgagtgtttggcgtcctgctcattttgtggcagtgtaaacagaatggtgcagattgtaaaaagtgactcaaaaatgaccctgtcagacaatggtggcttcaaaatgttcatatagaaggggcttggagcagcaatgtgactgtggaggcaggggttgatgctgctttgttaggacactttacataacatcaaatgcctggattgaggccaggagagaggtgctaaggccccttctactgccctttattcctctccctggcactgattcagctaccactctcagaagctatttcatatggtaaaaaacctcaaatctcattgaataataatccttttctatacagcaggagatacctgtctgctgaaagagaaatttgaaaataaatggtgatgcattttttttttgtggggggtgtgtgtgtgtgcgtgtgtgtccagccatttttagtaatgataattctgatttgggggcaaaaaagaatttttttcttttttctcttcctattcaataagtgaaatataatttcttgaggtttacataatatgctcttgtggatgtttgtaaaattaatttttttctgcttttagttaaactaatgttttcaatcacttcaaaaatgattatagacagttaatgcagccttcaatgattcaaataacctctgtatatcatattaaaaattttctagggtaccacttacttatttcttgccataacttataccttttattccattcctgtgtaccaaaatctttttttcaatcactttgttatcttggagtaaaatatctcgacaggaatttccactaatctagaatagatcaaataaaggaaatctcttttcgattgaacaggacattataaagcatatgcctgagactccttaaaacaaaccaactaagaacaacaatagcaaccacaggatctagaattcagctttccacttcagttctccttgtctgataacactttctacactgatactctaattgatctgttcctctgctcacttgctctatctgagttgaagactgaaaatgctaacttccatgtggttttctaaatgttttctgggttggcatcttggcctttcaggttaaacctcacccttaatgaagaattaccgaatctgttacctattggttaagtgattctttatatagttcttcccatattaaatgaattgaattaggaagcttgctatgcccttgatgtactctaactcagcctggaaaagtgagacctgaccaaacctagtggtttagcacgtgaccctacaaacacctaccttgaacttttctggagttgtttcagaacacactgcctagcaacaaaatattcctgagtggatattcctctactggaattaatgatcctaaacttctcatttttctttctgacttttctgtttataagatacctggcttttaggaaagtagtcaaaatgattttccccagttgcaggattctaggtctttttcttatccagcatgttgtcaaagtagttttgtaaaagagaaatagactagacacaccaattttatttaaaatttaaaaacaaactttggagcaatctggaacatataataagaatgttctaataattatgattcacctttatgataagaataggtctagtatgttttattgtgtatccctcctaacaagtctggaatcaatttgatggatttttgacttttacatcctcaaagatctattggccgactcaaaaattttgggaaaacaaagtcagaattagtggttctgttgaagtttcctctgtggatgtcaggatttggattacttccctaagggtcatttctccaggatttggcaaattaaagtcaaacacatttatatcaaaatctaagtcggctaaattgtggtacatatgggaaactgagaaggaattttgcctgtatctttaattggaactacattcaattatcattcttacacatcattcttgagctagatagcatcatatcctccacaagcattaaggtttgctctctgaacaatgaaaattatataacccaaaatgtctgcccaaccccctgctgtatttttcacttgattgcaaaaagaattataagctaaatttagccatcaaaacagtaacttatcataattgtctactctgtccatttttcatcttttaaattgagtttgaatttttttcttttttctcttcctattaaaattcagccttcgcttaaaaatttccaagtctgactattcacataagtggaataataatattatggggctaaaagaactaacaatcctaagaattttagcagtttattcaaactgtcttttttatacatactacataccttgggattatagacaagctgaaattaccttttactatcctgtgtataaacaattaagacacaggtaatgataacacaccaaggagaatttagatatccatttgtatcattttgttctaatgaaaaaaaatatatactgtgaaactttattgggatagcactcaatgcaatcttcgagtttggacatcaagatcagtaacagacataaattttaggacaatgtcactcagagtacagatgccgaagaaagaactctagaagcacagatgtccagtggtaggcataacaacctattttattttcacttatagttgacttgtattttctgactagatgcccttaagtctctttctttagctttgtaatttagtaacttcaatagaggatgtcttggaattgagctcttccaattttttctttgagctcttccaattttttcagttacgtccttttcatctgcagattcaagtaattccaagtttcagaaaacttttctctagtttttctgttgcctttgttccctccccttcttcaggatttctaactatgcataattggatgctcctttgtctctctttctagatacaccttctctcattaatttttatatacttagttatttttcagtcacgtttcttcctcttctttttccctcctcctccttctcctatatcttctcttcctcttcttcttcttcctttctattcacttctaatggcactttaatctctttaatggctttttctctttcatttattttctgaagtttttcaagtttgcttttctttgtcttgtaatctttttctttgggctcttctataatattaagctattttttaaaaaacaaagattgtctttaaataacatacttaagattatgaagaacaagccctgtgctctctgatttaatcagccttcagatgtatgttccttagccctgacacctactccatatatataaataggttgtgggatgttttctttctgataattttatctttgaacatgactatccctttcctaaagagtagcctagaggataggtgaggaaatattcatattgggtttacatcctgaatacttttacattacatctgttatgtctttagcctcaagagcataaactttcctcaatatttcacatgaataggtctgggatggctcacagttaagtcccttaaataacaaactccctgaaccccactcaccaaaggccatcttctttggcatgagcctacatcactgatcataaaaatggcttgtatttaaggtttcttctttggatccaccttctatagttagaatgaatatctatataacattcccagagtcttcctccatacttgcctgtgtttcagatctcatcactctaaccaaaagatcattggatttgcatttgagaattgtgaccctttctttaaagggaaactctatcctgcctgaggttggaggacatatgagttggctctcagcaccctctctcaccataagtcaaattcatagtatttggcaggttttctcatagtttgaggttatggctatttccttgtttcactgaagatggcttttttctcctctctttcattttttgttgctgttgttggtgaatgtcaataatactgaatagagtaaaagtgactttcatatgctatgtttaattcgagatgagaactttaaagatcagaagaaactctgggactaaattttatagccaaaagactattcttttaataatgtatatggagtatataaatcttaaaattctaataatagctgttccataccactcatttattttaatcgatgttttagaacaaatctcatggttcatgtaataccattaaatcaggttagatcagaatgcaaactgtgttataacacagaagtgctatttaaagaacactgtatatttctcatgtatttcatatataaaatataagaacaagaaagaaatgcttgtcatatagtaagtgctcaaaattaaagtttcttttcttctatacctagtaggtatgtataatagataagaaaagaggttagaattgtcaatatatcttttactaaggcttctagctacttatcagggcctaataagaagaaaatgctattcttatttatttatttatttatttatttgaggtggagtcgcactatgttacccaggctggcctcaaactcctgggctcaagcaatcctcctgcctcagccttctgagcagctaggattaaaggtgagagccactgcgccctgctaaacatgctattcttactgtaataagatcaaggccaaaatatagtttgcctgttgtatattttgctctaaccaggttcacaaattttataacaaacttgctaattatatataactaacatatctttcaaacaaaaatttgtgaggatgtgttagtcagtatccctttaatgattttggaactaattgaaaccaaaatcctcttgttttccacacacatcccacaaggagattggggcttaaagttgtgttaacaaacacaatcacacaataaagctactccttccttcctgccctatccttatgttattagacaacacgtccaagaacagctgttcctataactcacataaacctattaaccccaactcacaccctgtctcccaattatttgcacttccacaaggtcatacaacttactccaaaagtttgctaatgtgcaaagcctgagagcttacaaagcacatcagcataactcagataaatctagtacacatgctccacggtttatgacatggggttatgttcccacaaacccatcataaatggaaaataccataagttgaaaatgcatttaatacacctaacctactgaacatcataccttagcctagcctaccttcaacgtgcgcagaacacttatattagcctacagttgggcaaaatcatcttgcacaaaccttattttataatgaagtgttgaatatctcatataatttattgaagactgtactgaaagtgaaaaacagaatcattgtatgacaacttgaagtacagtttctactgcatgcatatcactttcgcaccatttaaagctgaaaaattgtaagttggggagtgtctgtatgtcttttatttcaagcaaagaattaggtataaagacctctaatccctcttggggaaattatttataaatcccataaactttgttgataggctaattatttggaaagtaacctctttcaaaagatttgaagtatcacacacacacacaaaatgttgaagtcatctgtgatgttctcagtactcactaataggcacagtgtaccataaaatcactttcaattctgggcctgacattggaggtcttattgcctgaaatcaccaggtcttcctctctcatgaattccacaaaacagttaatcagtaactgatgacctactagttgccaggtgctgagagaatagagatgaacaagacgaaagtcttgtctttaaatagttgccagctaagaactccagggcctgtccaaatgttatttaattcaattgtttctatatccctagaaggtgggtattattatgcccattttacaggttagaaagtacagtttagaccagttaagtgacttgtccaaggacacacacttggcaaagggtggagccaggggtagaaaagaaggtctccaaagctcatgctcttcagcactacttggcggggatggcaggagatggtgaagaaaccacagagtagaaccaacactgactggaggaagtcacctgaccattcacgtgggaaaggaagccaggcggaaagaaagcaagctgcccacccaggggaccccggactttcccaaagtcggcaccgagtgttcctttctcaccaaaggtcccctgcaagcagtttcacagcaaatgttttataccagatacagcatattattgctccagaatccatccaggtcaataactacaccaggtaatacctatataagaaattatatgctagaccactcggacacagtattcacttcctacagctgccagtacacagtacaacaaactgctgaataggatgaagttccagccctcatggggtcaacggatcaatcagacctaacctaacacttcaagagagaaacaaacagaagacatgaacaaaaacagaaatgcaaatggccaacgaagatataaaagtatttggtaatcaaaatgcaaattaaaacaagatttctttttttgtctaccaaattggcagaattttcaaatgttgtggtgttgacaagggtgcagaatatagacctgcttggttttttttgcctctgggagtgggtttcaaccagctttcttaagggtaaagcccagactgctcccaaatttagcctgagcacatttaaaatgctacaatgcacattcctgggctccacatggaagagattctgaatccatcaaccagaaatgtaatccaagaaactgcatcatttaattatcacagggtattctaacacaggttttcctaggaccatacttgggcacagagtgccctagaccatgggtaggactatgccttcaaggtaggggcaaatggtcctatctatggcactatgcatggcctgatcattgaatgcaggctgctttcttcagttagatttgatgacttgatagaaatatttcagctataagacaaaaaaagtatcaagttatacttgcgactggtggacttggatgctgggtcacacacagttcagcttttataatatttattctctttggcccagcagttcaacttaaaaaaaaatttatcctagggacataatcaagttttattcaaaacattggtaggattgctgaaattacttaagagttctgaataaataagaagaggctgaagctactcttaataacttttccttaaaatgctggctatgggtaaagaacatgaaaggaaagagcactccactttgtgtcccacatattcagactttgttttgcaaatgttttctggttaccaaggcaacttctggattcctctgtgtaaatgggaaattgggaacttcgttttttaaaaaaatgattcgtttgttctttttatcctggtaagatcgttctgtgctgacaaattgcattctgacaggttgtaatccaaaacatgcttttttagaagactgtgaataataaggaatttctagtggttgacagttacttgtcatttatatttttatgtatttgctttcattgctttcaaggtataaactaaggtgctaaatattgggtatacttttaaaataatttagaaatatatatataacatgtctacaacaatggaaagacttacactaagcaggctgtcattgtaacatggtaattattattaccaaagaaaagacaaaagcaagcacagaagcaaccaaaacctattagacttggttttttaaataaaacaggctttacataggaaaaataaacaaattaaacaaaaattaatgcacaaccagcattattaggattagccttcttcaggtttcagctatttataatattaaacactcatcagtaagtaataggaaaagacctggaattctggctgggcgcggtggctcacacctgtaattccagcatttgggaggctgaggtggtcaggccacttgaggccaggagttccagaccagcctggctaacatggcgaaaccctgtctctaccaaaaatgcaaaagaattagccaggtgtggtggcgcatgactgcagtcccagctacttggcaggctgaggcacaagaatggcttgaacccgggagatggaggtttcagtgagccatcacacacaccatggcactccagcttaggcaacagagtgagactgtctcaaaaaataaaaaattaaaaagaaaaattttaaaaaagacttggaattttgtaaggtggtaagacaggtaagtttcacaaaggaatttccttaaaactttgcaaaaccccagcctgaaaccatgtagttaaagttcatgcataactttgaaagagcaaatggccaagcttttaagctactggagatcatggtggaacaggttaagggcctttccataacccactgaaggtgagggaaagtaattggcaaggatgaggcctgtacttctctagggatggatcgcctccgaaagaaagtcagttagcactgaggcggcaacaggctcctctacttgttttccttatagaagtttatgaatctatcttttctctttttcataagcattggtggacaggacccatttctattctgtatctcctcgtttgctgtttattaaactatatatggaggaacaggatttagtggagcatgctaaatcctttgtcatcatacgcccaaattcttactcaacctttattccttaatcttcgattattatgacaaataagagcatcacaaagatcaaatgggcaaaatgttggagtactgagcacaaatacaaatttgtaaagcaaaacaaaatattctgagatttaaaactacgtgaatgttgtttcaaataaaagtaaaaatttaagcgaccttaaatccatatatatggcacataaactcaacctatataagttagctagtctattgaaaagtattgatgcaaaactggtaaacaactgtgacaaaaacaaaaactaagggcccaaaataataacagatatcaatacgatgctttcagtatctgaatttggtttgcattggtctatcttgcgtctaaggcagggcattctagagggcagacatggggctgaataaaaggtcccttgacggagatttttctcggactacttatgctttcagcttactatgcctacctaatacttgttatcagagacaaggtaaaatacagaactctggaagggtggtttaaaaagaaaatgccagtgaaaacagtaagctgttcatttggggaactgttcccacaccaccaccaccaccaccaccatcccattcccttcaccacagtgtagctggatgagagcttcataaccctccatctgcaatcagaaaccagttacaatttgggcccctgaccaagctgggtcaatcctagctcctatatagaattctcagataaaataggaactcagttaaatttgaatgtcagattaacaatgaataattttaaatataagcatgttccaaatattgcactgagatatacacactatagtggtgttaccagatatgccaacaatagctgcaaatgcatagaatactccctatgttcaatgcattgttctaagtactttatacatattaacccactaactaaatgaaaacatatggatatgtaaacacatgccaacatatggatgatttcaggttaggaaaaatggactgagtatttttaaattttagaaaatatgcaaaacttcctacaattaagacatgtaatacattgtcattaatgtacaaaccaatttgtatacaacttagaatataaaaataaaaacttaaaggtagatacactaaagtagaaaaagcagtggattgagaatccaggggtctagatttctgttcctgctcattagctagctgggtgaccttgggaaagtctcctcacttatctagatctgggtttctttatctgcatgtgaggtttggacgagattatttttaaggtcattgttggccctaaacttctattatatcttttttttttctgccttggcttcagatactgtatcttataatgttgaagaaacagcttgcagagagaagtttattacctctgcaatcattcggttggtgtctcctaaaaaaagcaaattcagagcttcttcctctgtggttgcctgatggagagtcaagtttttcaggtgaatgttctgatcaggatcctccagtattgtcactttcctaagcaaatgggaagcaagaaaacaaggtactgctgagaatgaaaagaacttgaagtcttccctacaggcttttaaaaagctgtatagtatgacgtcttgaacttataaaagcaaataacacacaagataccagacagcactggattagaatcaaacactgacattcccttcacagtactatcaaatagctttgagactgaaaaatatattacaagctcctgatttaaagccacctgtcattgtaataatcagatcgctaaatcatcttagaatgcatattctttctgaattaaaaatacagataataattttctatctgcatatcaggaaactaggccatattttttctgtgtcatgattcagtttcttacataggcagtgaactcattcctttgttcaatttcatatcactttcaatttacatgacatttcaaactggttcacttaccaacttaaacgtgatgaaaattgaggcatctgtcatccttctaggagttattcccctattgagttttctcatcaaggtgaataaaaaattttcaagtcttataataaagatttagcttgccattattattttaatgcctctcaaatccatttcttgatcctttttcatttacaacatacctttccttccattacatccttttagtcagagccttagatctggaattacattcctctattacaactaccttaatgggcatcctgatgccaacaccgtttcctcccaggtgaatcctaaccctgtttccagagttggcttgtcaatactctccctaaagtcctttcaggactttctgcagtggaacaaaatttggctaaactcctcatactctgcttcacaggcctacagatttgagtcataaagttactaaagagagttcctttctacctcttaaattttgccttcttgattttcttaagaattgttaaggaaaggaaatcttattattcacaagtattgccaaagagtatctcaggtatcttcactcgtttaaaacatttggaattgttgacactaagtaaatgttggcatcatccagcactacttttcctttaaaagaaaaactagcagatggacatgtgtaattttcttttttataaaaacttattaagaatatcttaaaaatgaagattttgcaagtatcataatttttttcatctttcccttttgtaagaaagttatctggactttcatatgtaatttgtgagcacttaaaatcctaatggcaggaagaaaatgtagctctaccagcacatctgtgaccaatatgtcactaataatgtcctcctttgccaagttttagactcttttttgtttccttcaacaataccagcaaaaatggaaaaagatcttttctcttaatgaaaacaagtgtaatttatttatttttcaacaagactcttaagtgagcttattaaaaatgcttggaaaagagaaaggcatttgaattgaattgaattgaaatggatgagttgtattctatttttaaaaactccctttattccttaaactttatttccaccctgatttttctgaagtgctcaagaaggtttggctaaattaaatccctagagacacggaagtaatgattcttcctaaaccgacagattctggggcttataggtgagagaagttaagtaatattggaagataaagtaacaaaataaataatgagatggtatattaaaagtgagaaaagggctaggtgcagtggctcaagcttgtaatcccagcactttggacactgaggtgggaggatggcttgagcccaggcattcaaggctgcagtgagctatgattgtaccactgtcctccagtctgggagacggagcgaggccttttctaaaaaaaaaaaaataactacataaaataaaaagagagagagagaaaagaagagagttctgcctttgtcagcatgaagtcaaaaacgaattatctaactctaaggcaaagtcacctatgatacactttgaaagaccaagacagatacaatactattcttgtgcaagtttggaaaagggagagatggggtagcagcaaacaattcaaaggtggtgcatacactcattgggcactaaatgtacgtcaggcacttgccttatttcatttaatccaggtgttcccaaaaggaactatctgtggatacacacacccacccccacccaccccactctccccagacccccatacacagcactgctgcttaggtcccatcctaagagattctgatttgattggtccagggtatggtctgggtattagaatttgtaaaagtcccaggtgattctagtgtgcagccaagggtgagagccactgacttcatttttaatatcccttctagtagacacatggagaggaggtttctgattttttatctttactttccatcctgttccacttcatgcccaaagggtaaaattactaattttcttggttgtaaaacacctgaagacactgatgagtcatatctactaataggcaaggtcactgaaaattttaaaaagactgtctttccagggcaagtttcttttctacctccctgaccatgcagttggtgagtatactaagccacacaacattaaccacacaataactaacgctcaactggggattatgggtctccctaaacatccatagggtttatataattactgaatcaaaaaatgtaagtaatagtaaggacacctaatacctatatctctcaccattacttcactgaaacaggaaatgcagagaacaagcaagtatggaattctaagcatgctcatttattagaaaaccttatatgggtcactgatttgcgattatatttatatagaataattacatgcataaggtaaaaagtgttaaatgtcatcagtgatatttggctaagctacttttttcttctaaatcacccagagcctttgatctccaatgtagctacttcagaactattacacttctacatttacttccaggtgcttgtccagctttgtcacaaaatacactttgtacatgcccttggcgtttcttcatagaactctcggctatcttttgtaacacatccctgtgcgttaatatcatgtgttcctcacttttttctgatttcttgaccatggaggttttgaaaagtaaatacaaaggcaggttagagttttctttcatgggcttccccctgcttagggctcatttgtgggcacgctataaaagggtccacttctggcatccttctggaatctttgaaacacaatcttccctcaccaatcagggtctcttcttgccagttttcagattcttttctgatttctgcccaatcccttgggcatgatgctttggactttcccatactgccccgcctgcctcccactgaaaatcctttttgcactaagtcttgcagccagtgcgtcagccccacctatgttcatgcctttgctcatagaagcccagcctgagccatgccctgggcactacgtctattgcctgggagaggtagttgcagaatgagagtgttttaaattctactgccagtgaaatggtttttcaaagttgaaggaaataaggaccattacaaaaagtttctcatcaagttccttcctttcctggccctttctttccctctgtccctcacaaatcaatagctatttcctgaatccttaatctaccacttggttctgactgtaattttcatgggcttgaaagagggctttattagagtttcttaaataaacattctaattccaagatggaaacccccaaactatttatttgattttttttaacaggcctgtgaacagctttccctacaaaatgtttctaaaatatttagatttcaagaaaagtcactgatagccttaacttggatacctaagtggaaaagttctgctaagtgtactcagcctgcttaatgatggggaagaagcaagctttgtgttttctctgtaaacagagaatcttttccatttggctaagtagttggaatttgtagactctttttaactgactgaagcacatataaagagcaataggcaggctcttgttctcaataatggaagctatcaatgaaagaatcctccaccccacaccctacctccacatttcagtaccatcaacttgctgaaaaggaacttcccagccattactgcaaggaacatggtttctaacgttcatgttatatataagtgttgccatggtgatttctattttttatctatttgcaaatgtcccctatgatggtataggtcatgcactatgcaatggcgccatgtctgagggggtgctattcacatcatgggtttgtatagttatcacgacaaatgtctgtcataaggcaatgaagagcctcctaacaaaatcagcatactgcaacaattttccaatagatggcagaggtgccttttaataagtgacataaaggtgacttgaggtcatacagactagaggccattccgtctagacaccctgacctagagcaatgtcaagagcaggtgggcctcatgacaatgggtgggggtgcaccaggctcttctaaataactagatatgtttcacatgttgtaaacatagtcccaacacaagtcacttaaataaagagaacattcacttgtttgtcagttctcaatatcctttttgtttctccccaacacattttctcagaagctctttatggtgaaggtttagggaaaagcagagatgtaaagttttaggaaaagtatgtaaggtgacccctcctttctgcatttaaacaatttcaaaggtagattttcttagattgattacaactttctaaaaggtttctttggttataaaatataaatacttgaaatatgtttcttgggaaagattcatgaacctgcaatatatttttgtgttagtgttgacctagacaaaatgggctaaaagcaatggacgttttgtccattactgagatatttcaaaagctctttctagtagcttgaaaaccgtatcttttctttgtagttttatctaacatcatatcttttcactgacaatgaagaatatagctgatcacatgacattcgtaaactaaaaataaaatcctaagcccctcatccaactgaatggaccccctattggccacggggaccccagaaaacctgacaaactgaattcccagccatgataggaaagaaggttggacacgcttcgttatgcgccctcccttttggagtttcggcacaactgactagcattaatgttaaaacagagatcataagactcacagaacaaactttttgtggcaataagacaccaaattataaacaagacccaaggccatgccagactagtgttaagtcacaccctacaaatcacaaaatctaattaaaaggtttttaaaaattaatccaatataatgtggcttgttttccaacctgactgtgatgtagcatcacagcacagataacagacgtccccagtctcaacttaagcattcctttgtactgacttcaagtcattagacaaagcttaactctttcaaccaattgccaaccaaagaatccctaaaacccaactctgacttctaagtccctcctttgagacggtctaccttttcaaactgaaccaatgtatgcctttcatctgttgatttatgattttataattcctgtctttctgaaatgcacaaaaccaatctgtaaccagattgctcaaaataaacctctttttattttattcttattggctcaaaataaatctctttaaaatattttacagagtttcctttttctgttaacacgttttagaaactaagttagttaatataatctgcaacctacaacaccaagttctaacttttataaaagtgaaaacactaacaaataaaatactttatcagaagaagtccaaactcagcactgcaaaatattctgagtaattcttgtgataaatttttcttttgctatccacatgaatttcttttatttcaaactggcaaatatctcctctaaatattatcatttttatttctaatttacctttattgctaaataataatgttaatagacttggactcttgtaagtctgaattcccaaagatcttaaccaacctcctaaggttatcctgctaccataagcctgccatttcagaagtgctggcaatctgtaaatgatttattccctgtctgaagaggaacagaattgaaataaccaatggataaagtcatttaatgtaatgtaaccaacagggttcaaggatgcatagtgacaatgaggaaccagctgcacactctccagaagtgtctgctgcttactgtgctcgtatgcttcaatatgccatgaaaatgaacgtcaccaaagggactcaggacataactggaagctgttggccactgctatggacatgtgaagcccaaacaagaatgatctatgatcagcaaagatagaaccatactaggtgcaattaatgtgtaggagaaccaacgctttctcaggggtgattgcactcatttatttattagtcactataatttaatcatttcactaagattgagcataaatacgaaacattatgttatttccattgtcttttttcaaaataatacccaaatataataaagttttagattgctaataacttgataagaatatctttctgtattatgttaatctaaccaaactattccatgccctaacaatatcacttcacaaccatcaatggcgcccaaatctactgtattgaaacatggtttatcatacacttatctattgcccgccagacatcatcatttgcatgcttttccaaaagtgaatattttagataatcaaaaaactgtgcttgttacgctagtattccttgctaatttctaaaaacattcagccatatcatgttccttctgatgctccaggcttacaaataacccaccacttaatgaaatgtcttgtttggcctaattccatatagtaattatacagccgtgcactaaaatttgttttctttagagctaccaactttttttcaaaggaagttttctcccatttttactaatacttgctttcttattcagattttatagtgatagtaccacaaattatgtactcaagttttccacatttgggaaacctataagaatagatacatctagaggcaatggatttgtaattctggaaaaccatagcatttcctctgccaggtaaatagctttatacacctcttagtttatgatactacattttaaaagttctgaatttatttacttttattttcattttaacattcagtttattatttttccaactataagcataatacatgcttcttgtgaaaaagtatgaaagtagaaagaaccaagaaagcagagcctcatcacaaggacaatgtggtatgttaatatattgccttaattttcttacacacactttgcagatttgtcataaaattataaatgtatgcatgttactctcttttgatcaccccttaacaacattttatttatttatttatttatttatttatttattttgaggcagagtcttccactgttgcccaggctgaagtgcagtggcacgatcttggctcactgcaacctccacctcctgggttcaagcgattctcctgcctcagtctcccaagtagctgagattacaggtgctcaccattgcacccagctaatttttatatttttagtagagacagggttttgccatgttagccaggctggtcttgaactcctgaccttaggtgatttgcccaccctggccgctcaaagtgctgggattacaggtgtgagccaccgcacccagcctacaacatttttttaatagttacacaatattttagggttaggatgtattaatgaaatattttaaccattcctttatgagaatttgttgtttccaatttaaagctgttttaaataacaccgtaagatagacacacacacacacacacacacacacacacacacacgtacacatatatctttaactgtatcaatatatatctgttcctgaagcttttgaaataattcatattttctccttagggatgatttctgggggtgacgttacaagatcaaaagttatgaacagctttaaggctctcatcatacctgggaagcctatagcaccctctgtggaatggacaaacctgggctgagatcctggcctcccgccatgtgctagcagtaagtctttggcatcttaggaactctcgttgcatctctgtctcctctataaactgaggacaatatcacctctacaatggactgttgagaaaaaaatcatgtatttaagttccttgttcatcgctgtgccccaggcctaaaaggacacctgtttatgtttgatgcacaataatacattggatgaatgaacaaatgtgcttagtagtgtatgttgcacattaaaatccaataaatagcaacttccttgaaggtaggcagtaaaatgctttccaaaaatgttatactgatttacattcctactgtatgagagggactgtttcactattattttaataacactgaacattagtttttaaatttttgctaatattttaggttaaaatgttctgtttaatttacattctttgaatggttaatgaaattgaacctatttcagccaggcgtggtggctcatgcctgtaatccaagctctttgggaagccgaggtgggtggatcacctgaggtcaggagttcaagaccagcctggccaacatggtgaaaccccatctctattaaaaattccaaaaattagacgggtggggcggcgggcacctgtaatcccagctactcaggaggctgaggcaggagaatggcttgaacccagaaggcggaggttgcagtgagccaagatcacaccactgcactccagcctgggcaacaaaagcgaaaatccagctcaaaaaaaaaaaaagaaacaaagaaattgaacctatttccaactgttttttaaccgttatattgttttgtcttttgtctacttatttggggtacttaaatgtatgagctctttatatataaaatattttgtttcttatatttattaggcaaattttatatgtgcttgctttttaactttgatgtattagaaattttgtttgttttaacacataaaagtttaaattcttataatgtatcaatcttttcttttatttctgtactttttaagcttaaagtccttccaaatcaacagagtatataaaaattgacttttcttgtactcttttgggatatgagtagatggaatgaaataagggctctaaatggatttttcctctccatcaatgattgtgtggctcatgatgcagtttgcctgtatgggatctgtcctccccttctccctaactattaggctttgattttgttcagggaattatttaaagacactagactttcccagattctcttgcaactaaggctgcccatatcacaaaattctggtcagtgacaaataagtgaaagtcattggatggagcttcctggacatgagcagcctcaggcagcaggtgcctgtttccttccagaaatgtgcacgagatgctggaggtgaggcagccattttgcatgatgactaaagctgcccactaagaatggctgtgcagaatgatggaaggaagccctgaaggcatcctggagcttccacagcagccctccctgcctatttttagaatctttaaggtgcggtggtgtgggagaggtgaggcttggggtgtggcaaggaacagactatttggttaagccattggaagttaggctgctattacctgcagttgttaatttactaacacaaatgtccaatactgttgactgaagaattcttccctctacctacattaaatgattacattgtatagaatatgattctggtttaatctgtttgcttttcttcatctgtttaatttagaagtagtataacatgatttcattattagaacttttacttaatttgaatagatagtgtcattaattttctctcacttctctactttttgaaacttttgttcttcttggttgtctatcctttcagataaactttggaatcatatatatgttttttaaagcctctgtgattttgtttggaatttcattgaacctactcattaatatgagaacacccctttaaggtattcctattgcacactcagaaacagattaataactatctattttcaagtcttcttttactttcacagaaaaatgtactatcttgttcataaagttctcgaacatttcctgagcattttaccttcttttgctattgtaaaagagatctatttagccattatttttctaaatggattattcctagggcttgcttcttagatcgagttaggtaaatactaatagataatagctggccagttggtctgaataccatcagtcttatctctgtttcataataactaactttcgttttgtagaacatcttcaactaccttagaattcaatgtaaaaacacaaagccaattacaattaactgtggaatcacacataggctaactgctacggaagttccagagcagggagattaatatactgcttgtgaccttcatcacctggcccagataactcctccagccatctgacgtaatctcttcacttccctcacctagacttcattctaaaggctcttcccatgtgtcccctctctcaggccagctcagctctgctcccacctcagcagcactgtcagctcttggctcagtcagaacttgccatacgtcagtaaaattaggaaaccattgagggttatgggagcagagacgggggtgttaaaaggggcctgagtaggtagtgacaggaaacaactggctgaagtgggctccttttatgagatgactgcagctctaaatcatgtgtatgctcttttcacatgtacatacattattagtgggatagtcgagtgtggtgcagaagcctcttcaggtgtttcatgtgtataccccattttccaactaaatggtaagttaattgaagagacgaatacagattaaattctttataatgcactcaaaagagctaattgagattcttgcaatatggtaaattgttggtatacatggtattaacactctcaaaaggttgtaataatttttttctctatcagttgagctataatagacgtgtttctaaaccctgtacatttttctaaagaacagaataaagtgatcaagcaagcttagaatcattcaaagctgtttgaaataatcctaaggttttgcttcatatactgaaaattgagaatggattctgaaaatgatgtactatcagaataaatcaattcataatgcaatcgtggagactaacaggacaatatgtcaaagcaagacaaatccatactaatacacagtttagaatgtgtatttcacctcttaatggctgaagaaagtgtatgcatttgttcatacacaaagcacaaggaaaatggaatagattgaggtgacagtgtttttcctgtcattaattcatgtcactaaaagctctaaatatcacagatatatttctatattccagatatacgagtgaaaacactgaaactctttcttcccatccttccacgcatcacttattaggcaatggttggtgaaagctaacatttctattatatggattaaatgtttgtgtcccctccaaattcatatgttgaagccctaacttccaatgtgatgatatttagagatggagcttttgggaggtaattcggtttaaatgaggacatgagggtggggtcccaatcccatgatggtattagtatccttataagaagagctctctctctctttctctcctcaccaggcaagaaggcaacagtctgcaagccaggaagagagccctcaccagacaccaaatctgccagtaccttgatcttggacttcccagcctccagaactgtgagaagtaagtgtctgttgtttaagctacccattctatggtattttgttatggcaacccaagctgactaagacaacctcctaattgtctaagacatttctgatactgagaacaatctccttcaattggctactgagagtagaggaagccagctttctcccttgttattactctagtaggttgggctaggcttcgtgtggaattatgtcattttcgggctatgggggctttctattccttcatcatgattactgacagtgtttcagttctcaatgtacacagtccctggccaagacatagagtaggacttaacatcactggtcactggttactcatttcatcctacaggaaagcacccccaactcctcaagaggctgccattccagctgtgtcagtaattaactcagtttaagaaaagactggagttagctttaactttgagatctatgcttataggcctaggagtcccctcaaatccccataggagacagaaaaaaataacacaaatgaaacatgtaatgcaaaaggtagtagtaaggactgaaggatgcatgcctcatctaaaagcactaagtaaaaaattcttaaacacaaaatgtgtaggccaaacaaaacaggtttagggctgacacaaggagggtccaaagtgtatgggggagaactggcttccaaaaggacagagttcctgagactagaggaaagtaggtaagtgagaaaaagggtgagaggcaggaagctgaggaaattcatgtttgacagtttccatattctttctgagatagggatacaactggttccaaagagatttagggcagggagtagtttaccaaagagatgaacgtctggtataatcattgtgaggatgggaacaaaaagcagcgggcacatgaatgtgttgctcagcaggctgagggcccagctgaggttggagaccataatgtggtggagcctactccagtcttctctgaatccccagattgaaatcagtttcccctcttctgcccccacagaatccagggcatcttgtcacttactatgcacaactgaaatgatcagtttatgagtctgttctattagaaccacagccctttgaggccaagaacatttactttcagacctttgcagagagtctgacatgcaccagatggggctgaaatggacaagctttggctcacccagactgacacaagtggctccagaggcctaaagaaacctagaaaccacagtctgcttcaggtggaatactgggatatgacacagatctcttaggaaagaacaccagcacccccagctctgatgtttaatggaacacggttaatatcctggttctagctcttagcagacatgaaatcctggggtaacagcacacaatctctgtgaacctcagttttgtcaaccataaaacatggattataatacctacttccttaaatgagataatgtatgcacagtccttagcataaaaactggcataaaataagtgctcaataaatactggttcactatcctctttggagagattttcctggtatttcaaaaaacaactttccctacgtggatgagggaagggattcaggcaaacctccggcattagaatcacctgggatgtttattcaaacatgtgaattttctgggggtggaagccaggaattagcatttttaacaatcatcccaggtgattcttacacttagttaaatttcaagccactggattatgaagccttccaatttagttcctttgtttttttactcccactgccacctaagtagtcctagtaacttcccacaatgctctgactcttgtccacctcattccagtcctacacactactaactgatttttcttcctaaaaggcaattccaattatgctatgtcctggaatcaaaatctccaagggctacaccttgcctgccaaatcctcacatttgtaccttgccagtcttaatgctcctgcctactcccttactgggttccagtcaaacaggtctactaactgtcacagaacaagccctatgcttcaacttctctttgtttccacacaaaagccacactccgctgccccaagtcctaccccttccctcaaggatgatttcatctgctatcttccctatgaatctttgcctgatctcttgcattgatgtgatttctttctcctgtgagctcttgtcattttttttggctctcttacaatgtttttcacattccaccttatgttattttatactagctttatcctctctgctacgagttccagggaaacagggactacgttagcaaacatggtgcctagcacaatggctggaacaaagttgggtctcaacaaatgtttgctgagtatatgaatgaattcacatgactggactgtaagtcatgagagcagagactgtgcattaatttttttgtaactcctgcatcacttagcagtgttttctatccagtaggtgttagaaatgtggtgacttaaatttaacatttggtgactttttcccctttgatgacaaattattcaaaaaatacaacacagccaagatttcaatactgaatgctggcatttactggttcctttttatagtaataaccatgacaatcgttagaatcttaaatggaatatgcttccctatttaggaatactaaaattatactaaagtaaggtgactattttctctacagctgagaccaacagttatcctgttttacttcatgagacaaacttagattctaactatagtccttttatagcatgtgacataagaagctttcaaaaatagaatttctattttcatttgaaatactaaaaaatttctaaatacagaataggtttaatacacatatgtgtgtatatgcatatgtatgtctatatacaaatatatagccaattactttttaaattaaaccttttgagattattgtagattcacatacagctataagaaataattcagggaaatctcatatacccattgcccagtttttcccaattgtaacatcttgcaaaactatagtattaaaatatcacaaccaggacattggcaatccaatccaccaatcttattcagatttttccagttttgcttgtactcatttacgtgtgtgtgtgtgtgtgtgtgtatacattttagttctatgcaattatcccagttttgcttgtattcacttgcatgtgcttgtgtgtacatttaatatttaattatatgcaatttccccaattttgcttatgttcccttgtgtgtgtctgtgtgtgcatttagttttatgcaattttatcatatgggtagctttgtgtatccagagccacagtgaagacacagaacactgcatcatcacaaggatcctttgtgttgaccttgtccaaccattcccctgccttccctaactctgtatccactaatctgttcaccaattggaatcatacagcatgtaaacctttcgggattggctttttttactcaacatatttccctggagattcatccaagttgttaattatctcaatagttcattactttttgttgtcaccttattaactaaagcctatagtttacatcagggttcattctttgtattgtaaattctgtgggttttgacaaatgtatgatatcatgtgcccaccattacagtatcatatagaacagtttcaccacccagaaaccccctgtgcttcacctatttattcttctacccgtccccctcaatctctgacaatcactgatcatttcactgtctctatagttttgccttttccagaatgccatatagtttgaatcatacagtatgtagactttcatgctaacttttgcacttagcaatatgcatttacattttctccatgtctttttgtggcttaatagctaatttttttcattgccaaataatattcccttgtatggatgtactacagtttatctgttaacctattgatgaacatcttggttcctaccaatttttagcaattatgaataagactgctatatgtatttgtgggaaggtttttgtgtagacataagttttcaactcatttcggtaaaaacctaggagcgcagttgctggatcatatggtaaaagtatgtttaattttctaagaaactgccaatttgtcttccaaagtggtgggatcattctgcattcccatcagcaatgaataagagttcctgttgctccacatccttgccagcatttggtgttagtattttagattttagccagtctaatttgtatgtagtggtatatcactgttttaatttgcaattccctaatgacaggtgatgttgagattcttttcatacgctatttgccatatgtgtatcttcttcagcgaagtggctattcagatcttttgcccattttaaaaatttgggcatttattttcttattgttgagtttttaaaattctttgcatatttcagatataaaaattctttgtatatttatatctttatcagatatgtatttgataattaatttcttccagcctgtgacttgccttttcattttcttaacagtgtctttcacagaacagaagttttaattttaataaagttcaacttataaatttttatttcactggtcatgcttttggtgttgcatctaaaaactcattggcaaacccaaggccatctggattttctcctgtgttatcttctagaagacttatagttttgcatggtacattctggtctatgactcatttcaagttaattttgtgaaaggtgtaaggtccctgtccagattcacttttttcatgtgtgcatatccagttgctccagtactatttataaaaaagactaccccctttccactgaattgccttcgcttctttgtcaaaaatcagttgactatatttttaagggtctatttctgggctccctattctgttccattgatatatgtgtcagttctcttgccattaccatactgccttaattaccatctttatagtatgtcttgaagttgggtgatgtcagtcttttgactttgttcttcttctgtattgtgttggctattatggctattttgcctttcctgtaaaatttatagtcattttattgatatctacaaaataatttactaggaatttgctttagattaaattgatctatactttatctacaaatcaagtgagaaagaactgacatcttaacaatattgagtcttcttatccatgaacatggaatatctttttatttagacattctttgatttatttgatcagctttgcagttttcctcatatagatcttgtacatatcttgtcagatttatacacaagtatttcattttttgatgctaatgtaggcagtattgtgttttacattttaaattccaattatttattgttggtatataggaaaacaattgacttttgtacattaaccttgtattctgcaaccttgccataatcacttatgaattccaggaatttgtcaattatttgagatgttctacatagataattgaatcatctgtcaacaaagacagttgtatttctttcttcccaataactttaatttctttttccggtattattgcaattggctaggacttccagtacaatgttgaattagagtggtgagagggacatactttccttgttcctgatcttgggagaaagcatctagcttctcatcattatatataatgttacctacaggcattttatagatattctttatcaggttgagaacatttcctacatttctagtttcctgagagtatttatcatgagaagctgttggattttgtcaaatttttttctgcatctattgttatgataatatgatttttattctttagactgttcatgccatggactacattaattgatttttgaatgttgaactagtcttgcataccttaaataaatctcacttggctgtagtatataattctttttatacatttttgaatataatctgctaatattttattgaggatttttgcatgtgtagtcacaagagatattagtccgtagttttcctttcttgtaatgcatttgtctgcttttggtatttggataatgctgggatcactggatgagttaaaacatgtttcctctgctttttttttttcagaagagattgcaaattctttgggatattttagtagacaatatgtatgtcttttcttgtttttcttttactgaagtgactagtatttccatactatattgaagaaaaatggtgagaatggacattgttgcattgtttctgatcttaggaggaaaacattcagtctttcacctttacacatttgttagctgtaggattttgtagatgctctttaacaaactgaggtgattctccttatttctaacttgtttagatttctatcaataatgggtgttaaatactatttctgagcttcgtataatttttcttctttagcctgcggattacattgattgcttttcaaatgttgaactagctgtgcaatctagaattaatctcacttggtcatgatatagtattgattttatacatttgtggattcaattgtcaatattttgttgaggatttttgagcctatgttcatgagagatatcagtctgtagtttttttttttgtttttttgttttttttgtacaatctttgcccagttttggtattcgggcaatactagactcagagaataacctgggaattgttctctctcctatttcctgaaagagattatgtaaaattggtgttaattcttctttaaatatttggtagaattttccagtgaaaccatctaggcctaaagatttcactttgtgaaacttataaaattatgaattcaacttctataatagttattgaagtattcaattatgtatttcatcttggttaagtttggtttaatcacctttgattgttaatttagatgtcagtatttctcacatttactaaacaaatgactatagcaacatttgaaaaaagcaaatgactttagtttagtgccctgacataatatatacaaaatccacagacagttttataggcaaaagttctgcaagagcaggcaagtggtacatcttataatgtaaaagaaaaaaaaaatagaaaaggcagagtgtatgtgagaagagcgtctcgcaggtgatatttggggatgctgtgtcactcaacggtaaggaagctgttactgatggctattattgtgcagcaccaacatgaccctgagttgattttatatagttaagccttgtataagaatgcaaaagagataaaatgggtatattgccattgtccctcaaatggatgactatgagtggggatcaaggtcaacagacattttgcctactatgtttagaaggcattcaaagtgtttgagacatttcagctcacaacaatgaaatcagtcaaccagagagctagaatttcagagttatagtatgccccagttcaagagtttgtaattaatagcacatatgcttaatcaaatccaagtacagcaaaaaaaaaaaaattcattataaataattattttatcatcttagtaaaaggcaaacttgtctaaggccctcagaaaactagcagattcaataccagtcaaacctcattatctccacacctctgcctcccgggttcaagcgattctcctgcctcagcctcccgagtagctaggactacagaagccaccacacccggctaattttttgtatttttaatagaggtggggtttcaccatgttagccaggatggtctcgatctcctgaccttgtgatctgcctgccttggcctcccaaagtgctgggattacaggcatgagccaccgcgcctggccaagcttcaaaatttttatagtgggacctagagaattaaggagtcattgacttaaaaaggagatttccattagaaagtttgattgagtgatgataataaattttacatagataagtttgctgtctaaggatatcatactagatgtttatatttacaataaattcctcagaggtaggaaatatgccttacttggtttagtagtgtctctactgcctaagccagaataagtccttaataacttttaaaaattatttgtggaattgaaactgtgaagcagacgttttgaaatgagagtgtagagggagaagaacagagcatgagctcttttcatctgaatctaatcgacatggtttggtgcagcctaacaatgggaagagctaggaatgagaaaagtccattgaacccttaagagaggtaacataatatatagaaaaaaaagtacttgatgagaagtcagggaatttgggttccagtcccagtcctacagtcttaggtaagttatttcatttttctggatttctctgtttataaaatgtgggcattggattaagtaatatttaacaatctttcaacctccaatgtcaagagttaaaaagactggtgaccttcacaggagaggacttatttgttgagttttctatccttcacaaaagaagaaaaagtgatttcagtattttcaaatgggcttcttttagaaaagagcaagcttgagagcaagcgcaatgccttagtccaccctgtgtcctccacatttctcagcatggctagcattcagcagtcattctcaatgctggtcagattgtctccagagatgttgctagctttcatcttcaacgacttcccctcctttagtagctttgtcctcttgttggagagttcactgactcaagttagaagtgacctcagttatataacagttgttttcaagaaacttccacacacatacacaaaagtggtctaaaactgttcttattctcacattttggactgtaattacatgacaacagatcccattaaaataaaaatgtcattaagaaagaagagtcccatatccaagtcaatagcctatttcttcgaatatattcactactataaaatttcagagcaattcaagaattggatagtccttttggtgtggagataatgcaaattaaaataaacaactgatttgtaatctttttgggagagaatgaatatgtgtttctaaattagagtatttaataagaatataaagatacattttcttggctataggctacttttgatatatgatgtctgaacaaaagtatatgaacagttgccaattaatatatgtctaatataggcagatattcaaacaagcattgagcaatgttatataaatgctggcagggtaacttgctccattattagataaattttgaagacgctatttaaatttcagtcatgaaacaatcagtgccaatctgatcaaatgattgccaaagttagcattaaccatagtagagaagcatttgaggaaaacgtaaaaatgttattttctctgtctcagattctcttattgctgcttgaactctaatttgaataccttcttctcagaaagaggccacaattagaagagcaacagggtttcatgtggcaggaagaaagtagtactgtcatatcccatcaatcctctaagcacccaatcttagagaaaattcattgcactctcttctgccaactccaaaagagattttcccaagaaatgagtttcaggcaattttagttcccatcactactgtccatttgtcataactgaaaaaaaaatccattatattacaaaaagatacggttatccagtatttgctaattatgattgagaccagaaacatacaaagtttcaaagaaaacaattgaagagaacatctgaaagtaatttccctccattctttgttgttctgctactcacggcaaatcttccaaactggaggcttcatgtcttggatccaaaagatcataaccacattcattgtagatttccaaataggaaatgtgtgttgtatatattttgctgctgtcctgattggaaaagggaaaggtattatttatcggttataacaatgattctgcttagatgaagatgaacacatttagcactcagtttcctcatagtttctctctttttctctcactttatatggtttacattttcagttcatgacactttcaagttgccagttaccatatgcatgaagctttttttaatggccaacacccatgattacaagcaacttcagtctgttattttttattggttccacattatacataaaaagtcaatatacacttacaatgagccaacttggttgcagaactgtataacacaccattttttttactttccagaccaaaaaaggttactaaaaaaaataaacatattctgtgaatagtctattcataaaaaagaacacagatcattactttggtttaaaaattttaggagcaaaatagtttccatctttaatcatcattctttttctacttttctaatattcaatattttctgatgacataaatagataacaatgaaagtgacatccagaggacagaaaatagttgattagtcaggtatgagtggacattaatagttcactgccaatacctcacctgtggagttaattttcctggcccaagagggcaaatcagagatgtttagctattagatagagagaaatgagagaaatgtttgtggtgggtcactgctgaaatgcaatgacataggcatcaatgtaatgaggctaaaagtaaaggtgcctggtcctagtctcaattctgccaatagacaaaaatgacccattccctctgaggtggaataaaataaggaattttttcaactcttgagaaagttcagttttcaatacaaaatatcaaacaatagcaccttctttttcttcctccaaaaatacaaatgcttccatttccgcaaatattatcatgcttctcataagaggagagtatatttgggtcttgtggcaagcaggttgccagggtgtcagagtgtatactaacagagaatttgcttaggatgactttcctgattgattctcacccatttccaaggcaatccatttaataggttttgttcaaagggagagaggaccaagtcacagagataggagagagaatagtggcccataaataaaaagctggactcctactctaactagagttgagcctctaccatgtcaggccttcattttcaaactcattaaagtgaggaagttggctaataaatccctatctgttcttcagtgtaaaatgaatgattctttggttctaaaatggctccaattatccaaataaagatactgtcatttcagaaaaacaaaatgataaatgaacaattaaagcaactctcagccttccatgactataataaaaacactcaagctacagctgaaattctatattccggtgttctgtgaaggtgacatggaccgaattaccaagcaattttttttcagcgtaatgctgaaaattcttctgatgtggatgactctaatgcttatcccaacaaatggcctattgattacattagtatcctagtttagtaaaggtactatttcaatataattctttgggttataacttggcttagcacaggtgtcagagactataaacactaaaaagacttggtgtggctgttagtctaatccaatgtttctaaaatattccatggaatactcctggaaaacagagttccatggtcaacatatacatagactctgtccctctctgcagcatgtcaaaggccctaggggatattttggcaacattctgagatcctgtttaaaccaacatatttttaaaatttatccaaaatatctgaaataacccagagattatgatttgagagtttagtatacatttctgagttcttcttagcatcagataacaactgagtttgaatattgaaactccatttataacagaataatcccacacccttatcctcagctgtttcaccataaaaatggggataatagccctgatcttgcattctgttataacagagaaataagattctatatttaaaatcttacaaaagtgtgtggcccataacagatatcaactaatcattgttgctgctgttgctattattattgctgtagttattgtttttattattatttctagaagccttcaaatggagaattcagtatatgaatataaaaggaaaggaaaataaaagcaaaatggacagccaacttgtatgtttatctgcagtggagaaaatctcttcttccagaagttagaataaatcataaaacgtcaggaaaacagcaggtccactgccctgaggtgatagggataatgtctttggctctttcagcttctgcattttctggactttcattggaaaatacacttaaaattcactgagctatgtggcaagctacctttccttattactcctttttagtgtttaggattgccagactgtaatgtaacacacatgtttcctgcagacagccttttctcctgccccaaaacaagtttgaaactcacaataccaaaaataatgagagtgatttctaaaataaatggcatcaattttcttctcttaaaatcagtgaaaatgtactcctggcatactcatagacatttcaggacccagtaggcactgggctcttactgtatcttgaaatgaagactttgcataggtcaaatgtttcctttaagaattctagagagctccatgtacctctctaaggcaatcagctggggacctctgagtactaagctgcattttccagctatacaatatgaacaaacttcatgatgcacttcaagttgcttgaccagtttcaccgcagctgtttgattataatgaatgtgttatgccccatcatgaaaatatgttcatttacaaagagttactctggctttaaattgctccaatgggctcgctgcaagtccaggaagttatttaggatcattcagaatgaaatggagtttacggtaatgtcaatgacaaacagatctaaaacaatgaacctgacaaatggtaagtactaaggagacatttagacatttggatctatactttagtaaccatagataaaaattttaaagggacaaaaaatattttcctttgggagaggatgagtttattctatttaacttaatcatggatttggcttcatttgttttgagagtttcaagggttctctgaaattggtcagggatcacttggccacattaatatccatatgtggatattactggctgtgatcataactatcatgtattgagcatatactgtgtgcaagaatctggacaatatctttaaatacagtatgttcagcccctcacagcaatccataagactgaggcattaagtaaccgccccaaggccacatgctgtaagcagtacactttctcagaaccaggttgacctgtacctccagtgatctttctaagacaaaaggattccacattaggccacagcaatgaaaactattaggaattatattcccaggttgtgaaatgtgggaacaaaacaggcaatgtcagaaataagtgagtaaatgaaaaaagggctttggatccaacatatatgctatactcaatcctttctcatccaaattttctggcatgcaaagctggcatgtttgagctagagaaagatgagctgaactaatggataattgctactttatggatggcaattagaattatgcagatctcagcaatttcttctcatctttgcaactcaaaatgcaaacaatatacagtcaagaaattttggagtgactgttatattgacctagttaagacatgtattatacagaagtaatacaaccaaggaattgctggaactagtagggacactggagattctctaatacaattcaatctctgctttcacagaagggaaaaccgaaactcagagaaggtatgtgactcattacggggaatttgtttgaacataaccaacaaaataaagccagtccgaggtatagaagcaatatacataatggcacaaagcacagagttagacatcaggtggacttgggatagaactctagatcagctacttacaggatgtgggcccagaggaaaatatttaacctgaggctcagtattcccaactgtgaaatgggaagttgcattatatgttatatcaaatactggtaaaactgataaagctactggcattttgaggcactcaataaatgatacatataatctagatagataacccttttttacaatggtaataattacaacggtatttgtactttggtaaattcctctgggcttctatcaagtgtaaaatagtaacaattatactatcctgtttagtgtttcagtagctaaaagaaagatctgctttgataagaagacattcctcagtttcttgaggaatataagatattagttggtaaaaggtgttgtctgctctttcaaccttcgtgcgtatatcagaaggaaatgtccttgagcctttgctgaaatagcagccctttaatgagaagtaccttcttaattttcacttgtacagcaaaatcccaacctctccttaaaggtaaaggccaaagttatgacacaataagactttatcatttagacacaataaaatacatgtcataataaatttcctgctttcagtatatttttgctgaatatatcaaatacaaaatgatatgaacgaaaagtttcataccttttgtaactgttcaaaaatgtatgacagtgtccttgggataatgcctctgtcactgtaacgctctgcaccccctgtgatagtgaatgtcttcccgctgcctgtttgcccatatgcaaagatggtaccattgtaacctgccaggacactgcaataaagaaatgacacactttcaatatcaacatggctaactgcatatgaattaaatggcttgtattctaataacaatcttattaaacactattaaaaaaactttatagaaatatctattaaaaatttatatatgtgaatatctagctagaatttacatttttatctaggaacagcagcacatcaatcctgttctctaagaaaggatgtgcaacacaaatggagttcagtcatcttaaatatattcttcatcttttagtacacactggacttgaatcaaagaatatattgaaaaaaagttctggggaaacaatacctgtaatttggcaaactgtcaacctgacacctggtacctcacatggtgtaaacactcacaatagtagttacttcctagaacaggaggaacacactctgcttgccaccatataccttgcaatgtaattccctacttaatactaagcaccaactgaaaatcctctaggaattcccctcttctcttttcttggaatgactttttggtagaagatgctagtccatatatattcttcagccctgcagagcggcccttgatttgatggtggtcttaagaacccaaaggctggatcttctcagcctttgaagagcaccacctgtaatataagcttttataaatatgcatgaaatgatgtagactttcaaaactgtgtctttaatctatgctacatggaacagtaaacttttgtagctttatgttcgttttttgatacaagtggctccttgatctctgagatgttttcattaaactagctacgatgacatcagctattggtccccatgttgtgggtggattttttgatagatggctcctctgagttcacccctcactgttcatattagaattcctccctattagttctgtcaacatcctatctacagttctatgtttcatatgctttcatgcctgtgtgttgagtgatctgtcattataagggtctcctaaaacacacaggtttgactggagattattctgaagtggtcacttatgaccaccttatgcaactattaaacttatgaccaccttatgcaactattaaactaacaataatatcttcagcaacacgtcaatgcatctgttgctgtgtaggtagaaagtgttgttggtgcttacaaatttaatggacttagtacagggaatgcgcaagaaagtattgtaactgtgtgattcaatgttctacttttgaggagtgtaatcacttttcttcgtgtgtctttacatggagacaatatactgttgaaattctcaatttctaagatgttggaactatgacaaaattagatatataattacagaatctttttcctcaacagaatttgttaccaatgaaacattgatgtcccattagcaatatcatttggatatatgatatttcttggccataaatgctgtaggtaaatgaagtctaaaatttcaaatatctaatcttaaacattttattgattcttgatagaaagaatagatgtaaaatattctaggcattatctgtcttgaaaaacaccatggaatactctgcagccataaaaattgatgagttcatgtcctttgtagggacatggatgaagctggaaaccatcattctcagcaaactatcgcaagggcaaaaaactaaacaccacatgtcctcactcataggtgggaattgaacatgagaacacatggacacaggaaggggaacatcacacaccggggactgttgtgaggtggggggacgggggagggatagcattaggagatatacctaatgttaaataacgagttaatgggtgcagcacaccaacatggcacatgtatacaaatgtaactaacctgcacgttgtgcacatgtaccctaaaacttaaagtataatatatataaaaaaaagccactgccaaggaaacaaaaaaaaaaggaaaaaactacagagcacaaattaatattttcattttgatatagatatagactacgaaaagtgagtaggtagtacactacgttggcatctgctaagtgttatgtctacttttttatgctaaaatcttctttctcactgccagttgtcctagtatgtctgtctttaatatgtgctccccctacccccatctactgtgggatggaaaaccagatgacatagcttcatagaacactgtaaaataaaaagggtaaggcttgacctatatatactcccatggctatttatttattacgttgctacaattaaacgttaaataaggaaatgtaatcaggcaaaatttgtctccagtcccttctgtagagcctccattccaactcagtcttgtaaccactcttcaatggacactaggccttttcatgtgcttctggtctcatctgtcctaaggaaaaatactagttaaaaataaagaaagagaaatagtggtgtaatgaactttgaaaatccattactccacaagaacaataataccagtggcaaaaattgtcaaaatcaactttttcagaactctggaaattatccaaaggctcacaccaatccaagaagtgtttatgtaagacaaacagctaaactcagtaggaaccatgagctttgtggtattttaacttcaacattcccagcacctctccctagctccatggtagccttcaaaaacaacagccttgaaacattggagctgtgaaatccagcagcctagcaaccactgtagggggcagtatggatttggggctcctcaaaatgccccatcctcaaagagctgccactctctgactcgtctgggagctctctggaaaagctccactcatggtacttgtctttgttagacctgattcagagttcactcagtgtgagcagccctgtcctcggggtgtttgttgaaaaaaaatcagtggcaagtgtttaacatcacagctggcaaagctgcaatgccagtgaagtaaacaagaacgtaaccaaaaacttagaaaaacctgagaaatgtgtataaggggtttcaaaaaactctaatgtattcctgggaatcgggaaggccacacacatgtgcaggactatatgtatgcccagaaaagacctgagaagggcattataactcacctctggctggcctttagactgcacaaacagaaagtgagaagaaagacagtgttacaaacttcctcagcattgaaggtatgccccaacaaacatgtagggacccttgtatgtaggctgggagatggaggagttcaaggaatttaaggaaatttatttcattatcttgcctaaatttactggctagtttgttgacgataaatttgctcagtttttgtttatcttggaatgtcttaatttcttcttcatttttgagaataatattgccagacatagaagtctctatttgcacatgacataatcttgtatatagaaaatactaaggaatttactataaaattatgggaagtaagaaacaagttcagcaggattgtagggtacaagtcttaacactgtgtagatggcaatattccctaaactgatctacatttgtgcgatttctatcaaaattcaagctggcttatttgcaaaaattgacaatattcttataaaatttatacagaaagtcaagggacacagaatagctaaaacaatcttgaaaagaaagaacaaaggtagatgactcacacatccctatttcaaaacctactacaaagctagaataattaagacagagggatactggcataaggccatacatatggatcaataaaataaaattaagaatccagaaatagacccttatatttatgatcagttgattttcaacaagggtgccaacactattcaatggaggaaagaatggtctttttaacaaatgatccttggacaactggatatccacatgaaaaagaataaagctggacctctacctcaggccatgtacaaaaattaactcaaaacgaatcacagacctaatgtaagagataaaacttaaaagaaaatcttgcaagaaaacttaggagtaaatcttcatgagctaaattaggcaatgttttttagatatgacatcaaaagcacaaagagccaaaggaaaaaaataagctgcacttcatcaaaattaaaaattttgtgtttcaaaagacacaatcaagtaagtgaaaagacaacacaatggagataatgtatgcaaatcatatctatctggcaagggacttgtcatcatatccataatccataacatacaaagaaatcttacaactcaataataagaagacaaacaatctaattaaaaagcgggcaacagattcgaatagacatttctctaaaaagaaatgcaaatggccaataacatataaaaagatgctcaacataattggtcattagggaaatgcaagtcaaaatcacaataagatgcaatttcacacccactagtatggctaaaacaaaaaaaaaaagagacaatgagaagtgctggtgacaatgtggacaaattggaaccttcatacattgttgctggaaatgtaaaatggtacattttgaggtcttaacagttcctcaaaatgtaaacctagtattgccatatgacccggctaggtgtatacacagcagtattaaaaacatgtgtccacacaaaaatttgtagtgaatgttcacaacagcattattcattatttagccaaaaagtggaaacaacacaaagtgaccgtcagctgatgagtggataaacaagatgtactgtatccattccatgggatattatttggcaaggagaaggcagtacagatacatgctacaataaggataaaacttgaaaacacattaaattttaaaaagccagtcaaaaaagatgatatattgtgattctatttctagaaaatgttcaggataagaaaattccatagagatagaaagtaggttagtgttagacaggggctagaaggaagggaaaatggagagtgactgctaatggctatggtacagagcttctttttggcggtaatgaaaaggtttcaaaattaaataatggtgattgatggtggcacatttgtactaaaaacaactaaattgcatgctttaaagagtaaatgttttagtatttgaattacatctcaacaaagctgttgtaacaataaaatagtaaagaagagtctatactcacttgctaataaccagatgtgtatactatcttttcagtagtattttttaaagacagagagaagggtaattaataaaaggaatgaaaagctaatgatacatttcagcaatgaagagtgagataaacatttttgttcagaagtatttctgaacttcctaaaatcaacaatgcaggctgctgcttaattcatctcagctagagacagtcctaatatgtaaataaatcaaccctttataaacccagagtttgatgatcagaggaaatttccattgtagaaattctctccttccttttgcaaaatgcacttttcctagaagtttaaattaggaagctaaggtagtttgtcatttcttatcttttaatatttgcatgaattaaacaaaaataaagcctcaacccttttggagattataaactgaagtgtcactccagacacaacacatttacatgctagaaaaaaatacaagtcattttaaagtttagtttttccatttgtattactctttgtttaactaggctccaagtagaagattgtctggaggatctgcacaaagtgagacttcattttgtttacctccggatgcaaaggctttaagaacctcaagatacagccttgcattccagggatgaagccaacttgatcatggtggataagctttttgatgtgctgctggattcggtttgccagtattttattgaggatttttgcatcgatgttcatcagggatattggtctaaaattctctttttttgttgtgtctctgccaggctttggtatcaggatgatgctggcctcataaaatgagttagggaggattccctctttttctattgattggaatagtttcagaaggaatggtaccagctcctggattaagaaaatgtggcacatatataccatggaatactatgcggccataaaaaatgatgagttcatgtcctttgtagggacacggatgaagctggaaaccatcattctcagcaaactatcgcaaggacaaaaaaccaaacaccacatgtcctcactcataggtgggaattgaacaatgagaacacttggacacagggtggggaacatcacacaccggggcctgttgttgggtgggggcaggggggagggatagcattaggagatatacctaatgtaaatgatgagttaatgggtgcagcacaccaacatggcacatgtatacatatgtaacaaacctgcatgttgtgcacatgtaccctagaacttaacgtataagaaaaatatatatatatataaaataaataaataaagatgagaaaatggagcctcagagaggtaaaaaaaaagaatctcaagatacaatgtctaaatgaaagtaatcaacaacaaatcattattgtagtaataatttagttcactaaaccaaaaaacaagacatgaattatagtccctcaaagagacagcatagttgaaaaaaaaagaaacaaaatatagtaataggatcatggattttataattgatgtcagcagaggtcttctaactacattttgtccacccaaagaattccctccaaggtatttctgaaaaacagttacacaaagtatgcttagacaggaccaggttggacttagagaactgggcagggctgatttcatttttgagaggggaggggcaggtgaagcagcaccttaaaagtttagtcttagtttaatagttaagtttaacagtttagctttagaaaaattaaaaatcaaaggcaaatacattttatatgtatttaaaaacagttgctagaagcaaaacgtactagttcactcagaaaacacaaaccaaacaattggtactaaggacaaattttttaagctaatagaaatacgctatatacatgtttaatctgacaaaacatctttgcataaatcaacacaactaatttggaacaaatgaaaattaagctcccctattttaaatacacagttccgccttatccatacttgcctttcacacagttctgagatcccgagtaagtgaaactcagttattttgaaatccccagagcagttaacttctgtctactgtaaccctctttctagaataaagtctctcaatccctcataagcagtcccaaggggcaactggatcttttatagagaaatacggtaaatgactcctaactgtttcactttcagaatatctcacagtgcataaattcagtagcttaaattttagagatttcaaccaaaaacaatagcaattcataattagcacaattaacacaattcagttttgccatatataaaaataatcttctcattggttaagccaaatgaacatggaacttgtaaaatttccagcaagattttgatcacggggcatttcctgtgctgcaaagaagggagaaaaaaatgtgaggaggccgacacttctggggaatttaagagaatagtagactttgagaggtctgtttttctgcctagcaagctttcttagtccctcttatggtaataggctcccagtctccttctacaagctcaagaggggcaggcaggtgtatggaccccatgactcaggcctggccagtcataccacttgatcccatcttggttcctccaaccactgtcccacctgtaacagctattatatcattacaagaagctggtgacatgactcaagccgagcaaaaaagagtgcctttgtgtctcctgtatagattttgagaagaaaataagttttatttttactggggtccctactagaggccgtatcccctgcccttcagcacaaggaagcagggccaagtaaagttcagatgggtgaaggattatggctatgtcaggaacctaggtcaaacagtgaaggccctgattttttttttttttttttgagacagagtctccctctgtcacccaggctggagtgcaatggtgcgatctcagctcactgcaacctccgcctcccgggttcagttcaagtgattctcctgcctcagttccctgggtagctgggattacaggcacccgccattatgcccagctaattttggtatttttgtagagacggggtttcaccatgttggccaggctggtcttgaactcctgaactcaggtgatccacccacctcaacctctcaaagtgctgggattacaggcatgagccaccaagcccagctaatgttttttaactttcttttttttttttttgagacagagtcttactctgtccaccaggctggagtgcagtggcatgatcttggctcactgcaaactctgcctcccgggttcaagcgattctcctgcctcagcctcccgagtagctgggactacaggcaactgccaccatgcctggctaatttttgtatttttagtagagacggggggcgggcgggggggggtgcctcaccatgttggccaggctggtctcgaactcctgacctcaggtgatccacccaccttggcctcccaaagtgttgggattataggcatgagccaccatgtccagccaagggccttgatttttatatcactcccttcagttcttctttgagctaaaccagttatgtgagacaagaaatcctctctgctttgagttggaattcagttacatgcaaccaagagaatcataattattgcaaagtttccagagtgatctgaaagacacctcttagtccttgatttacagcaaggatctcaagctggcagtaaaacttgcctacaggaatgcttaaacttaactaaatttgaatgcctttttgcgagacatgttcttcagtttgctgtggtccccaacattccctaacatcttaggatcaactgcttcctaaaggtatgttacttgcctagacttgaaagcagggctgcatcactgcataatcacagtgcagtccatgcgaatgccggtgccccctcacctttgtgcagtgcctagccatttgtgtaggccactgtgaagcatgtcccctggaggtgtacaatatagaagtcctgcgtaaaggcatgtgagtttagttcccctagtttagatactgtcctttctaaaagcatgttttggcccagggcagtggcttatgcctgtaatcctagcacaggaggcagatggattgcttcagcccaggagtttgagaccagcctggtcaacatagcaagaccctgtctctgccaaaaaaaaaaaaaaaaattagttgggtgtgtggtgtgctcctggagtcctagctactcgagaggctaaggtgggaggatcacttgatcccaggacttcaaggttactgtgagctatgattgggtgacaagaagaccctgtctctaaataaataagtaaataaataaaataagtcataaaagtaaaaataaaataaaagcatgttctggcaacatcattctaagatctcttacagcttcagttctatgatatattgatctggttataaatcctgatagagaaataaagtaggttacatggctagccttcgtcaacctaaaccaaatcatcaatcattttggaaaggaatatccaaggccaagaatatctagattagaaatagttaccccacacaaccaaaattgttttgtgtgagaaaaatgaaactgcaaacatggattaactggtaatttatacatctgcgggcatactggttattaaactagagtcacaaagaaagagacccacaggcaaaatatagctagcagagcatttgtttggtcaacactgtcttttttaaaaaattcagtctgagtggtcttagtccccaatttaagcacagataccaccactccatctggccctcactagtttacttcagattaattgtttgccttccatggaatgttgagttttgcaactgctataaagtgactcagataaatggtaagagtaacactctgattaaagaaagaaagaaagaaagaaagaaagaaagaaagaaagaaagaaagaaagaaaagaaactaaactaaatatcagcatcttccaggttttgaaatgtcgtaagcaatcctctcacaccattaaccacccaagaaaccaaatggctatcccacccatcattgttcacatttcgtgtgtgataggaaaacaagaatgttgggtgctttcttctaaaacagtcactttggcacaatcaggactcccactcttggatatctcacaaaacaggatcagcagctgcctgtcttgaatgatttgcaaattctcctccttggatacaggggctaagtaaggggatctcttgagatccttcccagttctatgattctcagggctttgttcacagtcttgtcccaactacttcaaaccaaactttgcaagaagcaaacacatcatggggcacctaatccaaacagcccctcttaaaggatcttcgaggtcttaagcacactaaacagcttcacatccataagttcatggaccaaatccaggccagagtgctctctaaatgaggctgtttattatttcccaagtttctgaagaaaccgttttgtgttagtattaataataagcagcttaagtctggtaaaagaacagaaatgcatgaaactttaatgaagaaaatgaccccttctgaacataatccagttctaaatgtttcagtttgaagtccagcatacagtattgaaaagtgagggctgcatttttatcttatttacattataaaaagtatatatttacattatattatacattattttatcttatttacattatcttatttacataatttataattacattataaaaaatgcatttactgtagcatttctgaccaatatttttcctatgatccttcagaataaacacttagattaattaaatatataatcattttcagataaccatctaaggaggcaactaaaatgaaaccacaaaattttatacaacaatgtgggagaaattcattgtctatagaaatttattaggacagaatcgtgcataaaatctgaactggttactttgggtttcttttatagggatacaaaagaaaatagaaaatactttttcctaaaatcctgagttctctgtcagtaaattgatcaatcacatttcttaagcattcatgatattatatgagaagcctggtactgtgtgctttgtgaatttacaggaaaaaaaaaattcttctcaagaaatttgcagtgcaaggtaaagcaagataaccaccaagataagcatctttaaatatctgagcatgtgcacatattcacctgtataaccttctaatttacacatcaatctataatttttaaaaacccaaagggctaatttataaatgtgtttggagagatagaaagcatttaaagaaagtcttctacaaaaatttataattagagaggccaagtgagaaaactgtgttttcctagagactccatccttttccttgccaagtgtaaagtaaatcgagcttctgggtcctccagccatctgaataggtggaaacagagatccgagaatctaggtgaagaagtaggggagacaggcatagaaatgaaaagacaaagggcctatcttcaggggaggatctgtctgagaagtttggagagagactggaaagcggaaagttgagcactgcaggatggcgggggagggtagcaggtggctgccgtcagtgtggtgggtgctgagagaagcagcagtggaggaaaatgcgtttccctaactcctataattcctgagagcccacatacaatctgacctttgagtacttccaaaagtgacactgtacactgactggaccacatggagctctagtttagatttaagttatgagcctttttctccatacttctagtctcaagattacttgccaaataagaccttatttgacttcaattttgtgtaaaatggaagacattttgcacatttttgggaaaattcaaacacactttgatttcaatggataataatcaaggaggaaaattgccctttggcatagaaaggtaaataaaaatacatctcatgaagctgctaataatcatcatggctttatttgcatcatggatacacaacgatctaatgagatttaggagccagagtttgaagcagaaaggtgtggcttgattgagatcactcataaagggatcaggaaaaaggaacagaaaagactgttcagctaagtaatgtcaaactaccctgcaggccatagacaattatggcctatggaactatgtatggcctgtgaactagaggggcatggcagcagagatgatgaaatcagtcttggctgggcaaaaatcacacgaggagtcttctaggggcacactatgagaagagatatagggaaaatagaagggaatagtgttcacaaaattccgtgagacacatatcctactattagcttatggatagtagagatacagcatcatcttactaactgcaatgaacaatacagtctcaataaactaaaaaatctttagtcttgccaggtacagtggctcatgcctgtaatcccagcactttgggaggccaagcaggtggattacctaaggtcgggagttcaagaccagcctgaccaacacggtgaaaccccgtctctactaaaaatacaaattagccgggcgtggtggcgtatgcctgtaatcccagctactcaggaggctgaggcaggaaaatcgcttgaacctgggaggtggaggttgcagtgagctgagatcgcaccattgtactccagcctgggcaacaggagtgaaactccatctcaaaaaaaaaaaacaaaacaaaacaaacaaagaaaaacaaacaaaaaaactttagtcttaaagcaatcaccatttatatattcaaatttttctgtagcacttcaaactcagtctgatcaaaactgaacttatgttttttttcttttagacatattcttcctctttcattctctaggcaatctattctgagacttctattatctcccattttagagatgagaaaatttagccttagagaagttaactatatcaaggtcacacttagtaagtgataagagtaataccaaagtctatttgattctaaatataatattctttctactacctaagttataaaacaaacctaccatctttttataaagctaataataatcagatatgtttggtagaataatatccagttaaacagttgtctcaaagttgctctccacagaagttagtaggaaaaaataacttaaaagtcttagagattaagtatactggcttcatgtttttaaaatgcgagggctaatcagaataaacagattaagatcaatataacggtttaagttatctacaattaaattacatattccactacttttcatttgttctcatcttaaaaccacacctttgttgctgacacagcctgtagcaagcatcttacaggtaggaatgcagtgcagatttgcaatactttcctctggagtaccttgattttcattaattacatagcacaatcttgcaaagtactgttttataacaccactatctaggatgggtaaaaacaggaaagaaaattaactacaacaaaaaatctgtatcaccattcagagagaagcaaaggatgtgactttatcatcaacatgtttacaataggattaaaagaatagaaaacagaaaagaattactaatctttttaaggttttcctcctaaaggcagatatgaaaggagaaagtaccagagacttggggcacagcctctaggaaagtcagaagattcagaggagaggaaagaataatgcagatactttcctcaatttcctttgatgcctgacatctaaaaactcttttcaattccccatctggaacccaaggaccaaaaagggattgcaacttgtaatgagtgactaaatatattttacacaaaaggtaaggtcaagctgctggaagcctcttaaaatctaaaggagagggagagggcagaagtgctccccaccacttctccctaacttcagttagctgactgttaaagaggaacaacagagggctttgtgaggctgaaaaaaatcccaactctgtaggatgccggtggggggtagtttcatagacttctctgggcataaagctgggaatgtggtcctctgaaggcacaggaaacagaataactcttgagtatagagcagaatataccagaactaagaaggcaggccactgaaagcagtttcccgtgtccttttaaatagtagaaattagttcattggtatggcccattattaggaccttgttgttttcaccacagcactataggacgtgggggcctatgtaatggcattaacaagctactctttacaaagatgacaagaggaaagagtccgatagtaacgagaggctaataacatttaatgtgattgagatgaacaggtggggaagacagtcagtcatatttactggtatctacagcaaggaggacaagacaccagggtggtgggggacaaactgtttctttgaagataaaatggaggtcatcataaagcaaattccccagctcctctctccactctcagcctccacccccacaaacagaagtttatctctcttagtctcatctattcctcctcctctctggtcatagagattggccgtcctcctatctaaagctaaactcttccagctgaattctagattgtacccattctttcctgtctgtcagggacctttctccatcaattaactcctctcctgtattttctacttctcccttcatattaattgctcctccttagaaaataaacaggctcaagtttctcccattactgaaaatacctttacttatttttgattatacaagtaattcataaatgcatgaattaacaaatgcttgttaaaaatatttacatttaaagtctcctttgaatataattctcctcctcatcctccaactttcaccatagttatcgctgttagttatcccttttgtatgcatacttccagacattttacatatagcacagcttcatgtctttttacctttttaaataattggcttaatattctacgtattcctgcgcaatttgttcactcaacaatgtctctcacatcagtagatccacctaattttttatactctaagtctgtatagtatttcacagtataaatgtatcgtttatttaaccaattctctgctgatgaacaactggatcctttccaattacttgccattacaaacagtgctggaaggaacaacagtctttaccatttctctatagtaggtatacattcagttttgatagatactgacaatgatgtcctctaaagtggccttgccaatgtatattcagacctgtaacagaagagttcctatttcctcacttgcttttgatattatcaaatttttattttgccaatttgatgaaagagatatttcttattttaaattttcttttatctgattgtaatgtgatcaaacattttcatattcatattttatattcacgttaagcatacttttatacgttttttgaccaattatatttcctctttagggaactgcctgttaatgtcctttgactacttttgtagtagattttgagtctctttcttattctttgggaggagttatttccatttaatcatattaatcctctgcttatgttgcatattttctcccagatagtagcttaccttttaatactgcttatagtggcctttgttgtccaaaaattttattttaattaagtcaaatttttttcttcattttttttgcatttcatgtcttcacagggccttcagttctccaacatgataaatgtgttttctgcatttccctctatttattgttttcttaattatttaacttacattttttagtaacatgagttagaatctaactttgtttttgctcagttaataactaatttctccagtaccatttattaaatgatccattattccctgatacattttaaatgccacttatatcattaactaagttctcatatatacatgggtctatttctgagctaaccattttatctcaacaatttatttgtttattgtcaataaacaaactgacaatacaacactattttacttatcatagatttataatacagtctgatatctgccaagcaagtctaccatctttgttcttttccaaaattatcttgactattcttgtacatgttcctttccttgtgaattttaaaatcagttttgtcaagtctcagttgctcctaatttatttgaccacagaagacatttttcaaagatcaatgttcaaaagaacacacttcagtgatacactgacttaggctgtatctggcccaaggatttactttgtttgatcaatatagtgttgacccattcatgttttttaaaatgtttgacactcatctgaaagccaaaagtaaagaataaatgtgcaacagggtgtgtgtatgtgtgtgatagggtgtctctgtcttcccaaatggcaacaactggctgaggccaagtggtgactactcccttcatttacatgggctctaagtccaagttctccagtttctgaaatgggcccatttcgattatgtgtgctacctacctatactctagactgcctttgcctctgagaacactgcattattgtaataccattctaaatagtttcatgtccctcaaattcatcctctgtctacactgccaccagaatgacttttctatacacatataactgggcctccactatgatttaaattatttggcaacttccaattccttttaggataagatccaattttttctgtatgccacatgaggctttccataacctggaatatttctcacatgtcatttcccatgatttccacattatcctttctctagctgtttaacctgtctacagtacccaaaagatttcccacacattcattcatatttcaatttaagttgttcttcctgtgtagaaggccaagtcatctacatcacaaacctcagcctccattcttctgccccaaccaaatttcttttgtcctcacattcatttgcatggagaactcctatatttccacatttcagactcaattccattgctacctgctttttaaagctctttctgaccacttgccccataactctcaccttcctaagagagaatggaggctcttcttctatgtccctcttccactcatcatacctttcactaattttcttgtctatttgactcataagattgtgttctttggccgggcatggtggctcacgcctataatcccaacactttgggaggctgaggtgggtggatcacctgaggtcaggagtttgagaccagcctgaccaacatggagaaaccccgtctctactaaaaatacaaaaaaatttgccaggcctggtggtgcgtgcctgtaatcccagctactcgggaggctgaggtaggagaatcgcttgaaccctggaggcggaggttgcagtgagcagagatagcaccagtgcactccagcctgggcaacaagagcgaaactccatctcaaaaaaaaaagaaaaaagaaaaaaaaaaaggttttattcttcttgcagagaaattctttatttctcttaagcctaggtcagggtaactagaattttgtagggattgaaaaaatctgtggaatgaaggaagagaagtgtagagagatgaatgaagggagggagagcttaataaatcagtcattgcctgcactcttggggagcttagagtcatatagagttctgctcattatttaaaataatagtatagccagcgtgaccaaacaactaaatctccaaagagagaatggacttaactttctcccacattttaacaagcagtgtcaacacaattacataattgtttctctgacaaacataaaagttgtgcaagtaaagtaaatatcacagacaaattatctctctctaaatttaaaagtaaggtttttaaagttattttgccttgcagttgatataatttttattttcatttccaaaatactaaaggaatttggtggaaataagtgatcgaatatgcaaatatttactgtgcacataggtatttagtagtctgcaatgttaagatagcctgcactcacataagacttaaggattctccttggcagatatgaacattctttcatattgaagaccactcagctataccacctttgtcaaaccccaaaagtgatctcaacaagatgcctaaaccctacaatcacttttacagaacattcttagattctgactggttccattttggcatttttagcatctgtctagcagacttgtgcatatacataaaacacacaaaattccattagtacaacattaaagtttcaaatttaaacatacaggaaactgagaagttatggctctcataataactgtaacttacccattttatgtatgcattatgtgttaagtttagacacaaaaaggttaagcattgagctggcatactcatatatacacagtccaaattctcatcttgcttagaatatctacctttattttaaaagaactatacactaatataatctgttttctatatacataatggagacagaaggagagttggaactgagcctatttcattaaatattcaggtggtttaaagttattcacactgcattaaaaattgctatgcattttcggacacttttagttcggaaaataaaaacaaaagtatagaaagcacctatttccaaaataaaggaagtacgagatttttaaagtatcttgaaaattctataatggttaaaagaccaaaaaaattatacctaatactcttacaacatgtttccaattctatttattattttattttccctccagattctcattatatataaatttttgaaggaattctgtcagcttggaaataagaactcacctcttgtgaggagcataatttgcctcacatataagaaaaaaagcttactttgttctaccactacttaacatgttaagttcagagtcatacattaaataatttccctgtgagctgaggccaagcacatatatttccacccagggggaaaagtttagagtcaatgaaaacacaactcaataatgaaggtcttcacacagggggcagttagccaacatggtgtgtggctcctacttgaatgcacaaaaaagacctactaaatcacttaagtactggggctttcttttgagttataaagaatcacacaaactttgggctagaaggaccagtctgggttgtccttctgctttcaggtaggcccacccaaactatcctggacagaggagaaattgaactatatttacagcctgccaagagaatccacaattgctcctaataactcattctagtattaaatagctctgtcaagaaatcttcccaatatctccaataaatcctttgtgctgaaatttaaaccggaaaactggccccaatgtgacttgaacatgtggtctcctaacctggaggttatattgtaccataaagatgcatacaataggaccaattctttatgtattttatagcaatttcccaacagttactgaagagtatctgggccaagaaagtgctacatatagaaaatatatgtcctattttgttacggtatttggaaaattatctcattaatctgattttctttctttaattgtggtcaccattctaaggccagcaaagcagcagattacaaaaaaagtgtatttctgtatattgccacagaactggtcagtaagcactcaaattggctttctcaccttattaatgaatgatcaagtgatacggtttgggtgtgttcccacccaaatctcatcttgaattgtagttcccataatccccacgtgttgtgggatggacctgtgggaggtaaatgaatcatgggggcggttaccccatgctgttcttatgacagtgaatgagttctcataagatctgatggttttataaggggcttttccccctttgcttggcacttctctctcctgccaccatgtgaagaaggacatgtttgcttcgccttctgccatgattgtaagttttctgaggccttcccagcaaaagcagaactgtgagtcaattaaacctctttcctttataaattacccagttttgtgtatttcttcacagcagtgtgagaatggactaatacatcaagtcatggttgatcagcacaacaaatctgaatcagtaaaatttcactttgaatgatttacttagcctcaaagaaatggcttaaatttggccatgctgagaactggccaacctagccatattaaatttatccataagtttatatatgtagtataatatgtttcattaaaatctccaatctggcctggcatggtgtctcatgcctgtaatcccagcacttggggaggccgaggcagtaggattgcttgagctcaggagtttgaaaccagcctgggcaacagagtgagaccctgtctctaaaataatttttaaaaatttccaataaaaaatgtgttgaagttgtattatttattccctcaagcatctatttcttcatgcattcatagcaaaagacatttatggtgcccctttttccacagcaatgttctaggtacaatataatggatgcatgtaaaattcatgtgctgtcacagttcatacggagtatacaagctagtgtatacttgggtgggaagtcctaagcacagaatctttctcaaccgcttgaggtatcatcaaatcatctcagcatagtgggtgagtaactacctatgggggtataagctgtctagttgtgttgtcaatgtcccttcggaggttttgaagttatagcttgctaagttcagatacataaaatgctcacacaatcttgtcaatgaagctttccttcaacagcagaaatcctctaccttttttttctgggtcatccaaaacagtctttcaaaagctaaatttttttttgagctaaggagccccaatattcaatttattcgattcagtgagatgaatgttgtcagtctaagcacagtcagcactgtgcccctcataaaaaactttacagcaacttcaaaatactaacatgagtgtgaaataacaaaatagattaatgtgatccagaagcgtccattttctttctaaataaatcaaaagttaaaatataattattctggtcaacaaagccattatggattattccataattatatcaagttttctaaggcaagtaatagtttccttttcactgcctgtgagtccccatgaaatcaccttgcagtgcttcacacaaaaatctggtgcttacatgtttgtttattgcactgctgctttttccctgagagctgcaaaatccaaattggtcttacttccataagaccataattattgcactatggaatcaatcactctgaaaagctgatactgtttcaaaatgaacctactcacagtgactataactcacaaccaggctgaaaagacacatcaaattctgctattttaaaagcaatttttactctacaattatgcattgataaaatatttgataataataattttttaaatggttaggctcaattcttcaccaagattcacttctatttttctgattttattgccacactaatcctttgatttgcatttctcataattatttttatttaactgattatagaaatagtatatgttctttgtcaaaaacacatcatgtcatacagcacaaagttaagtactccataatgttccacaaagataacccaggttaacatatgctatgtacacttttagatttttttctgtgtctattgcctatgtgtaaagaattcattctttttttctctctctctcccttaactcattctcttcctggggaccaactttcctctaccccaagaatgtaagcatcccattctacctatggtagtaaaactgagaggaaataaaaatcaaacatcagaaaaggagttaaaagggcatgcagtagcggggaaagaagtagggccatagcagaaaagagaggtacaagaaggaacagagccttgggagctaataaggagtaccctgggagaacaaaataaaggccctttccgtgaaaagccgttgaagagttacacagaacaaaagggtcactaccagatggataccttctaacctccctcaatccttctccacttagcaaccaggagccatctttgaaaaatacaaatcaggtcagtctctgaccaataattcatcatactgatattctgatttttcaacctggtatactcagccatccatggatggtaaaactgcttactttaattgtactggagaccttggcaccccaggaaagtttaaataattaagaatagagataaagtaaatcaaacccatactcttaataacattatagaatatatttaagtgtacttttcatatcattgggccattctagttgttttatttaaagagtttgaaatacttaaaaatattatgactttaatttaaaacatataatcaattccagatttgggatattaagtggtgtaagtacatttgattcaattttggaaatagcattaaaatgttaagagaggctgatttactatgggtatatgtttgcttactattttttaagttgctatgtgcttaaaatgatttgttaggtttgtaagtctgccccacaaggcatttgaggtgtttgagacagtcacatacattacatgtgtaaatgaggtttaaaatgtttaagggaatttaattagctaaattagaattgtaattaattgtttaggaaaatttcaactgttaaatttgaattaatcaaatgttaatagggtaacaaatgaaagagactattcttatataataactaaatgtaaaaatagtctcataagatttgtaggttgaagtaggtgtttgaacacacagcttttatagagacaatatcaattcgaaacccaatgtaagaagtccttttaaagatttatctggaggctaaggcagaaggattgcttgagtacaggagtttgagaacaacctgggcaatatactgagcccctatctcaaaaaaaattatcttgaataataaaatactcaaactgaaaacaagatccacaaaagcaaggtgtttctctgcctggcgtaccccaatgtcttcagagccaaaaattgtctgcacacacacatagtcaaaaatacgcgtccacatggagttgtttattcaacttcagcttagtatctttttttcttttcttcttttctctctctcttttttttttttatagggtcttgcccaggctggagtgcagtggcaccatcatggctcactgcagcctcaacctcacagactcaattgatcctcccacttcagcctcctagtagctgggactacaggtgcacaccgccatgcctggctagtttttgtatttttggtagagatggggttttgccatgttgcccaagctagtctcaaactcttggactcaagtgatccactggcctcgtcctcccaaagtgtgcctggtggaacttgctatctttctgaagatcaaattagagcaaccagtcacaggaacactaatggaaaaaaatctgttttggactatttgtagatacaaggaaatttaaattttgaaacaagatttccaagggacactgtggaaaataagaactataagtataggactataaggatttgttccttggttggtgattgcagatggatgacaggaagaggagaagtagggagttaagccataaactgcagagttagaaataaaagtagtcagtcccagagatccctcaagaagcacatgggaccatgtgctactgaaaccaaaggcagaagcatggccagttgcaggtgggaactgggaaaggtcagaataagtataatacaggcacttttagatttggctataagaagctttatgaaaatatgttgatgaggggaatttataaaatatgaatatagcacaaatcaaactggagagaacggagccaatgcagcagagtgcacagtcacttctaagacatgagctgagcagggaggaaaggaattacaaggagcagtaagttaaaaaaaatagataaatctaaagaagtaattgccttttgttaaagaaaaaaacagttgtgatatttggcttcccttaaaggtacagactgaagacagcattttataatgacatcaaaagagagaatgaaggtgtggcagagatcacatcacatgagacagtgtagttttaagaaagaaatgtaaagcaatttaatcaccactactagatacctaagcagataaataagccaataaacatgttgaaagatttgttcctagtacttatatgtattaagcaagcttcctgtcctcatgaggcttacattttagtagaactaattaggactggaactaatatcaagtttaaaacaaaataaatgctgtatataatatgatttcacgtggtgataactgttataaataataagaaaccagggaaaggagagaatcaaaggattgtctaggattgtcaagacataaacaagcaggtcagagagttcaagcttggtgtttcagggtggggtagtagcgatcccaaagaagaaatagaaggtaaggtagcctgagaatcaccatttctggaaacatcaatcagtcttagacaatgaccttacaattacctctaatttcccccacatgatggcagccttgattctgagactgaaaactattaaactcatttttcacccctaaacatctcactgacagatggctgcatgcggaaggagctgggattatgtgtcctctcaagatatttctaaataaattcgtgtcctccggacccaaaatatacagtgtttttcatgacagttgacttcacataaaaatttgtgaaatatatttggtagtgaattagatatgtaaagaaggaacatgaactgggtgggagcaagatttaattgcttgaagtacaggagatctggaagacaaaaaatagctaagacatatatatttttctcttctctagcttgaattaaagttgtgagagtaagaagttagagacgcttttttgcatcctttccaaaatttgaataaatcatttgttccctatgtgatttaatttgggagtcaatcataatccccaaagatacaatccttaataccgtaatgccaaatgttgaaatcctggaagatcaaaatctgggaagaataattttaaatattctctaaaagatatttatttacatttttaaaagggaatttatttgagaaacacaaaaacatgacaaaacatttcataggtcattttacacaacagactaggcaataataacatatttttacaagtgtaaaccctcatgtataacaatgacagttgcagagtatgaagttatgagcatatgagctgtattcataaacaaataggtcgaaaagggaaatgtataaacatatactactatggttggcaattgcatgcacccagctttataactgtggtcatctgaaacaccaaaatgaacaacctaagacgaaattgatggaaaaccatgatgggtcacccccatatattcagttatccaaagagccaaaatctcgagaaattttatctttcacaaatgcagacgtacaaaatggacatctcttcatttagagaggaagttacaatgtttttgcatacatgcacaatgcttacacacaaagtcaatatgcacaatgcttacacacaaagtcaatgtggtgacaatgcacttttgtgaagtcaaatttgcaaaaactgcatacaacaaatgagaattctctaaaagtctcaacacaatttataactctagtattggaaatgatgtgaagatgaaatacatagcataattaattggaaaaaaataatgccgacaattttaaatagttaaaaaaactataaaaagtaaataaaacccaaatccaaaaagaaaattcaacatgaaaaagtgtattacaggaatagactataagcaactgcacagatctgtccagaagagctggccaactttcacgatcattaattatattttgaagtcttacatcgcagtgaagagctgttttttttttcttttaggacataactctccttgcagaatatgttcacattaattttctatgtgacgctgatcttcctgaaatccttctattatttggcatgcacaaacatgaagagtgtctattaaattttcccattttctgtgctgtgcttctttgttgttttgggtacatggaaatccattctgcatacactcatatacagaccacaaatttgacagaaacaatactggtgatcaaacagcaacaccatgtcttcttatcctaccatgaacataattattttcaaatcagttacttcactggcttcttcaggcaaatgtggttttaattcattaaaatctggaatgtcatcagctggaaggaatgtcatacaggcaaatcatgcatttttaaattcaagtattcgtggccaatccactcatctgaatttttcaccaaatgcactgggcaaaaacaaactttgttggtaacaccttaaaaatcatttttagaagccttgatcacacctaattccaaatctgtcattatggtttggcaattcagttgaaatctattttcttctgcaaagtccaccacatctttgaataagcatttataaagtactttgttttttccagtcattagtacataaacaagcatatcagttctagaattttatgatctaacaggagctatgaattgtatatatgaatatacaactatgaattgtatacagttgatttaaaaaatagtggggacagctttgaaagtgccaaccattagccaaagtgaaaaaagtgctagtttttatgttagattttgtggtaaatatatacgtaagaactctatcttcttctacagtcaaatctctagtcaaggataattcaccacctagtgtgttctgtaacactggagaaagctcaatattagcaagtgtctttggtccagaaagttgctgagcttctcgaattctttttactctctgacaaaggatgttttttgaaggcaagcatggtgttatgtgtgaaggggcagaagtcgtacatgattgaacaatttggcaggggagatttcttgcatttttcgcctgtgttttcactttttctatgatctttgaaacacttgcagcactcgtatttgaagggggattgtggcctacaaattttgtaaatatattctgtctatctgagagtctaattgtgtggccattgcaattaagcaattttctgcttttgcagcaccaataataattagcttttaaacttttatctttcatttcattaagttcctcatacacttaatttatcacagcctttttgcacgggaacagtttcacagatctctttcactgtgttgtaagaaatagagtaaaaaggaatgatactcagcttcccgataccaaatctctattagtcagggtttctccagagagaaccaataggatatttacatagacaaatgagagaggatttattaggggaaaggctcacacaattatggtgactgagaagtcccacaacaggccatctgaaagccagcgaccctgggatgcccatagctggctcaggctaaaagcctcaggatggggtgggaggggtggggatgaagtcagtcctggaatccaagggccaatgagcctggagttctgacgtttaaggcaacagaagaaaagtctgtcctagctctcagagaccagtttgccttctgtatttgttttctctggccagcaccaataggatggcacccgctaacactgtgggcaaatcacacccacctaatccactcggactcatacactaatctcccttggaaacaccctcacagacacacccaaaagaatgctttaccagctttctagatattccttaatctagtcaaactgacacctaaaattaagtcttcaagtccactctatgtcaacttggcacccatacatatctccttaaaacatacttaatttccaaataaagacaataacaaggtaatagtactgctgagcatgatgcaattatcctgtgagtgtaattactgagattttagatgttagcgattttagactttgggaattttgatctttcaggatttcaacattcaggataatggtgttcaggattgtgtctgatatggtttggatgtctgtcccctccaaatcttacattgaaatgtaatccccagtaatggagatagagcctggtgggaggtgtttggatcatgggggtgatccctcatgagtggcttagtgccatccccttgatgatgagtgagttctcgctttgagttcatgagagatctggttgtttaaaagtgggtggtaccttgcccctctttctcttactccagcttttttcacagaagacaccagctcccccttcaccttccgccatgattgtaagcttcctgaggctctcaccaaaagcagatgccgtcaccatactccctgtacagcctgcagaactgtgagccaaattgatcttgtctttattaattgcttagcctcaggcgttcctttttagcaatgcaagaacagactaacacatgtctttcagaattatgatctaaataaacctatttattttaggttctgaagttttaaaaggttaagtgttcaactgtaccttaaataattaagagtgattccttccggctttctttttaggagaaaaaaataatcatatgataagttcaaacactgactcaattcaacaaaaagtacacaattaggacaaactaaactatttagaacttttgtcctagaatccaaagagcccttagaagtgtctccctactgaacatctcctcacagaataaagaaacccactgcacctcagaatctccagtataaagtcattcaggctttgcttgaatacttcgtgtgatgagaagctcattacttcacaaaacagccatttcacttttgatcgagtttaattgctacacatgccttctgtatccagaaccccaggccatctcatgaaaacttttcctgattgcttctgttctgcctcgccagatcctccaatgtaaattaattattaattatcccccaaataagaaacgcaaatacaattcagaccctcctccattataattttaagtaatattttatattactttcaaagtagtaatgcaattatgtgaatacatatttaggcccattttcagtaatgaaaaatgaaatctaaaaatgaaatttatgtggaaaaaaattttaaattataataatagaaacatttattcggatgactagatattgagcaactttgactagtccataaaatccttattttagctagtggtgagaaagtaacttgaataaatttatttttcaaaataattttttattacttaatacctgtacagccatttgattcatgaaacaaaggataaaatatgttatcctaaagtgttcgcttagatatcttgcagagttgcaaaaacagactccacagaaaaataaatacataggaaaatctaacaaaacaaaccaagttaaatatttcaaaggtcactttttaattactttacaaagggtccattatgtaaacaaagctctactccacaagtcatgctacctcccccaacaccaccaccactctgattctaagaggaaatggctaaaatcattcaaagagttctttactctctgaatactaatgttaaataattttctgtgttatgcaaagcacacacatatggatttatccaagacatagaggctctccacagaagttaaaagctgacctgcataattcatctaagtttcacgtctttgaggtggtgaatcatttcctttgctttaaaatattttccacatctcacataggtccattctcagtttattttcttttgaaaatgttaccattcattcatagcccgctactttaaaagctttaattgtaataataaactctcaggttttttctgtcgtctgacttctgtcacaaaggtacttaggctttgtacctcaaacaagatgttaagaagtactgttccccggaatagaatagacatatttagaccttatgcggggcagcacgaggtgggcggcacctttggtgatgcagtgtggagtctgcagtaactggtgtaattgaggcagggcagaggtggccaggtgctggctgagctggctcctgaatatctgggcttggactccagcatacgcagacttaaggaaacattgccagtgatggcaaaccacatgttgcttgcttctctttctttaaaattgcttttctgagaagcccagacaagactgagtgtaaagcagatggcctgctctcctcaaagtcactgggaaagggtcttttaatggaaaaagctaccaggcatcaattcagataagtgagaaggtccttacacccgtgacaacgccctgagcagtccatgaagctctgcctcactctttccatgacagcatgtggctactctgggcgcgggagaaggaacagaaaccccagcctcaaagagcgtttggggaacatccaaggagagtaactagatctctatagtaacaatttgttaatatgatgacacttcatcataatgctgttttagactacagatattaaggcaaggtgttttcacaaagttcagttaatccttgaatgatgcagtcaaagatctgcatataacttttgactctacagaaacttaattagtaatagcctactgttgactagaagccttaccaataacataaatggccaatttccacaaattttgtaccatattcttacaataaagctacagaaaatattattaagaaaattataaggaagaaaagatatttattatttattaagtggaagtgggtcatcatacataaaggtcttcatcctcatcttcacattgagtagggtgaggagaaagaggaggtagaagaggtggcattggttttgcagactcggggtgggtgacagaggtgggagaaaatggaagtaaataggatcctccgcacagttcaaattcatgttgttcaagggtcaactgtactttggtttattgactttagggtctggctcactcaaaaagtgctctaggtgttgcctttagtgagtcctcctcccttagaaatagtatatcaatatgcaaatctgtattaccttctgcctctggctgtttgaataagggtaggctttgagcaccctccccaaaccaaccatatgagggcattgtagatgtcacctataattcacacctgtagttcattagtagttaacacttagttaaacagctttaggaaataaactgcattatgtcaccacttatctaaaaaatcactaatttggtttttaattccatatgtattttgcacctgtcacatacaaagcactttgataattactgtgggaatatatcaatggatcagacaggattcctgacttcaagaagcttatagttcagttggcgaaatgatgcacaatacacaagacaaactactaaagacacagaccaaatgctgagaaagccaaaaaggaagagtgatttacttccgttggggtgactggaagtttcactaaggaaatgtgctttaagcaggatgtgaaaggatttgtagtatttgtagactcaatatttgcaatgaatgtcccatttttagctgcctcaaccctccctggaggcagacattggattttgctgttttcatcaaaggactgcaatgcctggagagatctctagacttctctagactctagtgataataatatccaacagcagcttcctagttatctccgtgagggtattggtgtgagggtctagcccgcttctatcctaggcattggtgcctgaagctgaggctggcaggggaaaggagccctgccctatgttcctgatggccagctgaggcctacattcctatgtcattcctgttcagctcattctccaggcactccccactattgtgcttctcacgccatcccagacatctcaagctgacttccctcaatgacaaaactctgtatctgatgtccccacatctttgttttgtttttctaaagctctaccttgctttgtccctaataacaatatagcagggcttttcaaattatgtcatttcattcaacattgttttgttataatattgataagaaaaaagactgattcctggccagggccactgtctgtgtggagcttgcacgttctccccatgtctttgtgggttgtcttcgggtactctggtttcctcccatacttcaaagatgtgcatgttagattcactggtgtgtttaaatggtcacagtctcagtgagtgtcagtgtgtgaatgcaccctgtgatggaatggtgccttatccagggttggttcccacctggtaccctaagctgttgccaaccctgaactggaaataagcaggaaaataattaccttacatgtttaatattaaaagtgttttgatctttatttagatgtttggtgatagttctgtgaccagaaatacggtgtaggaagttgacttttttattttagagagagggtctcactatgttgcctgggctggtctcaaattcctgtgctcaagtgatccttctgtctcagccttccaaagtgctgggattacaggcatgagccaccacgcccagctagaaacttaactcttgtttatatcaattagcttatggtaacattggttttgttatacgttttgcttaaagccatagtttccaagaacatatcaatgactttgaggacttaatgaatactactactaataatataacaattatttgttgaaaatttaccatgtgacagataatatacataatctcagttaatatttacaacaaccctatgaacttttcagaattcttttcagaaccaactctacttgatttaagcagtatattagtcagcttgggttgccataacaaaataccaaagactgggttgcttaaataacagaaatttatttttcacattctgaaggctggaaagtccacaatcaaggcttgacagggtttggtttctggtgaggtccctggcttgcagacagctgccttcttgctgcatcctcacatgaaagagagaggtttctctttctctcttcctcttcctataaagtcttggtcttatctgattagggtcccactcttatgacctcatttaaccttaattacttccaaagatcctacctccagatatagtcacactgggggttaggacttcaacatatgaatggaggagtagagagatgacaaaattcagtccatagcaagtagaaaagaaattggttgaaagaaactagagtagctcataaaatctccaggaagtttaaagtgccagctcagaaaataggcaggagcaaaaggaagtgaggtagccagaatcatagccaaaccatgaccagaaccattctgatgaggaccctgttgctatcactggctgtcagccgctgctgcctcaaaagccaaatgctggtgtccgccaccaccagcagccttggtattcattttccctgcttctgtaagtgccagttcaacaaaccaggcatctgattaagcaagcttaggttacaggtaagcaacctagctgcaagggatgctgggaaagacaagacctgggctattttttagcttctataatggaagcaggccctacatcctaccaagtctcatataatacagaatattctaatcatggggaaaggttcagatgctagatagatgcccctccaaaggacaaccaacacaattataatctcccattacaagtggtaagttaacacttagcatacatatgtaaataattaaaacaatttcatgaaatctcttattatgtgccatgtactccaatattgtgtatatgttctattttacatcactaaaaagttatgatcatgaacaagtaaattgagtttataacctacaggaacatgaatcataatttgaaaaacaaaagactaagattaatgtcagaagaaatgggaaatatttaggaggttatcccattatcagctgagaaaagataagggcatggactgtgacactaaatatgggaataaagctttggaaacagatgtaaaatgcttcaaagaggaaatattgacagattttcctgatgaatgaatgttgtttggggttatagtgagaaaagagtaaaggtaagatccaaaatttctagcccagataaaaacttagtgcttaactaaattaagctctttcactgaaaactgtttgtctaacaaatcttgaaaggccaataataaaaaatgagatgaagtcttagaacaagtagaaagacttggacaggaaagtcaatataaggaaccaggccaaaaaagatcaaattgatatgagactatctggtactattcttttggggaaatataaggtttagaaaagaaagggagaattttgagaaaaataaaattaaccaagggggaaaatagaataggaataaaaagagaagaaaagaaaatctgaaagtaatatttgtttaacattttagcaccctttactgacatatattttaggattttaaaatacttaaatgaatttattaacaataaattatacagagaagatatatggaaaaatcagccttgtgaaactttccccacagatgaattgtataaattcaactggtatgtctatgacttagcaagaaaggaaagaggacaggggccataagctatagatcagtcgtgtagaagttgatcctgagcaaaatgcagaaagagatgatcatatgactggcttttttgcttacctgaattcttcctctaccagactatgagcatcacgaaggaaggagctgtggctttttcttctttatatctcagatgcataccgtatacacaaaggcccagagtgcgcacttaagaaatatgggctgaaccaaattgaactgagctgagcaagttgactaagaacaagccttgtgggtaaaatgtggaaatgtgaactgaaatatacaaacagagttggagacatctgcaacagtttcaaagagttctgatcaatacccactgacaggaaaatctttagtggcctattcctgggctatgtacatgaatggctcctgtttaatatttttaccaaacaattatggaatacccagataatatgcacatcaaatttacaaatgactcagggctgggaggtaaaactaacatactagataactgagtcaggattaaagacaaaaaagctagaatgagagaaccaaacctaacaataacaattttaaaaagtaacagggatcaataaaaagtcttgcagcacaataataacaaacaaattaattgcattagtacaggagagggaaatgtaaaatgactcagactttcaattctcccactatagctgtccagaaagcctaaaatctctccttctaaaatctacttagagattctggataaaatataatacatactccttttaatgcataaatttgcaaaaatgtaaggaaaatatctaaggacccaaaacaaagaagtaaatgaaaatcgaaataaaagcttatgagctaatcctggggcacacataggagtgtgggatggagaaagaaggctgacatcagaaaccagggtcttaggccaatagggagtgggtaatttgaattgaagatggctttataaacctgaagctatcactaataggaatgtcaaagaaacttgcctttctacctgaactatgggtgggaaaagtcttccttcagtatttgtaaacattgactctatccatgtacataattgaggtgtaaatttgtactacccaaatgtcatgcaaatctcaatcacagaaagtaatataaaaagtggtttgaagatgactagccctgaagtagcaggcagaagcaaaaataaatctactctatagtgatgtgcccataaactagcagaacaggactccagtagacaatgtcccaccaaacatgagctcacaatctaaaacaacaaaacccacaagaacacaattccaccataaaagagtcagcaggtataacaaagagtgagtgtagacatacaagagctatcacataagactatataatagacatgtttaaaattattaaatacccaaaataagttataaaaaataataacataacaagacactatgaaacacaaaaacagataggaaaaaaaaatgaccaagtagaacttctaaaaatgaagatatcaccattgaaactttaaaaactcaatataagggttaaatggaagattagacataggtgagaaaaggcttaatgaactagaagaaatatttgaagaaactactcaaaatgcaagaaagagcaataaaaagaaagaaaatatatttttcaaagtctaagggataacactgaatgaaaagaaaaatgtatgtttaatatgagttacagaaataggcactacagagaatggaggaaaggaaatatggaaaaaaaaaaaagactagctgagaattttccagaattggtgacagacatgaatcctcagatttaggaagcacaattagttccaactgggatagataaataaaaataaatccacattgagatgcatcattgagaaaccataaaacacctgcacaaagtaaaactcttttaaaaaatgcaagaaaagacattgcctgaaaaagaccaattagactaaagcagacttctcaaaagcaaaagctaaagagtgatggaatcgttatcttcaacatactgagagaacatgctgtcaaccaagaattccacacccagctaatatgtaaatcaaatgaaataaataatgaaagagttaatcattaatagaccctctctgaataagccatcaaaggatgtacttcaggaagaaggaaactgaaaccagaaagaagtgaaaacaggcaacacttagcaaagaaactaggataacacggggaataagctaaacatgcacagattttttaaataaaataacagtaattactaatgagtcatataaaaacaagatagaattaaaacatttaacaatagagaaaatgggaggtatgtgattaaagtgaatcatatatatcagataagtagcgacattaattttagactttataaagtcaagtatgtttaaaaatttttaacaatagccactaaaagaaaagaaagtacaaaattttcaaataattagcagagaaaacaaataaggaaaagtttgtcagcaaaacaggcagtaggaaaggtgggagaaaaaagaaaaaggcacagaaaaaaaggttaaattgaaaagtaaatatgatagaaatgattgcaaatgttggcaaaccactaaatcgactaaaacttgaataaaagtaaaaatcatccatgtcatttataaagagactcaactaaagcataaggatataagaagcttgaaaataaaaacaaaaaatatatatttttatatatcccacttagtgtaaagattcacacattttattgtgatcatatcaatatgcttgattactgaatgctggcccagatcctttgctggtgttatataatattctgtactgtgggctttagaaaagatatagtagacctataattttgtaaaatagactttaagatataaagaattgttagagataaaatcagtcattacataggataaaagagaggattttcaggaaggtgaaacaattctaaactcataacacaacctccaaatatataaggcataaattgacagaattacaagtagaaatatatgcatctgaaggtttttaacacatctcccttggttcttgataaatcaaacagaaaaaaaattcacatggatatagcaaacctggaccacaaagtcaacaggtttgatccaaatggataaacgtggaatattgcaggaagttttttagttattaaaaagacttcagacaattttatttatttatttatttatttatttatttatttttattttactctaagttttagggtacatgtgcacattgtgcaggttagttacatatgtatacatgtgccatgctggtgcgctgcacccactaatgtgtcatctagcattaggtatatctcccaatgctatccctcccccctcccccgaccccaccacagtccccagagtgtgatattccccttcctgtgtccatgtgatctcattgttcaattcccacctatgagtgagaatatgcggtgtttggttttttgttcttgcgatagtttactgagaatgatggtttccaatttcatccatgtccctacaaaggatatgaactcatcattttttatggctgcatagtattccatggtgtatatgtgccacattttcttaatccagtctatcattgttggacatttgggttggttccaagtctttgctattgtgaatagtgccgcaataaacatacgtgtgcatgtgtctttatagcagcatgatttatgcagccaaaaaacacatgaagaaatgctcatcatcactggccatcagagaaatgcaaatcaaaaccactatgagatatcatctcacaccagttagaatggcaatcattaaaaagtcaggaaacaacaggtgctggagaggatgcggagaaataggaacacttttacactgttggtgggactgtaaactagttcaaccattgtggaagtcagtgtggcgattcctcagggatctagaactagaaataccatttgacccagccatcccattactgggtatatacccaaatgagtataattcagacaattttaaattgactcttggaatcatgtgtcaggtggagagtttggtcaaatgacctctaagatctcaactgactctgggattgtttagtctagtttcaataaatatttcacttacagatttaaaatacaggccaggcttttctttctttcaaaactgggtaaagctctaggatgagttatagcttgaggtataaacctcaacattcccactgtgttccactttgagtttggtgtggggtggggatcaccaatctaaacccaaagaaaacttcatgggtgtagcccaaagggaaccaaatcaaacgaaccaacaattttgcacaaattcccatgagccaaaaccactgaatttcactcagcaacaaagacctatattagaccccctcatcaacttgagccaaattttcctaaacctcagacatatcaggacactgttgagtttgaaagatgaacaaaaggcttgattttaaaagaattaacttgaaactattcaagcttctataacattttggagtctttacaatagaacattttggagtctttaccatggaataaaataactgaagaaataaatcataaaaggccccagtaccctcttccagagagcagtatttcctcctagacattcaccgcagaggaaaataaaaaaatcacatactgatgttcaacaaacaaatgacagcagaattttaaaaggaagaataagttacaaagcacacgttgaaataatatgttgggctaaatttacaactaacatctttgtaaaaacagacttggcccaaacatcaatttgtatacacaattagagttctgttattaaaaacagatgaagacaaaaggaagccatcatttaattggtactaactgtacctacttgtgtggaaaacagtgctgtgtgtactgatacatgaattcacatggccaaatttatgatatctcagtctctttttaaagagtccagttaatctgcttacatcatatcatttttaagggatgcattagggcggtattatcctcactgatgcttaccttaccaccaggggtgagatacctagaaatggaacggtgggggacagggcaaggaagacggaagaaaagttaacagaggagtcatctgtccagtagaattttagatcctttggcttcttctgaaattccctttggcttttgaacatgtcattctctctccatggaatgctatccagaatgtccatgtttctgaattggagatcagccttataatcaatgcatagataatacatggcagggtttcttttcttttctttttttttttttttttttgaggcggagtctcactctgctgcccaggctggagtgcagtggtgcaatctcggctcactgtaacctccacctcctgggttcaagcaattctcttgcctcagcctcccgagtagctgggactacaggtgcatgccaccatgcccggctaattttttgtatttttttagtagagaaggggtttcaccgtgttagccaggatggtctcaatctcctgacctcgtgatccgcccacctcagcctcccaaagtgctgggattacaggcgtgagccaccatgcctggctggcagggtttcttttcttacatggaagctgttataacctaacagtatatcttaaaagttctggcatctcaaataaaacaagtatagttagtttttttgtttgtttattttgaggcagggtctcatgctgttgcccaggctggagtgcagtggcgtgatctcagctcactgcaacctccacttcccgggttgagcaattctcatgcctcagcctcccaagtagctgggattacagcggcacaccaccacacctggctaatttttgtaattttagtagacacaaagtttcgccatgttggccaggctggttttgaactcctgacctcaagtgacccgcccacctcagcctcccaaagtgctgggactacaggcatgagccaccatgcccgggtgtataattagtttttaattcagaaaactatcagcttcttaagagcagacatggcactttaatatttgtcagtaattcctgctgtacccatcatagctctggctttcagtgactatgcactgactggtttagataggccttcaaacaacttagagttcaatacagtaaacaggagaacaccaacagaaaattcactaatgcatatatgaaactgtagaagggaaatgggtcagctacctttctcacagatagatagtagagggagacatgatgggcttatcaatgaagaccttaatctaagaactaaaagagagagaatgcagtttaacaggcagtgaaacaaataccccatgctactctgacaacttgacaaagactagaaataggtggtcattaagccagcagctttgctaaaaaggccagtagaagatgtagtaagtggttataaaagtaaggcaataagctaaggtagctacagaagtggtgctaccattccataaacatgtatttaaaaccctttttgtcccattttattaggtaaaatagggaatagaagaaggactgcaggtggggaatgcaaaagtgaataaaacacagtgcttgtctttagtatggtcagtgtacaggacacaggcagataaatacaattacaatatgataaaggccatgtatcaagtactttgggtacaaggaagagggaataaatgtgtctgtctgagaaagccaataaaagttcttaataaatgacttcaaaaagtaattcaatgctgagaagttgaatctgggcaaataaatacataaaataaaataaaataaaataaaaaataactcaagacatttttatactataacattaaggcaaaattttgatgatccgatttgaacacaatgaccattacaatgaaggaaagatcttcataatataaccaagctgtttccatatttcagaagaatacccaattaaaagcaaaaacaaaaagaccttcacttctctatttacaacaaactgccaacaccaaatagttcactataggaactgtattctgttttgttttgtttcattttctggcccttgttcatgtatattttcatgtataaaaacagcacctgaggatgtagctttttatgctacaaaaagtaggagagaatactatttaccttaatgttttaaaaaaaaactctagaatcttttcttgtcaacaaatcataattgccttttaatttttttctcttcctcaactacccctacttctttcaatactcaaatccttcagccagaaacaaacaaaaaacccaaagccaacattccatgtaaaatatcagggaggctagagaagaggcaggaggttcactagatagatctcacttctcatttcagagtcagaactcttcccttcccaattccacggagaaatggacaataagcagtttcatccttagtttctgtggactggaaatgcaatttctggccctgtgacaaattccgctataacaaagccaatagcatgccccgtggaattcactgtaatgggattttaactgtattggcattatgtacaaatccaaagaaaagcacatcttagggaatgatgaatgtaggaagaactacaggggtatgtagagtttggaaaattcaccatttttttctttcagagaaaaaaaatgctcatcgggggaaatactgaattctgtcaacttactcattccacagatatttatgaatacttactacatatcatgtgtcaggcactggtctcactgctaggaatgcagtaataagaagacagaaaagaaccatgttctcatggaacttatgtatgaatcggggagacagataataaataaacaagaaaaagatcagaaagcataagtactgttatgcatcgctaaacaatagtgatacattctgtgaaatccttcatttggagatttagtccttgtgtgaacatcatagcatgtacttacacaaatctagatggtttagcctacgacacacccaggctatattggcatagactgttgctcctaaggtacaaacatgtgcaggatgttactgtactgaatacagtaggcaactgtaacacagtactaagcatttgtgtctctaaacatatgtaaatatacaaaaggtacagtaaaaatacagtattataatctcatgggataacttttgtatatgtggtctgtcaatgatctaaacgtccttatgcagtgcataatcgaactatgaagagaatgcaaataaaataatgcactacaatgtgactagataatttctttttattttttttgagatggagtcttgctctgttgcccaggctggagtgcagtggcgcaattttggcttactgcaacctccacctcctgggttcaagcgattctcctgcctcagcctcctgagtagctgagattataggtgtgtgccaccatacccagataatttttgtatttttagtagagatggggtttcaccatgttggtcaggctggtctcaaactcctgaccttgtgattcacccacctcagcctcccaaaatgctggggttacaggcatgagccaccgcgccagcgtgactagatatttctaatgcgattgggaggtcagcaaagcctttctgaggagctaacagtaaaactgagatctaagcgataaggaggaaggacacttagagataaggtaacaggccaaagggcaagaacaatcttgtcttattttaggaaacaaaagaaagctgctgagcctgggcaaaggaaaggaaaaggtaggtctgagaggctggtagaggccagatggcagggttttacaaacaaggtatagtctgagttttatgcaaagtttgagagagcctttatagcactttaaacagggggatgattggatatgatctgcatttttaaaagctcattttggctagtgaatggtgactggactataagtggccaagagagtgaagggttagaggattgctgcaaaactgattagggtggcagtaatgaaaatggagacaaattgattgattcgggagatactttagagttcagttgacaggacctgctgaaaggagatgaggaaaagagcaaatcagaatgactggagccatttactaagaaaaggataattgagggaggacagatttggataaagaggatcaagagttccttaaaatataccaacttttagatgttcataaatacccaagtggagatgtcaagaatgtgactagatacagatgtctggagttctggggagagatcagagctagagatacagatttgagaatcaatgacataaagattatattcaaagtcatggaactgaatgagatcataaagagatcaagaagagaagacttagtccaaggttggggccatcagtgttaagggctcatgaaggagaggaggaataggcaaagaagacagaagaacagccgagtgggtaagggaataggatagtgtgtatctgtttgggtcatcctctggaaatctgacaccaagatggaattagatgtacaagagagatataaaagaggaggaagtaggattaggtaatgagaggttcagacctggtgtggatctgacatctgtgaaaggaggcagggatagtaaggattagatacgaagagctcagttctaagaaagacttgacctagtcaaaggagagtttggattcaacattgccaattagaagattctcatgtaatgaaagaatgttccaattctagtatccccatcatgctcagttattgactgggaacactccaaggaagcctggattgtgtttccactgtgttcaatctaggggtatggtagctgaaggctgctagtcagctcttgccctgcagcagatactcatgaagggagacacaggacacttccatagctaccacagtatgatgttatgaaaattaagagtaggccgggtgcaggggctcacgcctgtaatcctagcactttgggaggccaaggcaggtggtttgcttgaagtcaggagttcgagaccagcctgaccaacatggagaaaccccatctctactaaaaatacaaaaattacctgtaatcctaacactctgggaggccaaggtgggtgatcacctgaggttgggagttcgaggccagcctgaccaacatggagaaaccctgtctctactaaaaatacaaaattagctgggcatggtgacacaagcctgtaaccccagccactcgggaggctgaggcaaaagaatcactttgaacccgggaggcggagtttgcagtgagccgagatcacgccattgcactccaacctgggcaacaagagcaaacctctgtctcaaaaaaaaaaaaaaaatacaaaaattagctgggagtggtggcaagtgcctgtaatcccagctactctggaggctgaggcaggagaatcacttgaacctgggggacggaggttgcagtgagctgagattggaccacttcactccagcctgggtgtaagagtgaaactctgtctcgaaaaaaaaaaaaagaaagaaaattaagagtaaacaagtattttaaagaggaggaggaagaaatttagccctgtcaaatgctgcttaaagatcaaataggacaagaatgggcacatgaccatgctttcaggcaacatgagtatcactaatgactctaacaagcaaaagcagtctcagcagggcagagaagacagacagaagcccagttggagagggtccagaaataaatgggaagtgaagtataggcaagaggacagacaactcttttcaggtagtttttgtggaaaaggggagcacagaaatgggaaatagctagaagggatgagagtaaatgaaggtcattgttttattttaagagagcagatactacaatgaactgatgagaatgatctcatagagttggaaaaatcagcgatgctgtggaaagaagaaaactgcaagtgcaatatacttgagatggcaagacaacaaggcctcaggaaacaaatggaggactggcctttggcagagacagtagagctctgactacagtaacaggagggaggccaaggaattaggtgcagatgcaggctggcagatatgacgtgggagaatgaggctgtacttgattggttgggtctatttactcagcgaagtatgaggaagctgaaagtgagagcaagggaagggaatgtaggaagtttgagaagaaccaaattgggaaacagtcatctctgacagtgagaaggtgaacataccagagaagcgtattaggactgtaagtctgcactaagtgcccatttgaaatatgcaggcatgagtctatagtgagttcaatcatttcagttaatattttactccagcaatattcagcagcccagccatagagatagagtaggtggatgatcgagtttaaccagaggggaaattttgctgagtatatgacagaaaaagaaatggaaggcttaaatggtgtttcttgaccacaggtccaaccccacatggggcacagtagttgccagcagacagaactgatggttgaatggtcatagcccctccaaatttccaacgctctagaaaaacttctactcctattttcccctctgtttgggcaatctctttatttacttttcctttgtagcaaattaaactcacagatactgacgtttttaatgaatacaatgcaaaaatctgctgcataaatctacttttgttttaattgatttttaatgactttttttgaaattttattctttcatgatgagggttggattttaaaccatctctgtacgtaaatatatcttcttatttggatggcagatgaaagagccttttgatgaaaataaacaaaagagctcaaaatgacatcttcttcttaagtctttgccaggacaattgaataaatcatattttgtaaggtgtttagcttaatagatctgtctggatttcaaatgtatgtaaaatgcttttttaaacaaaaggcactaccacattgatctttttttggcaatttgccttgaaaaatagatgcaaccagaattaccccttttattttaacaaacctttgaaaatgcacttaaaatttactttctgtaggcaaaaacatttgatagaaaagatgctaattatgccaatcacatggcaaatggaaactttttaataagcagctttctcttatagtcttaaagctacagtttatttcagaataagtcttaaatacaacccaaggtgagtagtttgagaaaatataaatgattgcttgtgttcacagattagattttctggccaaattccctagtttggcagttttagcccatggtaatatcaaatgagattccaggcaagcagagtgaactgcaaagaaaccctggctttctctcataacctaaccccccacattagaaaaaaatgactgtgaacaaatctgtcaaaaccaggaccttcactatagaataaccacccaagacccaaagcataaacaaccactcattctattgtactctttttaacaataagaacacctgaatcattaatgcatgtttttttcttctttgagctcctagaaaccaattgcatttttaaagctagtgtatacctgagactagtataattacaggctaccattctatgacattttaatgatccaaagatcccaaaataaagaacagggctggttttttatttttagtattttagcatgaagaaatgaagctacactttaggaggctgctgtgttggaagaaatttcagctgccaaataagtcatctagaagcagtattctgtagcaacccaggatacctagagtccagaatcaacacactgcagctgcattcaatagcagcgccacaacacaagcccaagaggatggaaaatgtgaccggttacaccacagatgaatatggaagacaatgaacaatgaatactgagtggtgaaagtagggggcagggcagaagaagacacatcccccaacacaaagcagacaacaaaatgacgactacatcagttctgggaaccaacggacaggaccaaaattatgtagaaactaggtcattctgaaaaatgaatactaacgcccaacatcgggctcttaagaaaagaaagaagctaaatttgagcctttgagagttcatattttaaagagaatacttagttgttggcaaagaattgttctctaaaaggtctgaaagtaataagtaaaatttgaacttcttattccttaacatcaaagagtatcattctttcattctttcctgggtaaaagggaaaaaataatcagcatcttttgaagtatgcagatgaaagggctaggtggggaggaatgataatttgggtgatcaaccttatctgtcatcagcatgattaattttaatacattttgttagtataaatattcctaaagcaacaatgtaataactgtgttatacatattatcatacttaggttaaaatcactaggctgcagccagactttctgggctcaaatcctggctttatcacatattagccatgcaacctttgcaggtcattgagtgtagctgtgctgcacttttcttttccacagaatgaggatacttttctagttgagaggattatttaattactccatgtaaagcactatatcaacaaggaccccaataggaaatagatggcatactccattcatagagggtcttgtgacaaagatgtgtgtgtgtatatacaggggaaccacaaagcatagtgctgaaacctgcggctagcagtagatttgttaacccccgtaggcctgaaaggttactggaatccaaaaggagtgagaaagttctacagaataggtggtcttgagaaggaactcatcttcagtctggagaaactgccaatccagggtgaccttgcaggggagaatgcaagggggaaacatattttgagttcactgtcctcccctctgatctcctgctggggtttcccattggctgaccccactgggaggccagagggcaggaggcaggttactgagcccacacaggtcagcctaccaggacagacagcagatggagaagggaagacaggagatctcttcatggcagggcaaatgaagagatcccactcaagcacttcactgtactgggaaacacctgatgactacacatcttacttttgccaaatatatatcgctgtaatgaatgtaattacatcatattaatcagtaccagttgtgaggataaatgcaccgagatagaagttcacatgaatagaaccctattttcatttgatagatatcggccaggaactcattgtttattcaatatattgtggcccaggagaaaagaatgagaaaagaagtaccacaggaacgagtagtagcctttctcagatttcccaagaagctgccacagcatttgtaatcaagccaaacccataaaaagaagtgtggtaaggtacacctctgagacatattccccagagccttgggcttgtgcaataaaaacaaatggagagtcatgaggaggaagtggagaactgtatacaatctggctttttatttattgtgaataaagatgatctaagtctgaaggatattcactgtagaaaattcttagaaatagcaacctgcaatccactttcttagctcaacacttagaaatataatgtaaatccagcctgggtagcatagtgagactccatctctatgaaaaataaaaagttagcccagtgtgtgccaccacatctggataattttttatttgtagtcccagttatttgggaggctaaagtgggaggatcactgaagcccaggagttcgaggctgcagtgaactatgattgcatcactgcactctagcctggtgacagtgtgagacgctgtctgcaaaaaaaagagaaaagacaaggaaagaaaagaaaagagaaaagaaatataacaaatatgaaaatatattagttgatttgagatttgatttaaaaatgcaaaatgcagctgggtgcggtgactcatgcctgaaatcccagcactttgggaggtgagattgcttgaacccaggagtttcaggcaagcctgggcaacatagtgaaaccctgtctctacaacaaatatgaaaattagctgagtgtggtggtgcgtgcctgtggtcccagctacttagaaggctgatgtgggaggatcgcctgagcgtggggaggctgaggctgcaatgagccctggtcacaccactgcactccagcctgggtgacagggtaagaaactttctcaaaaaatagtaataataataataataataaataaaaatgcaaaatgcaagcattaaacatcaggtcagtcatgaattctgctgtcatataatttattttttgtttttcttttttttcagagggccagggtctcactctgtcacccaggcccgtgcagtggcacaaacatggctcactgcatcactgcagccttgacctcctggactcaagggatcctccccactcagcctcccaagtaactggacccacaggcatacacctccatgctaagctaatttttaaaatttttgtagagaccatgtcttgctatgttgcccaggctggtcttaaactcctgggctcaggcaatctttccacctcagcctccaaaagtgccggaattaaaaacttcaggtgtcaaccatcgcacccagtcagtacaggttaacaataatgtacatttcagtatatatttggttatgaagccaaacataatgaaaggtgccattttaaattttatttaaaaatcacatttttaattatctaattaattcaaatacaagaaagtgtgtgtcatttgctaaatagggaaaagtcaaaacatttcttgctatttatataatgtgaatattattacattttattaggataaactatataatgtaacatttactaatacagtgatataaactaaaataatgcttccttttatctgtatgccaaatgattacataatttaaaacttcccgaagggagttttcaataatatattatagtgaaagagtgagagtatcggaaagggtggtaggcactgatgcaaagtaacgatgtcaatggcactagggaaataggaagaggacaattctggaaagttcctgcatatgagtccttgaataaggaacttatacttcattctgcagacaatagtaagtcactgaaggagggaaagagtagaattggtacaatatttctgaatgattaaccaggcagtgcaagatggcctggacagggagtgtctagagcaggaggctgggtgggcaagtgggtgggcagaaacctgaatgagggcagtgtagggaacagacaagcagggacagacaggagggagaaggggaaggggaagtaaagatgaggagggaaggagggaaagatccccctgcggaagaagaatgaacaggaattgttattgtccaggacaagagtaaaggaggactcaaggtaacctaggagtgtcaagcataataaacactgctgtgccaccaacaggagacagctcaagaagagtggccaatgggggactgcaggtaagctgagaaaccagcaaggggagaacagagcaggatccagatggaaatggctgcaggcagaggaaaatgcagccacagaagagtgtcctctgcgtagttcagtgcactgatggagatgtgaacttcagcaaaggaaatttacagacaaggttgcaggcataagggttttacatagggttgtccaataaaatacagttaaatttgaatttcagagaaacaatgaataattttatgggtatgacccatgcaacatttgggacatatttatactaaaaacgtgttcaccatttatctgaaattcacatttaactgggagtcctatatttttcattttctaaatctggcaaccctggttggaactgaattaggagataaacttctgaaaaaagcaaacttagctggaaacaaagctccatgtagtaaggatagtaaagagaaatatttctgagagaagagtaaaggaagaaaggctaagaaaaaagatacacgcatttgaggtagcagaaacggaaaagctcccttatgataacctttctcaaaacaagtcagtgtcgaaaatgctcagtgtggagttaaattaagagcctaagggcaagtgaatatataaaaacttctgctcacttttgtaagttatatttcttggaggaaggctaaagaccttgaagttcctttcaaccctaggtttctgtgactcaagcttttcatgtataaatgtttcaatatttttggctacataattttttatattattagaatttctatgtatgaaaacagaactgtgttatttaatgtagccatataaatgacaatcttataaagattgcttggtggtgattccattaataaaaagcaaaatgactatttaagtttttatgagaaaaacatgtttacataagtaaaaggcatcattaagagaaaagctattgttagaagaaaatattagcatcaaatggaacaatgaaaatctgtcagtttaaaacatatcactttggcggaaaaatactacataactgcactggtgcctcatcctgaagaccttgggaactgcagacttgctgggttgatccagttcctgtaggactgagatagaaaatgagatatgaattctcacttcttacagtcaccgtgtaacaccgtggccaatttaacagaatacaggatacatttctattaaaaaacaaaaacaaaccaaaaggaacaaatcaagactaacgtgttaattaacaatacaagggaaaacatttggaagatactactccagataaaaacatagatttcttcacctgaacgtgggaggcggaggttgcagtgagctgagatctcgccactgcactgcagcctggcaacagagcgagactccgtttcaaaacaaaaacaaaaacatagattcttcagcattcaggaaataactctttactgtgtacagaaaaaacgtaaatcatcatcctcagaacatctcaacctggtcaataaagaacttgcaaacaaacctgtctcccctgccctgattcttctcatttttatcttccaatattttggtagagcaagaaaccaacaaaagctcaaacttaaaactaaagaaaatcagcttgtctgtactcacttttaaacaatcacctaactttccccaaagtaaatattgctattcttttcataacatgatggtcacatggagacactgtgcagtctggttttgtttgaggtcactataatagatattcagaatcacgcacaggaagaattacattgtggaagctttgcactcacttgttgctggtacttctaatcttaggttgacaacatcaggtaagttgccaagtacttcctcaataagctaaaactgtgatagaatgatggttatatcattgagatacttctgaacctccattcattacttattttgtcaagtaatttctaaggagaaacatttttaccatacctatactttgataaatttactgatggttaattaataaacaaccctattgtactcttactcgtccttaaaggatttgcaatacatgagatgaaacagaagagttatcctccatatttttttttcattagagaagagtatactgtacttaatataaaaaagcctcacttttaaaagtcatatagcaatgcacctgctagttaggatagaaatgaagtagcctctcagcatcaaaaatataactatcataaacaactctcacctatcaattccctcagggaagaatggattcacttaggtggtaatgaaagggcatgactcagtagtggtcacacatggaactggcgtacagctgcgctgcccagatcaatgtacgcatatgcccctgggaggttggtactatgagaatatcctccaggagccactttgttttagctcgtctgactgaggccttaaacaaggaaaggaagagagctgttaagggcaccacagtagcacaaatccagagatattaagactttcctaactcaagtcacaaggtcttccagctcaataactaatgcttgatgcatatcttaggagataaagtgtgagggagagatgcctggctgcctcccagtagttattctctccttctctagtaacaaaaccccagattttaattgggtacactgtcacccaactaaaagaattacatttccctgagtcacttacagcttggtattgccatgtgactaagttatggctaatgagctctatgtggtgtgtgtaactgtcaataattatctttaaaaaggtcctcagggactactatgaacatctctatgcacataaactagaaaatctagagaaaatagataaatcctagaaacacacaatctcccaagactgaaacaggaagaaacagaaatcttgaaaagaccaataatgagttccaaaatggaatcagtaataaaaaaaaaatctaccaaccaaaagagtcctgagccagaaggatttatagcagaattctaccagatgtacaaagaagagctggtaccatttctactaaaactattccaaaaaattgaggaggaatgactccttcctaactcattctacaaaaccagcatcatcctgataccaaaatctggcaaagacacaacaaaaaagaaaactataagccaatatccctgaagaacatagatgcaaaaatcctcaagaaaataccagcaaaccaaatccagcagtacatctaaaagttaattcaccatgatcagttggatcttattcctgggatgcaaagatgattcaacatacacaaatcaataaatgtgattcaccaagtagaattaaaaacaaaaaccatatgatcatctcaatagatatggaaaaagcatccaataaaatccaacatcccttcatggtaaaaaaaaaaaccctcaacaaatgaggcatcaaaagaatacctcaaaataataaaagccatctatgacaaacccacagccaacatcatactgaatgggcaaaaggtggaagcattccccttaagaactgcaacaaggcaaggatgtccactctcaccactcctgctcaacataggactggaagtcccacccagaacagtcaggcaaaagaaagaaataaaaggcgtccaaacagaaaaagaagaagtcaaattatttcttcactgatgatatgtttctatacctagaaaaccttaaggattctgccgaaagtctcctagacctgataaatgacttcagcaaagtctcagaatacataaatcaatatacaaaaatcactatcatttctgtacaccaataacattcaagctgagaaccaaatcaagaatgcaatcccatttataatagccacacacaccaaaaaaatacctagcactagatttagccaaggaggtaagatctctacaagaagaatgacaagacactgctgaaagaaatcataggtgatacaaacaaatggaaaagtattctatgttcatggattgtaagaatcaatattaccaaaatgtccatactgcccaaagcaatcaaataattcaacacttttcctatcaaattaccaacatcatttttcacagatttagaaaaaaactatcctaaaattcatatggaaccaaaaaaaagctcaaagagtcaaaacaatcctaagcaaaaagaataaagccagaggtatcacattacccaacttcaaattatactacaaggctacagtaatcaaaaaagcatagtactattacaaaaacagacacacaggccaatggaatacaatagacactcctgaaataaagctgcacatctacaaccaactgatttttggcaaagttaacaaaaataaacaatggggaaaggataccctattgaataaatggtgctgggaaaactggctaaccatatgaaaaagaatcaaactggacccctacctctcaccatatacaaaaattaactcagtagactaaaaacttaaatgaaaggcctcaaatgataaaatttctgaaagaaaacctaggaaatacccttctagacactggcttaggcaaggaatttataacttaagttctcaagagcaaatgcaacaaaaacaaaaattgacgattgaactaaagagcttctgcaaagcaaaagaaactatcaacagggcaaacagacaacctacagagtggaagaaaatatttgtaaactatgcatctgataaaggactaatatccagaatctataaggaacttaaagaaatcaataagaaaaacacaaacaaccacattgaaaagtggacaaagaacaaacacttctcaaaagaagatatacaaatgggcaaccaagataaaaaatgctcaacattactaatcatcagagtgatgcaaaccaaaactacaataggataccatctcacaccagtcagaattgctattattaaaaagtcagaaaataacagatgtcaaggttgcagagaaaagggaatctttctacactgttcatgggaatgcaaattacttcagcccctgtggaaagcaatttggagatttctcaaagaactaaaaatagaatgacctttagacccagaaaacccaatactgggtatatactcaaaagaaaacaaatcattctaccaaaaagacacccacactcgtattctcatcacaacactattcacaatggcaaagacatggaatcaacacaggtgcccatcaacggtggactggataaagaaaatgtggtatatatacaccatggaataccacacagccataaaaaagaatgaaatcatgtcctttgcagcagcattatcctaagtgagttaacacagaaacagaaaatcaaatgccacatgttctcacgtgtaagtgggagctaggcattgggtatacaaagacacaaagatgggaacaataagcactggggattccaaaaagggggagtggaggggaggaaggaggaagaggaacaagagttgaaaatctacctgttgggtactatgttcactgcttgggcaatggaattattagaagcccaaacctcagaaccacgtaatatacccatgttatacacccgcacatgtacccctgaatctaaaatttaaaaataatagtactaaacattctctttaaaaatgaggggctccaaacttcttctcccactttttccttcctgttgcctagaaggtgcataattgagctggagttcaagcggccatcctgtgtcacaagctgatgtgataaagatggtgcaacggcaagggagaaggagcttgagtccctagtgaccagaaagctgccaatacagccttggactgcctacctgcaggtttcttgtatgtgaaatagtaagtggttatgactttaagtcactattgtcttaagtttttcttcactgatgaatctacacctcacagatttcaactagaatgtgtgtgtgtgtgtacagtatataatatataaatatatatattataaaacagctaacataaactaggctcctactaggtgtcaggctgtaaatactttgagatattgtgtatgtctgtgtatctcaaagtttgtgtgtgtgtgtacagtgtaaatactggacacacacacacacacatctcaaagtattcacagcctgaaacatagtaggaacctcatacatgttagctcttttttaaatctagtataactacaatcaactcaaaatgtataggtatctgtaaacctcccatggttagacagatggcagaattagaaaaaaaaaattgttagatgccacaggtacagccaaaatgtgaacaagccctactcttttttattttctatagtcatctctaaaagtcctcaagcctgaaatatctcctaggtatcttctaattgatttgggtttgtttacttttcctattaacccaaagcggaggtttatctgccaagtttgttttcttatctctcttctctggcatcaccaacttctgtcctttggtgaaacctctccctatttccaaatggtgcagataggactgacaatcaggttgaggaagccaaggtaatcagagtgctccatgcctctagtgacagtgattggtctggggatggggatgtgactccagaatcctcatatggaaattctactgaagctagtagaaaggacaatgtcctgtcttaagggtcgtggttcataagcctatcaggttggtgctgtcggccacatggaggaaactgagactgaagtcaacatatttttagacttcccagttatgtaagccaataaattcccttttgcagggggtttccatctcttgtcattgaaaaagatctcaagactaatattagactaaccatttttctttatcctttcttttttttttttttcttttgagacagagtcttgctctctttgccaggctgcagtgcagtggcatgatctccactcactgtgacctccgcctcccaggttcaagtgattctcctgcctcagcctcccaagtagctggcatcacaggcacacaccaccacacttggctaatcttttttttgtatttttggtagagatggggtttctttgtgttggccaggttggtctcaaactcctgacctcaggtgatccacctgcctcggcctcccaaagtgctgggattacaggcatgagccaccgtgcccggcctagactgatcatttttctatgtgacctaacaagttcactggcatattaaggataaaacagattgggaaactacagcatcaacaacttttcagtgtctatcttaatatctccttagcaccttacattgtttactcatataatattactcatataattattaatatcacatggaaattgggaaatctttgcagcatgacttcatctaatatagatatgagactattgccatgattttcatccttctaattatttttcaagaagctaattcagtttttacatatcaacatttagaaaatgactttggcttgctacttaaatgttacattattcttgtggcttccttggaaatccagattttcatgtactgatagaaatacttcctctaccagatacataaacacagcatagcagctttcagcacaatttctctcattaaagaagcaattccattttttaaaaagaatcatacaaaagaagtttgttattttatttaaaaaggatactgcctagttgtaacattaaacctgatttttgtctcagtaagaagaaaatgtggtgttcttatgataaagtaaacacaacttaaattataagaaaaagaaatattgattgccaaagattctagtgcttgagagtgaatacaagttagtaaacatacatttaaatctcgacagagccatagatgaagaatattttatttatgaataagaataattcctgacacaattggctaggcaccgaaactcagagtgaaaacacagacactcccaagtgaaaatatactgtacttctattatcatttagattgaggcaaaatagggtttcctaagaaataaatattcttaacaagcaaataaagaattcagccattgggattttcttattttacaactgttttagcttttataacaaagtttttagcactctgaaagctttttatggctctaaatatgctacaattacatgaacaacactatttaattagcacacattcagtgcatggctctataatgggaattttcattaattaaaatcaatggaaatacaaaagcagtagctgtaaacaatttgaggaatcaagaatctaatttgcctattgcacaacaaggaaaaacaccttgcagttatgtgaataattttggcttgcgtagcagctgcatgtctaactggtagtttcaggcttcattccacacatatttactgggtatttactatgggctggcactattatatgtgattgggaatcattagtgaagaaaacaaaaagatccctgtacttgtgaagcttgcattctagcagaggagataggtaatgtacaataacacagcacataagtaaattatatattagaagatgataagtgctatgaaaaaaaaaatgtggcatcaggtaggggagtgaggaatgccatggtggttggggcagagatgggctgcagtttttagtagcctggtcagaatgggcctcactaagaaggtatcatttgaacaaagactttaaagaggtgacagtgtgagctatctgggtatgtggggaaagagcattccagacacagaaaacagccagggcaagagcctttaaggctagaggtttccggaatgttaaaagctgaagcagagtaagcaaaagggagaatattagaaaaacaaaacaaaactataaggtaaggtcccctttgtttacaagggggaagtggatcatggaagctggcctttttggcagggctggctaaactattgtggagcccagtgcacaatgaaaatgcagggccccttgttgaaaaagtagaggaaaagtgctgttaaaggtaccaaaatataaaactttttcccttaaaaacattttagtatttgtaatatagggataacataattagaggaataataataaatgagtaagggataaatttccaaattgcaaaaatataatatgttgatgctataattttatacaatataaaacaataatactttattaatatatcttgactgatcacacaaatttcctcgcttacttttctacatattcatttatttgatcattgaagtttatatttttagcaacttcattttcaatggatataattgaaagcaatgtcaattatttttgatacattccagctcacaaatcattttttctgattttcatttttattttttagctttttaatttttgtgggtccatagtaggtgtaaatatttaaggcgatacatatggctatacagccatgcaatgcataatgatcacatcatgaagaatgggcatacatcccctcaagcatttatcctttgtattacaaataatccaattacactcatttaattattttaaaatgtacacttaagttattattgactatagtcaccctgttgtgctattcaatagtaggtcttattcattctttctataaggtttgctaacttttaatttggagaaagatctttcagttgatctcagttatcactagagctaagagtattttataaactgtgacaacattaaggtaaatttctgtaaattacttcgaaatgtaagttttagtatgttcaagctgatgatccttgcaaactaatttttctaaaaagatttaaccctacatgcaagtcagtttcatggaagtttgaattttgttttaaatgtaaatatatacaatgcattttaatgtttcctatgatatttcctgtcacttgtggaggttgaacaagaaactgaaagaagcttcatggtaagttcataattcaaaacacctgcttatgcattccctcactgtatctactattacaagaaaaaaattaacttcaaaattgtcttccttattaataattggttcatctgaagtttcacatgaaaatggtatccataattttaattttttttttttttgagttggaatcttgttctgtcacccaggctggagtgcagtggcacgatctcggctcactgcaacctctgcctcccagttcaagccattctcatacctcaacctcccgagtagctgggactacaggcacatgccaccacacccagctaacttttgtattttttagtagagacagggccaagctggtcttgaactcctgacctcaggtgatctgcctgcctcagcctcccaaagtgctgggattagaggtgtgagccaccgcacctagcctttaaatttaatttttatttctaagcctgtagatatttgccttacaaagttgcagcagttttcaaaactggtaattctaaattctgaagaattctaacaacttcttgatatgttttattgcgatgttaacatgcacactttaattttgtaataatttactgattaagtttgctgcctgagctccaaaagtttctgttcagacactcaggacaaagagattggctctggtacctatgggatagccacctcctaggcaagtcctggtccagcccccacgggaagccctgctctggcatggccacactgccacttctgctcatgctgtcacagctgctaccaccaatctgggtccaggttccaggatatcctcctgctggggtccccatggtatcctggactgctctgaggtgtatacagcgggccaaatgctattgcgtggatgctgctctgtgcccgagcctgcctgcgcacaaactgctgctggagcataacaacttgcgtgtgctgctgctccacagatctcccctgttcaggtttatgctttgttgtctcacaggacttcacttacaaaacatacgttcaaagataaaattgttaagaatttcaagacagcaaccgctgagcattaaaacaaatggactgcacgaggcccaggcctaggaagccagagttccttctaggccatcacaaggagctggctttttctctgagtgaaatatggagccactgaagggttctgagcagagaagtaacatcatatccttcacctgcagtcactagtgaagaatattggttttgcatttcacactagagactaggctcaataaaatcctctgattcaagcattaaacttcatttacacaactattattttgcttttggacattcaatatgaactcaaaaggaatttctcaatctttactcaggtcaacaaatttggtatacacaaaatagatcaagtctacttataaaatgtggccctgatttaattagatgcttctgatataatgaataaaaaccaacaagaaggaaggtaattgtaagaatatgagggcatgtggaaatgggaatttcctccagacttccagatctcttaggacccttctccttgtttacctttgtctagtatagcctctgctgattcctaactgtcatctccttgtccatagtgatccttccagactctcattctctctacctgaatgcctttcagcttctgttcctggtaatagcctgatttgtccagattttcccagttcacaccgccaagagtgatagtctgatggccccagctcatttctatttgggcaatgcttctagcccctagattgacctcctataccataagcaggcagcctttgttttgctgcccttgactcagattccttcggccatggctgcagacgacagtgtcacaggatcacaacatagttccactggaaactgggtagaacatttttccttatcaaaagctgtgaggactgtaagtatggcaatgacataattggatgcttgcccaatatgtctctcacacaacttaatatctttcatttcagtgtattgctgtgcctgaaattggactaattttggtaaacaaaaatctttttctccaggctggtcttgaattcctgggctcaaacgatcctcccacctcagcctcccgaagtggtggaattgtaggcatgagccaccaaggcagtcaggatctttctgttaataacacaaattcctttaagaaagttagacttatttgcagtgcttgatatacagctgacactcagtaaatattagcagaatgaatgtcaaatgaagtttcatatatctaatttaattattttcctctgagaacggctacactgaatgaagaaattttataaacaaaaggaagaaatgtcatttgcatgcaaaaatttgacagagcatgggagttggatgcagtaggtaaagtacttgggcatctggagcacaggagaaaaaactcaggaggtgagcagtaaaagggaaagttgcctttcatttcccaactccaccccacccccatttccaccccccggccaccaagacaaaatccaccaaccccccacccccactcccggccaccaagacaaaacaaacatctcaattttgcctatttgtcatggccacaaggaaagagttaacactgttgactgctactgaaaggtaaaatgggatgaagactgaacaaagcccactgattcagtgacatgaacatcattagtgaatttagcaaggatgatttcaatgaaattgaatgaaacacataaatgctgggtgtgataaagcaatttaagaaacaaaagactatgaaaggaagatctattctagtttcagctccacaacctaattactgggtaaccccgcagaaaccaattaaatgctcagggtcccgtttttcatctaaaatgggaataataatatctatcaacccatagggtcattataaaaattaggtgagataatatacgtgaaactgctcttatattggcaaagctttatataaaataatatatattcttagtgttatcaattaataagtaaatttgttcctattatttagcaagaattacactaaaaattctgaccagaaacacatggcctagtataaaagtaaggctcaaattcactgacaatgatagaaactctgctaaaagtgctctgctccaagtaaaggaacttttaaatgaagatatttagatctgcaagtgataaagcacgagataaatttactgctgtatattctccaaccattctaacaacatattttcagtatgattttgcttttgccagtcaattataaagtcaaataactatagtaaaaatcttgccagttgtaatcaatcactacacatttgtataggaaggattttccagaacaccttgcttcctacttgtgttctttctatatctctcttttggaggctatcaaggtgagaaataataactagaaatatctttggtttatttgtaagtgtatcctcaagtcctgaattgaagatctgatataaaattgcaaactttttggtgcctcgggagaaaccaaatctaaaaagagttaagggggaaaaaaatcatacagaaaaacattcataacttggtaaaattctgaattgggatgaaaatccttttctataaaaatgtcagtggggagccaaaaatggatgatagctaatactcattgagcatgcactatgtacttactgagcaatcacatatactggggcatgtgattttcacgtacagctcattggattgtcatggcaaatgaggtagatattacagtatcattttccccacttaaagataaaaagctggttcaggccaggcgcgttggctcatgcctgtaatcccagcactttgggaggccaaagcaggtggatcacctgaggtcaggagttcaagactagcttggccaacatggtaaaaccctgtctctactaaaaatacaaaattagcagggtggggtggcacatgcctgtaatcccagctacttgggagactgaggcaggagaactgcttgaagctgggtggcagaggttgcagtgagccaagatcgtgccaccgcactccagcctgggtgacagagagaaactccgtctttaaaaaaaaaaaagcaaagctagaacagagaaagatgaaataacttgcccaaggacatagagctaataagtattaaagttgggatctgaactgcacttatatggctccaaagtccctgctcttagtcaatgtgttatatggtctcccccaattatatctttagagaaaatgttcagctttctgaaaataatctgttaagcacctaacttagtctaaatagtttcagatttctcttaacttgtaacgttcctgtgaatgttaactatagtgctttaaatcaagagtgggtcccttctgagcatggggccctgtgttatgacataggtctcatgtatatgaagccggttctggctttaggataaggtgctttaatttattttagaaataagtgggaggtaaattataaacaaacaaataccaatttcggaattgtaaagtcgtttagagcacatcttggatctctgaggaagatactaacaacaaataccactggtatcatctgtccctatctgcatcaccccacagcctagctgtaggcctaggtgagtgaatctcaaaccttagtgtgcatcagaatcacctggagggcttgttaaactacagatagttctgattcaataggtctgggtgaggcctgagaatgtgcatttctaacaagtgcccaggtaacattgatgctgctgggttacggaccacactttgagaaccactggcctagacaaaagagcaggtgtctatatagcgtgattttagtcattgaaaagatctctgtccaaaaagtacttcaggaaggaaacagaaataaaactcactttataagaaataaagcccatcactgtgcatttaagcaataaagggaaggctgacaggtgctaaaggatcatcctctatctgccaattctcttcctcaacaaatactcagagtatctaatagacacctgacactattctaggagccaggaacactacagtgaacaaaggtaaagaggagaccttgcctccatgaagtttaattcacacacaggtgaggctcaaagtgccatgatgtgaacaccccagaagcagccttcaaccaataatgggcaggagtggtcaagtaccctggcttctttgccccttgggtgggacaactctgagacatgttcctaacagttccccagtgggtaccagtagaaataagtcccagttgcttacagtggtaacctgctccttaaaggaccctaccttcctttccttcgctttctcacttccctactgcactcctggtgcttcctgaactcacctcccaaacaaattactttccctggaatcctagcctcaggatctgcttctggtggcaccagcttaagagatgtctcttcatgctgcagaatcagtgcatctccgatccactggttcgtctcttttattatcttaggaaacccccaactaactttttaatccaagtaacgctttttattttaccgctgacccagtaattttcaccccttgcatatacaatattctgtcaaggaatcctacttcttacaatcaaatagcttcatgcaactcttatgcttttttttctgtaggtattttatcaaaaattatgaataacttgtagttattattgcaaaaatgatagtatgcaatttcttgatcaattattcttaagaagagaaaccgagatttaggctcactttttacctacagtaataaaatctgtgtttgaaatgtgcatctttaatacattctatactggttacatcaactgctgttgttttattcacattcaacagctgtaggtagaatgggaatattatccccttccttgttaagtccttgatggagcttgtcaaggtcatcatcttgtataattacatggctttaagctgatatgttagtgtccctgtttttaatcataagaccatgttctcagttgaaaatgtaattttaaaattgtcacacttaaaagtttagatttaagtataattgtaaagtcacaaaagccagaaatgtgatgtcatcaggaaattcagcatagcagcaagtaaagccaagtgcaggtacatgtttataaacaacgcatctggcaaagtgcaactgtggccagaagttgaacagatttagggaacaggcaatgagtttttgtacaattcagtggtgaataacgtttcctgtaaacttggaaaaaaaacaaaatgtcactggtgtttttgtgaatttcagatgggattagctttattgaatcccctgggggagaagttccagtgcaataactgagattgcctaatttacagaatagaagaatatcacagaacaaatgtcactaaaatttttataactgaggattttcttactgctttattttgaaataatgataaatttacaggaagtcataaagagagtatagaatagttctctggaccccatttgccccagtggttacatattgcataactgtagtacattttcaaaaccaggaaattgacattggtagaatgtatgtgtatagttctatgccgttttctcacatgtgtagaattaagcaatcaccactgccatcaaaatacagaactattctatcactatagaaatctactggtgttaacattttaccagtttgaatgaagtgtagaaaccttacttcccttagggcccccttctctttaaaacacataggggtggagtcacgggtttttccatggtatctggacggagtaaggcaactagtatctacaagttttctgtcttgctaggctgccagtcccctggccctcttgctagagacagtagactcttcttgaggattttgtctgagcccactggtgtttctgggtgtctggtttctccagcatccaatctgggcagggtggttaagtgtccccgctctgtgcagatatatgaggggaaaaatccaaggggattcaccattctgtcacttctcaggtcctgaggtctctagctaggctatcttctcttcaactttcagagtcatgtttctttgtatatgacgtccagagtctttagctgtacttagtaaggggaatagagagaagtgtgtctactctatcttggtctggaaccagaggtcactaagcatgttttttgagtggcaaagaaattaaagatttctaattttttcatcccttacattgaatagggcactgacgcttgtaaagcacattgtttcttttcatctttaaaacaaccttgtaaacttggtgttattagcatcccctttctcagaagggataactgattcagaagtgatatgtctgattcagagtcacatagggagttagtcacagggctagggccagaattggattatttgacttgatgccaaatattttgagccagaaaaggtaaaaccatgagtacacagaagtgaataactaagatttttttaatcctcttttgtgagcctttttctccctattctgtcctccttgtcttgaaagagcaggatctcttctctggttggattagcagaactgggtgtgctaggcaacccacggcattatcagcaaagcctgtttcctaaagagcaacaggcaaaagtcctgctgggcaatgaccttggcacaactgagagtgtggtactgccccctgccatgagaaaatcccctgcatcaagccttggcctcccacccagcaagagctcatgtgcaaaagttgtcaagcacatccttctccaaacctgagagggtagcgtccctttacagtaagaagagagtgaaggaaaagagaaatcttcttactataaattgaaaggctgctcctgataatgttcatcactggtgaaatcaaaggttaaccagtggtggctcataatgactaatagctttccaaaagccaacctcattggccttattgtagtgtaggtgccttagctgttcagcaccagctactgggactgtgtcatagcatagccagtcctcctgccagtgcacattctattcattttggtcaaaccatcatgctcttacaaaacattgaatttccaaatttttgcaaaattactcactgcacataaagtaaatttcctacaccccaagcttttaggtaaaacatagattggctctattagaaaactggaattctgcaaacttgcagatgtgtgctaagacctcacaaatgtctagacttcatagttttcctccctaagtctttgaatgaaatgggcactcaaggataatgtactatttttgcttgaagcttcaggtattctctgatagcctaccacatattccagagattgatgcacttcagtttgagaagcacaacactagataaaaaaaaaaaaacaaataaaacaagacgctcttttgtatactgcaataccatagacatttgtagacttcttaaatcttacctttataaaaaaattcatccagaaattaatgagcaaaattcagatgacaaaaggcagttttgacaatgttactaatcaacccaaatagatttcaaagacacctgagattagaagaggcatcatgatgaagcacttcctagtggaaatgtactaaataataaataaccacaaagattattttactttatttccaataatacaaagttcaagctttactatttctccccatacatgcagtcctatacagctttggtccctgccatttttggcaccagggactggttttgtggaagacaatttttccaccaaataattgtgtgttgtcggagggatggttttgggatgaaactgttccgccccagatcatcaggcattagttagattctcataaggagtgtgtaacctagattgctcgcatgcacagttcacaatagggtttgtgctcctatgaggatctaatgccgcagctgatctgacaggaggtggagctcaggcagtaatgctccctccaccagcactcacctcctactgtgtggcccagttcctaacaggccacagactggtaccggtgcatggcctggggctttggggacccctgctacatagtcatgcacataatatcactggtttggacgaagtagaaaagatgtctaaattggtgagattcctgaattacagaattttggacagaaatgtgattagttttatttagccttaattgcatacagtaaccagaattaagttaccatgtgttaacccagtagaataactttaaagggctagtttaaagtggtcagattttatgttgggaatgtgttcttgaaggctaatcttcactaggaatagcggacatttctgtttaatatctgaagtggtatagtgtctattcaaaggcctgccaaattatgtaattcttaaaaatttgattttcaatgtatggggatacattactttaaatattgtgcataaatgacactttattttatcagtattttatgttttaccatttcaaagtcatacaatttgcataaaatataaacatcctgtatacagcatatttaaagtcaatgaaaaaagtgattccctccccaggctcttaaataagtcaatttgcttaacaacactctcctacagagatgaatgagaagaaaatgtgaatctgcccccaactgtctattcactggtgcagtacatgtttctgcagaggagaagcttggattagggacagtaagatactcctagcaccctggaggaaagagggcctcacgcctagcaaataaacacaccatgccctcagcacatgccatcccttccccatagacacatgggtaggccacagtgaacagaaacagcatgctcaaacagacaaacgcattctcaaatgacagggataagcccacctctaagaatcaccagtatctgagggaaatctgcaccaggaaagcgaggcaccaaactcatcagaagaacatgcacataaagaaaaagaagacagaaaaaaaaaaaaacccagtgtttcaaaagatcattatcttcagagggaaagggaggataccacattcacaagcaagaatagactttttcatttcctagaaatgaaaaataatagcaaaaattaaaaaatttagagggataaagaagaattcaccactgaaaagcaaattaccatgctggaagtctgtgctgacaaattcttgcagaactcagaaccacagggcaaagagaggagaactatgaatgggaagttgtaatatttgaaggataggactgcaaggtccagaaataaagaatagatatgttagaggtaagaaaattatttaggaggccgaggtgggaggatcgcctgagcccaggagtttgagaccagtctgagaccccatctctataaaaaattcaaaaaattagccgagtgtggtagcatgcatgtgtaatttcaactactcgggaggccttgaggcaggaggatcgtttaagtccagcagatcaaggctgcagtgagctgtgatcatgccactgcactccagcctgggcaaaagagtgagactatgtctcaaaaactaaaaattaaaaaattaaataataaataaataaataaaaatgagatcactttaaaaaaaaaagaaagaattttttttaattaccaaagaaatggtccatgtgatgacccttgaatctgagttttcagattgaaatagctgactgagagataagaatacatgaaaaaaaaatccttacctagactcattaatatcaaatttcataaaaacaaaaaaagaaaaaaatcctaaaaacacctggaaagtaaaaaaaaaaaaaaaaaaaagtatgtctaaaaagaaataagaatcagattggcatggacatcttttcaacaaccctgtatgcaaagagacaatgaagcagtatcttcacagtttggagaggaaagaactattaacacagagtgctatacccagtcaaatggctgggtatagcagcctcaacctgctgggcttaagtgatcctcccacccgaacctcctgagtagttggaactataggcatgcaccaccatgcccagctgatttttaaaattatttacagagacaaaaatctcactatgttgcccaggctggtcttgaactcctgggctcatttaactgtgaagggaaaggaaagacttcagaaagttccccagtcctgaattttttctaagaggttattagaggatgattaccaaaaggaatctaagaattagacatgaatacaagaaacagtgatagacaaagaaataggtataactttgagataattaaaataaacgttaataaaaattaataataataattcagacagaaatatcagttgatctccacagtggaagttgtagaggtataggagaggcaaagtaaaagtatcctaacattcttgactagagaaaagacagagagagcaagacagagacagagacaaagtttttgatattgagaaaaatacaaatgtttaaatatctgaatttaaactagagctgttgaagtacaatgtacaacttgagaaagaaaatggaagcagcaacaacagtcaaaccaacaaaaagcaagaaaggaaaaaaaattagggagtataataaagaggagaaagaaaataacataggaggaatagctccaaattatggcgatcataaaaaagataaactggttaaagtaactaattaaagatcaagaactgtgggtttagctaaaaaggcaaaagcagctatattttatttatcaggcccattcttaaaaacaaaatgtcacaaggcagttgactaggagaaggagaaagacaagacaaaggctgacagaaaaaaatagcaaaactaatttcaggaaaaaaaaaagaatacaaggagaaaagtaataaaaaggataaagaggaatatttcttattgataaaagataaaacccaccgggaccaacttgagctgcttggataaaagtgctcttgcctgtcgtttttgaaaccttgttatcatggagtttatcacatcagtgaataaaacgaagcccctgccttcatggagctttgttttagtggaggcaaatagacacaaaaactaatatagaattaaactatataatatgtcagggccaggtgcggtggctcacacctctaatcctagcactttgggaggccgaggtgggtggatcacgaggtcaggagttcaagaccagcctggccaagatggtgaaaccccatctcacaagacagaaaaccaaacaccgcatgttctcactcataggtgggaattgaacaatgaaaacacttggacacagggtggggaacatcacaccccagagcctgtcatgtggttggggacagggggaggaatagcattaggagaaatacctaatgtaaatgacgagttaatgggtgcagcaaaccaacatggcacgtgtatacctatgtaacaaacctgcacgttgcgcacatgtaccctagaacttaaagtaaaataataatttaaaaaatgtcagatggtgatatgtgctaaaataaataaagtcaaatagggaagggtaacggaggtgcaattttaaataaggtactgcaggaaggccttactgagaaagccgctatgagcaaagatttcaagttgctgagggagaaaccatgcagatttctgagggaagagaattccgggcagagggaacagcaagaggaaatggtcaccgcacacaattaaagctgcataaattaactgagaaggaatggagaaccaggagagtgtgacaagtgaacaaagtatttggaggaggatggagtgatcaactgtgtcaaaatggcagacatatcacatagcatgaggactgggaaatgatcattattaaatttagcaaatagaagtcatagttgactttgacaaaaacaatttcagtgaggcagtggaggcgaaagcttgacaagaacagggtttaggagaggaactgaagtagtgaatatagtaggccatttctgtaaagtaaagctgaagcaaagggcagtggctggaggagaaagtggggtcaagatgagagagtctgtagtggaaggaaaacccaggcatccatgaaaaagaaacttaaggttcccttcctgaatgatgttaggaagtttaaaaataaaacacacgaaactagctatctgaaaaatgacacaacccaaatgattactaaaaagaagggaatttcagaaatgtttgacatctaatcaaggagacttgaatttcatctaaagaggtgttattggattgttggattttgattataactctgaaatagtttaagcctacttgattgtaagttacctaatgaaggagactgtattaaaaagacaagggcatggtttgcataggattcataaaacaggagtttgagagacaaaatgtggcactgtgttcccagcaatgtccactaaaaaaggtgtactgatgagcagacttgaaaactgggatcatttagcaggtataattttcattatttaactgtaaagatgaatgtgtcttgggattatcattaggtcattagcatcatccagatgatttcagatcagaaagcaagcttatgagcagtagttttccatatggattccttataagaggactctgtgcttgagtgtctagtccctaggagactgtgaattcctattaataaattggcattctgatttatttggtaccctcatgtgagtttggttctagtagtcagcagcctagaattagctagatatattaaagcaaagggccaagctttgaaatgacactgaggtagagcagggccagcatcattaggcagcctcccaggtgccacccataccttatcctttgtccatctaaccatatgtttgaagtaccgtactgaggaaagaacactgaacttaacagtcagaaaatcatctaggactctgccaccactacccatgcaaccctgagtagtgtcacttaatttctgtgaccctcagtttatatatctttacaaataggagtaacaatagctagtctattttgctgcgttattttgttttgttttgttttgagactcagaatctaaatctaaaacaaatggttataggaacagaaggtattaatgccatcatcattacatgtcctgcagcctaagtatataattgatacacttaagcacactaccacagttatctgagaattgaaggcaacatgaaaaaccacgagcccactgaacaaaatatgggaaatcctacctcccagcaactggtttggcaatgttttcaaaaacggtctcttggtttgcatcctgatcaaaaattctttgaaatctgcaatgtgaaaaatagtaattatttaaaagctgcacctccaaacactatcagattaataaatcttgtttttctgaaagctctattaattaccccatatttacatcactgggcttacctaacttagcacaatgtttgccctgtagtctcaaccacactgtgctgttgtactcctgtatacaaatggtgggtaaacagtattgctttgacaagatctgcacaataaatccctctgaaaaactgcagcagctttgaaccaaataacaaattgtgtgctttttagctctcaagagggacagtgtctacaattggcaagaaattcaaaaccagatagctgcatgaaatggaaatccaagaacaggatgtaaacagccaaggaacttctaatatctgacctgtgagaaaagaatgcaactgtgaattgtatgattattgaacttagttttagtattttgaactaaagtttatttttccactaatttggtgctatatcctagcatcaaccatttaattctcaggatggttttgtttcattttgttgaccatgagtcaaaagtcaaaaagtaaattatgatagacctgtcccacagagagaaggtttaatcagattggcaatggcttaggggaagagagtggaggtgtggtgtcaatttcactcttcttgcaatgcttctctgacttagcttagtactggattgcaagcacagtggaacactcggggtagaagacacagaatctattttttttttttttttgagacagagtctcactctgtcacccaggctggagtgcagtggcgctatctcgcctcactgcaacctctgcctcctgggttcaagcgattctcctgcctcagcctcccgagtagctgggattacaggtgcaccatcactcctggctaattttcatattttcagtagcgacagagtttagtagagacagctgacctacctccattttagagaagcaaacaatgaactatacaaagagataatctaaggcactctggctagtatgtcatttagcagggaagattgtattttagacagtaatatttactgtttagtgtgcccagattgcttctcaaaactctatagatgtatcacagcttcagatatgaacaccaacataacacagaggtcaacataacacatagctgctgaactgcttttcagagcactgtgtagtatgaggtctgagcacatattctcagcttttgaggagaatgatgataacgctggttcacttcttttatcagatgggtgatgactgggtgaatcaattagccattttctaccccacttctttaaaaaaagagtaattatatctactaccatgtaaataaaagagatagcagaagttttaaagaaggcagtgaatcacacacagaatatcttctgaaaggtaccttgtgtaaaattaatgatagcattttcatttctaattgatctattcattccacaaacacatactgagggcctaccatgtaccagtcacttctaacaagatttaaattaaaaatatctataaaggatattgaattccttgggggaaaatgacatcctccactatttaaaatagcaggtggtagaaacacaagcaatccagatctccctttttattgacttttccccacacattttagaagaacgattttagcaccaaagtttacaataaaccattaactatatattaagcatcaaatgtcatcatcccaaaatattgcattttatacaatatagttgcatagtaatctgaaaaggcattttgatcagctgtcttctgaaaaccactgaagagcacaataggatcacaattagaagggattttaacaggttcagtctaatgattaacagaggaagaagtcgagatccacagagataaagtaattactcagagtcttagagctcatcaataatatgccttgagacataacttaggtttcctgattcttaggaggtcttttcatttgttaggaacttgagtaggctttttctaaactccatttcaaactcagcatatgctgacttcttcccaccctaaagaatggtgcacttcctgtgctcttcctcatctcagaaagcaacagctctatccctctaaatgttcagtccaaaaccattaggatctgcttgactcctctgtttctactatactttatgtctaatccatcagcaaactctgtcaggtgagaccttcacaatatatccagaattcaattatttctcaacatttccactgttaccaccttggtccacgctaccataatttcttgcctggtatctcttgcaatagcctaactagtcttttcccccttccagcctgttttccacatgtcaacaagagtgatcctgctaaaacataagtgagataatttcattcctctgctcaaagccctccattgccttctcacggctcaagtcctcacaatgacttataaggctctaagtgatctggccattctgctgcctcatgcttactctactcctcatgcttactctactcctcatgcttactctactcatgcttactcccctctacctcttgcttactctactccagccacatagatcactttttctcaaacatgccgggcgttctccccattagggatttcactcttgctattcccttggcctgaaagtctcatcccttagatacttgaatggctggcttcctcacctccatcaagtctttgctcaaatgttcctttgctgtacaccttccctgacctattaaatgttgcaaccattcctctccttcacccccctcatccagcactcctcattccccttctttgtcacacttttctccatggcacgtagcaccttctgacgtacattttgcttactgatcttctcctctatctcctcccactaaaatgtaagctccctaagagcaggagctttgttgtgttccctgctgtattcctagcaattaaaacagctcacagtgggtagccaataagtatttattggttgaataaatgttcttgggggaaaacagcctttaaaatgcttaaatatttatctctgaacatatgtgtaagttgaatattttattaatttttaattttgaatattaaaaccattattttcaattcagagatttaaaaataagccaatggtgcttttacaacaattgcactttgtttgtatctatataaagaatactttggggccaggtgcagtggttcacacctgtaatcctagcactttgggaggccgaggcgggcagatcactcgaggtcaggagttctagaccagcctggccaatgtggtgaaaccctgtctctactaaaaatggaaacaaaattagccaggtgtggtgttgcatgcctgtaatcccagctactcaggaggctgaggaaggagaattgcttgaacccaggaagcggaggttgcagtgagccgagatcgcgccattgcactccagcctgggcgacagagtgagactccatctcaaaaaaaaaaaaaaaaaaaaaaaagaatactttggatagggtccatagataaagacatagtaaattgttcttatcaatcaaatggaatcatgttgaataaaatatttcagcaaactgttgttttatgtaatagattttggcctaggccagctggtaacaagtcacaattatgaaggtatgtagcatgcttacatcagtgggagaacgtcctcttcagaaaaagcaaagcaggggccaggcgcggtggctcacacctgtaatcccagcactttgggaggccaaggagggtcagatcgcttgagcccaggagttcaagaccagcctgggcaacatggtaaaacccagtctctaccaaaaaaaaaaaaattagctggatgtggtggtgcatacctgaagtctcacaggctgaggtgggagaatcacctgagccctgaaggtcagaactgcagtgaactgagattgtagcactgtactccagcctgggtgacagagtgagaacctgtcttagaaaaaaaaaaaaaaaagaaagaaagaaaaagaaaagcacaggttttagggctattccttaaaggatataatgaaagacaatggggagacataaagacaaggtgaggaccgccccactaggcaacaataggttagcaagccttgcttgtacttactgtaaaagacacaataagaaaatgaggtggaagtggagggagagatgtatattatatatgaaagacaaaaggtagagttatgaagaccaaggagaaattctttatgagacaacaaaaaaagcaaataagaatttaaaaagaaaaaggccagatacggtggctcatgcctgtaatcccagcactttgagaggccgaggcaggtggatcacttgagatcagaagttcgagaccagcctggcccacatggtgaaaccctgtctctactaaaaatacaaaaattagctgggcatggtagcaggtgcctgtaatcccagttacttgggaggctgaggcaggagaatcgcttgaacccgggaggcggaagttgtagtgagccaagactgcgccattgcactccagcctgggcgacagagcaaaactctgtctcaaaaaaaagaaaagaatttaaaaagaaaaagagagagagagagaggaataaaaaaaaatctgggatagttttatccaaagggcaaaggcaggaatagtctcaaaacagggcctttgtaaaacagtctagagatacattgaagagaagaattaggattctttcagcaggatccagaaatccgtcaccaaaatttgggccagagatcaaagacggatttaatttgggctcaaacttccccagaaatcaaaagtggagattaaaagaaatagattaatctgaaaatggagactaaagagaatgtgaaatagctatactccctaaattcaagacctagctacaaaaagagtattcagaccaaagacactgatgaccatgcaagggtagctgtttggtatttttcaactgagccattatagttcagcattacccaagagaaatataatggcatccctaaatgtgagggcatatgtaatttaaaattttctactagccacgtttttaaaaaagcaaaaagattagttgggcatggtggtgcaggcctgtagttccagctattcaggaggctaaggtgggaggatcactggagcccagcagttcaaggccacagtgaactatgactccaccactgcactccagcctgggtgacagagcaggaccccatcttaaaaatttaaaataaaataaataaaactttaagaaacaaaaagaaacagctgaaattaattttaataatatacttttaaccaaagttagaagtttcatgtaccaaaatgttacaatttcagcaaataatcaatatgaaaaatgtcttgagatattttacattctttttccttcatgctaagtcttcaaaaatccttcatatgttttatactttacagcacatctcaattcagtttgaacatacttcaagtgttcaagaaccacatgtggcttgtggctattatattggacagcacagatatagagtatacatatgtgtatatgaggtccaaatatcatatatattataaagaaggcttacctatgtagcacacaaatgatactgtaagttcttaccgtcagtgaagtttaatcatgcattggaactttctgtaagtgctaaacaagagtgggttgagtaggaaaatactagataaacagagctagtaaagaaaggctggaatcttggaatacaatctcagatatagaaatacacattatttttgaccttgggcacagcagtgaaaaggcaacttgagttcagtctactaggtgagatgaagagctgcgttgcattttccacaagaaatggtgctaatgatttcacaatgaatattaatgcagtacaagagttagttcaataatgaaacagaaatgaaaaaaggagaaagaaaaacttacttaaatttgtagctttctcgcttattattcacaaacccatctgccaaatcacgtggtaagatgatttccaagctaggtattaatttttcatcttcatctatggaataaatctgcaaatgtgaagacaacaaatggatataaaatggtgaaattatggcttgaactatcaccatgttattatgacttgtaatgatatgaaaattatactcttaagattaaaaagtcataatatcatataatttgaataatttttctctttgaactgtgtggattcagacaaatatatggaactgaaccagaagtaaaacctaaattaatgctgtatcaaagtcagatcatctttgaatgatctaacattcaaatataagtatttgactatctctgttattattgtcattgagaaactaatagcctgaaagcaacattttatctaagtattgctttagtattgtgtatcaggagttaacattttactacaatcaataagcatttctgagcatttacaaaataccagagataaagggactaggtttggagccatctcagatagctcaccaagaatgctctaattcaagttatgttcaaagaagcctaaggttccatgagacattttcaggcatttgataagagagatgtggcttcaaaagacacatgtaattcatgtatttgatgtcattttcaaggttctccttccaactcagccactaattagcaagtgacctgggagaaatccttaagcctttctaagctgatatggaaatagagggtcttaaccaacacccttaggactgtaacattctctgattctcttcctggtttcctactccatcatttttattggccaggaaaattaaaagtcaagcctataaagaggtcatgtggaataaataaaagcataagatttgtcccaagacttgggtccaacactgagctcaatttaccagctgtgtgaccagccaccactttcagaattgaggttccttgtacataaaatgaggaaaacagaattacctcccttacaagattgctgtggggatcaaatgatgtaatggaaatcaccataaaattgtaatgcaccataaaaaaaaaaagtcattagatttaaaggttttttttttttttttaaaggcttcttgtcttttaccatgaaataaaattccttctaacaggcaatacttcctgtttaagacccatttagatgcttggttatgaggaaaaagtcatattcctaagcaagtaaaagcctacctaaatctccagaaagtttgaatattttcctaagtatatttttattgaaacttctcatttaaaatgtgaagaattcatgcagaaaagtcattacataaaataaagtatttgtagaaagcaatggcatcaggttcaaggctttctggctaggttttctcaagagacatttaaaaattatatcctgttgggcactacattaaaaaaaaaagttttatagccagacaggtgagtgaagggggtgtataagacatgaaacatacaagagtgaggagttacatccatttttaaaaagtctatatttctctgctcagcagacagaaaagaatattaactgccattaatgaccctccactactctgattaagacactctttgaggccttaagaaaagtcccttagaaccagatcacttgtttagtgtaatattggctttctatccttattcataaaaatattatttgagatagtgaagttttttttttaagaagacagaacaagtgcaaggatgattatgaaaatgttttgaaatgtataaagcactgtacaaatggaaagcattaccactgttaaaactatcaaagattcattttatatatcctttttattaatctgttattacaatttactttatgatgccttaaagaataaaagtaatgcagtaatgaagctataaaatgaagagaaagaaaaaaattcctttgagtcactctcaatttaatactacaaaaagcatttctagtcagagaaagaactctacaatcttttgcggacaagaagatatggcattaaactgtggagtttttaagggcgaacagggatatactaattcaatatttattcattcccattctctttgtgtgtatgtgtgtgtgacacctaaaaatatgacacctaaaactacttcctggaggatcaaacaatccactctacagactcaccaaagacatacaaaatgaggtacattaaaatatccaaacactgcattttaagagaaaagaaagttcagtattaaatccaagactctccatccacttccctgagccccacccctacccatcctgtctcttgaccttatcccagcctctgctctgactgctgagcccatgtagataagctcaacagtttaagctaagaatctggggggaaatgttacatacaatacactttttacatatgatgcactctaaaaagaaatgcatgtaagtgattattagaggagagaaaatgggaagatacccatggttctttctacaccactttattcctgttttaaatacataaattatacgaggcaaatgcttaatcatgagatgctatgatattccacatagacatatacccagtatatatatggaacaggaatacaacattattaatatgcccactccatatactcacaaatatgatccaaattgcccttgcctaaattgtcactttgagaggcaaaaaaggtttccgaaaaggggatagctttgaaatcaaaaatccttaattaaaattacagctctgctgttcacaatagcaaagacatagaaccaatctaaatgcccatcagtgatagactggttaaagaaaatgtggtacatatatatacaccatggaatactatgcagccataaaaaaggatgagttcatgtcgtttgcagggacatggatgaagctggaaaccatcattctcagcaaactaaaacaagaacagaaagccaaacaccacatgttctcactcataagtgggagctgaacaatgagaacgcatgcacacagggaggggaacatcacaccctggggcctgtcgtggggtgggaggctacgggagggatagcattaggagaaatacctaatgtagatgacagattggtgggtgcagcaaaccaccacggcacgtgtatacctacgtgagaaacctgtacgttctgcacatgcaccccaggacttaaagtataataacgaataaaataaatgttctaaaattgaaaaaaaaaattacagctatgccactccccagctgggtgccttggtcacattatttaacctgagactcagtttcctaatctgtaaaatgcggaaaatgacaccaaccttgcagggttcttgtgagaatgagagataatgcagataaagcacctgtcaggtggccatttctcaagatacataagaatgactatgctcccttctaggcagaagagaggatgttttgaaatatttaagaagcataaaaagtgctgggcgcggtggctcacgcctgtaatcccagcactttgggaggccgaggcgggcggatcacaagatcaggaggagatcgagaccatcctagctaacagggtgaaacccggtctcttctaaaaccacaaaaaattaaccgggcgtggtggcgggcacctgtagtcccagctacttgagaggttgaggcaggagaatggcgtgaatccaagaggcagagcttgcagtgagccgagatcgcgccactgcacttcagtctgggtggcagagcgagactccgtctcaaaaaaaaaaaaaaaaaaaaaaggtgcatacaaagtatcattgctcagagtcagggcaatgtcttaaccttctttatacctttctgaatttagcacactagaggaagcacctggtaaatatttagttaattgtttctgaatgaagtacacatgcgtattctttgggtcaggatgcttaagcatctacctatatctattaatacaaggagtatatgtaaaggttcacgtttatgttggagaataacaacagtcaactaattactgaggccccactgggtgcaaagtactacatatgtgtatgctttgtgcatttgtgtctatctatatttgtattatttcagaggtacataaacacgcatctcttgcttgcacgttttgcccgagtgccaaaatgtacctttgagtgtatctgcatgtgcggtgctgcgtgagtttcccagaaaggtgcaataagtgcttatgtgtagttgaagcgcacactatacaggcatactgaacatgcactagtctgcccccgcgtgaacacgtgtgcctgggtgcaaaaaaaatggctctctgccgggtctgcgctgtgccaggtaggagtggcctggctgtcggtcgcgtagctgacagcagtgcgcgggggtcttcgcggctgcagggctcctcggtcagtgtgtgcgggattccgggcggcctcggcgcccaccagcaagcccctcacctccgcccagccccttcgcgtgccgccgcccgaccccagcccaagaggccccgccgcgccggcgccccggaggctccagcccgtaccccttgttggtgcttccggacagggggcttcaccctcgcgaatatctggatagtctgcttcaccatctcctccctggctctgcaatgacccttgacctctctcaggcccgggctgccaaaactaactcccaccacctccggcgacccacagtcttagcaacagtagctagggacactacccagtgagcaccttggcagccaggatcccgcctcctccctctaattggtcgcgaccggaaggaggccactacggggcggggctagggaggggagggcgggggtggagaggagagcgctgcgcatgcgcatgagcgagtgtctgggctctgggtttagcgccggacccggcctggaccgtgtggttaaaggggaacaaccaccatgccttgccccgccccgctcattcacccattttattctccatgcccttgcctttaaaaaaaaatacagcactgggccgggcgtggtggctcatgcttgtaatcccagcagtttttgggaagccgaggtggtaggatcgcttagagcccaggaatttgagaccagcctgggcagcatagtgagactccgtctctacaaaaaatacaaaagttagccaagcgtggtggcgcgcctgtatcccagctactcgggaggttgaggcaggaggatcgcttgagcccgggaggtcgaagctgtagtgagccaagattgcagaactgctccagcccacttggagatcacagtctgaagaaggagacagattttttttttccttcacaaggtctctcaagtgacaaggagacagattttcaacaggaaatcaaaaccaaggaatacaaactatgccatgatggaattagaagtggggctagctctgttttggaaaaggataaaactggatgaaggggactgtttcccacacaatggtcacggcaagaaaggatgagctcttcaaacactgttagcacatgaaaagatagtcaacattattatccacgtgggaaatataagttaaaaccacaatgaggcatcactattcatctatcagaatggcttaaaaaaaaaaaaaaaaaaaaaaagtggcaacaccagatgctagcaaagatgtggagaaactgaatcagttgcactttactggtaggaatgtataatgtaaaacatacactgtataaaggtacagccactctggaaaatagtttgacagtttcttacaaaactaaaggtgcaactactctaagacacagcaattgcactcttgggcatttatctcagatgaatgaaaacgtgtgttcacacaaaaacctgcgcatgtgtgtttatagttttagcacctttatttgtaatagccccaaactggaaaaaaaacccagatgttcttcagctgatagtttaaaataactggaataccattcagcaattaagaaggaaggaagtgttgatacacgtaacaaattggttgaattttcggggaattatgtttcatgaaagaagccagactcgaaagctaactaccgtatggttctattactattgccagggaggtgtgcagggtatggttataaaagaaatccttgtgatgggctgttctgtatcttgactgtgatggtgatcacagaaatctacacatgtgatagcattgcatagaacaaattacacacatgttcaaataagcacatgtaaaactggcaaaagtcacataaaattgaataagattgatggattgtatcaatgtcaattccctgatttttatattgtactatagttatgcaaaacattaccactggggaaaactgggagatgggtatacgagttctctctgtattattttttacaaaacaaaaagtttattaaagacacccttttttctttctttcttttttgagacaaggtcttgctctgtaccccaggctggagtgcagtggcatgaacacggctcactgcagcctcaacctcctgggctcaagcgattctcctgcctcagccccacaagtagctgggcttatagacatgtgccatcacactcagctaatttttgtattttttgcagagacaggatttcatcatcttgcccaggctggtcttgaactcctgaggtcaagcaatccacccacctcagcctcccaaagtgcagggattacagccatgaaccactgcacccagctgaaagacacttaagaaaacaaaaagactaactacagattgggagaaaacttttgcaaaacacgtatcttgataaaggacttgcatccagaatatatacaaactgttaaaacctaataatagaaaaacaaacaattcatttgtttaaggtgaagggagggtgcaaagatttgaacaaacgcttcaccaaagaggatctatggatggcaaataagcacatgaaaaatatgctcaatatcattaatcattaatgaaatgaaattaaaaccacaatgagataccactacacatctcttagaatggcgaaaaataagaaaataaaactgacaaaactaagtgccgacatggatgcagagcatctagaactctcaaacatcactgatgagaaaacaagatggaccagccactttgtaaaatagttttgtaatttcttataaagttatacacatacttaccatatgacacaacaatcccactcttagttattaacccaaatgaaatgaaaactatgttcacatagaaacctaaacatgaatgtgtatagtggctttattcacaattgccaaaaactggaaacaaagtaaatgttcttcagctggtaaatagataaacaaactgatatatctatgccgtaaaaaggaatgaattacagatgcctacaacaacatggttaagtctcacatttattatgatgagtgaaagataccagactcactgcgtactttataattccatatataattgaattatatataatatatatctaattatatatatcatatataatatgttatatatgttatatattatatgtcatatataattatatttatatctgtatatatatatgacattcgagaaaaaaaaaaactgtaaggatagaaaacagatcagtggtttccaggtgctgagggtaggaaaaggggttgactgcagatgaacatgggagagttttttggggggtgatggaactgttgcatatttagattgtggttgtggtaacataagtatatgcatttgttaaaactcatagaactatctatacacttaaaagagtgaattatactgtatataaactgtaccacaataagaaaagaaaaaaaaaagaagaagattgagtatgaacaggtgctgcaatatcaggaattgagaagaagagagaaccaggtatttattatatagactttggggctttttcacctagcaaggaagagatgactcaagattgggtgcaggtattcacctggacaagcaaaatagatgggagtgggaaaaaggaggaaataaggagttggggacatgttaaatttcaattgcttgtgggacttcagaagtaactggataaggtttaggagtaagttatggtggaaatataggcttgggagtcatcacaaagttttttccagaaagtaaccaagtcactcacgagcatcaaggttgaaatcctaacactgatggttggaggtggaagaggggctgcaaaagaagttgaaggaagcagccagagaggtctgagagagaaaagggaatgttatgccatggaagccaagggaagagaacattttgagaggaaagtattcaacggtgttgaatagtaaagacaatgcactgaaaaacacccatttcattcagcaactagaaagtcattagtaatatagatttcagtggagtagcagtgtcagaagtcaggttgccagaggctgaagaataagtgggaagttaggaagtggaggcagtcaagataggctacttttcacagaagcctagttgtgaaggattgtgaagaagcaacacacaggtgagagctagaggaacccagcgtaccagtggtctttgtccatatccaaaggggtatatctaataaacaaggggaggttgacggtatggggaagagagaagagaatgggtgttttcctcagatgagcaattgcacttaccaagagggtgtaatggaaggtgacaaggccagggagccaagggtattcacaaaggagcattttaatcatgaagtctaggctgcttaaagatacctgtggtctttgaagaagtgttgcaaaaggaagaagggaaatctgtgggtccaggatgtgggatctttaacaattcctgtcttgagctctgggtcatacaattaaatgtttcgatggagagaaaatgtgggttccaatcctgcatctgtcattcccaaatcctgtgttcatctttacttgtgtgaccttgggcaagtaatttatgcttttaagtctcagttgcctcatccaataaatgaagatagataataacaatagctacctcatggggttatcatggacatgtaatgtgggcattaacgtggtttccggtgaatagagaatgctcatatctaaagggttctgacctgtggattgaattcctttgattgtaaacaccttctaaagagcagaaacaatggcatacatatgcatgtaagacatattggagattgcaaactcaaatgtctcctggggccagaccaatgatgtaaattcatcaagcagacaggcatatgacaatagggagcgtcatggtgaactggagactagtgccccaactaaaaccattcacattcaaaatggttacagcacagtactgcctaaataaagcacatttgcaggaccatacttcaacccctttttctgtttctggtataactgacctcagtaactcccaggcccactgcctctgacaggtttacctaaatctcaaacagatggctgtaatgtgtacaaaataggttttgagattaaatctccaagtcacagtgtctttcccacccctggatttatattcagtgttattatttgtattttatctgcttgtttaaatgtgagaattaagatgcttttcaactatttaaaagatgcttgaactttgtagttgccaaaataacagataattgtaccaggcaaattagccagggtttataagcctcaaatctgaaagaaattaagctgtgcctgaaatgaattagtctatcggtaagttagttggatttgtttgcttgtatgtttcgttttgttttgttttgtttaaaaaaaaaatgaaactacgctctcgcactagttttcaaatacctctttagctgttgctgctacaactataaaatgcattattttattttacaagtctgaagagggaccagtaaaaatgttatgggctgtaattttgatatagaatatgtacataaaattacctaattgcagtcaatttcctcctcccctagtttatccatggctttggggaatttatgtttttgcttgttcaaaaatctttcatggtcacagcatgactgtcccctcccacccccgccattataaggtgaacaagactttccagacaggtgctggagacttcactaacaagagagaaaacatttgactggggtcttcttttaataactacctccaagaagcaaggccagtcatcagaaatttgccacttattaataaatagcaatattaatggaacaaaagtcaaccaaggctgggtgcagtggctcacacctgtaatcccagcactttgtgaggccaaggcgggtggatcatttgaggtcaggagtttgagaccagcttggccctgtctctactaaaaaatacaaaagttagccgggcgtggtggcacacacctgtaatgccagctactggggaggctgaggcaggagaatcacttgaacctgggaagcagaggttgcagtgagccgagattgcaccactgtactccagtctgggcgatgaagtaagacttcgtctcgaaaaaaaaagaatcaacttatgtaaactgtccctttatatttggtgatactgggtaggactttgggcactgtatgattcctgggtgtccctgattgaggatttcatgggaagtagtcaaaagaagaggaagaaaaaacatattttctgcggaggagactttcatcagaaatcccctccctatcagtctgtgggtggtcagtaccagaaggatcctctaataccaggcagtctaagaaggtaatttatttcattgtttctgaaccaagtggagaatactcagagcaatttctggtactcattaaatgccaaataataacaacatgctgttaaattgcagagcaagggtaccacaaaatctgtaatatataattttagcaaaaaatgttcttctgagaatatgttcagctaatttaaagcatagtttcattagcataaccatctttccacatatagcggagtggaattcataaaacgtcaccagcacttgggtcgataggattttgccatcacactcggttctctctcctgctggttcttacctctttggctaagaagcagaggcccctttctcccaatttatctgatctcttcctgcagcaccccctggagctccccctgaagaacaacatcaaagccatttagggctggaagctggtggccagccatatggaattacagcccaggctcttgccggattatagactataacatatgaaccaaatgacagtgccatggcatcgagggaaagctggtaaagcctccagttttgaatggaaaatatgactgtgtatttatacacaggctcctcataaacaacctgaatgtttcaccaacatcccgaggaaacaagggatgggctgagttaaaaatagctctagaacgcctctcttctaactaaattacccatgctgtcctatctcctgagggtgtttacttaaatgtgcttctttgcatatttcagaattagaaaaaatgcttatcaacaaataactgaaaacgtaaaagaaaatggctcacatagcagagagccttatctgacacattattattgtcacaacatccaaccacaccttattcatcctgaatctgggtatttggcagtcgaatctatccaggtctctacttcctaatctctcatttacttttcaacctcctgcagtctagtttctgtctctcctcctccatgggacctatttaaactttgcacctccagagtgacaccttttgtctgtacattttggaatattgtcatgatagagccagttgcctaggcatgacctcaaagttgccctttgctgcttcctctctctagcatatctacatccaaatagtttccaagtcctggttatgctgcctcctgaataattttttcctccctcccctcaactttgtcctcactacttactacttgctttagtttggctcttagtctctttgccagaactagcaaagttctcctaactgcttttcctgcctctaatcccgccctcccctttattccgtctgttacaaccgctgcaagattatacaatgcaaaccagttcacatcagtgcttgtttgaagacctccaatccctgttacaaatagaatcaaggccaaaagtccttcataacctggtccccagctgtctttacatcactttcatagcccttaccatgtcttccacctcctcttccctgcccctgtacgccagccacagatttcctgcagttcccaagcacgccgtgttttttcatttctccatgcttttgtcaggaccatttcttctgttttcagtgctgcctcccactttgtcaggaaaattcgacctatacttcaagatccagctcaaatgtcacccggtctggaaagccatcccttccatctcccctagcgaagttagtgaccctcttctgtgaagctacatctttatacgttcctttgtattagtgcttctttcgctgccaatgttgtcaatatgtatctgtctcctcatcattcttaggattatttaagggcagcgactaaaccctgtttatctttgtatttccagtgactaacaaggtttaggtactggggagatttctacatgtgtattgaatgaatgagtggatgcagaactcattgcaaggaattgattcaataaaacctttacaaattaaaaatttttattagagcttcatattttcatagtgaaaattactttctcttcctgtttcacccaagaaaacaaagacaatctacaaattgagtagacatttagcaagagaaagaattaaatcatggtttccatttctgaaccttcttttttcaggcaaaaaaaaaaaaaaaaaaaatggttgcaaatttcccagggtgataaacagagtacattaacatttgtatcaatggaagacaacagaaacaggatctgagggagtgataggtatagaagcacagtggcccactgttaaattagtgagtttctttcaggatgtctgggaagcatttaatgactctagggatcaatttgtttttaatttaaaaagaatgcatcgtttacaaatcaccaattaaatacttattcaccttcttttatttcgtattaaaatggactttcagatgtttgacaaaggcagtttgctcttcctcctctgccatgacttttatttccccaaatacaaaaagaatgtttcctaaattacacagcttgtaacacttttctccctcctcttttccaagcctttgctcactgctcaggcagaactgaaacatcactctctttgagaagtctcccctgaccctctcagactagattcagagccctagctacatgtgcccttagcaccttggactttataattactactagtctaggttaaatgaaggcctagatcacttttcacttgctcatcatcgtattccattcttgtatgtagtaagtgtttaataaatacttatttaatgagaaatgacataatggttaaactggtaaaaacatgcctgctgggggaaaaaacaacattgtctcagattgcattctccccaaacagacactgagatgaggatttgggtgtcaggaatttatttgggagatgatcccaagaaaacagggaaaggaagaaaaccagtgataggtgcatttatgggtggattttcccagtgggaaagtagggctcattcccaccaggaccctccacaagactgttacagagcacacctcagcattgctccccaaggggcgaagaagcagggtatttattcaacagctcctgcttttcattgctggagggctgctctcggaggtgggaatattctacctccccagcacttccaacttaccctgtgtgccctgacattcagagaaagccgttgggcagagagaggtgcagaccctggaggcaggatgcttttggcatgtataggtatgtccactaaagttgcaatgatctgcggggtggactgggaagaagtgggcagagtatcaacagtgtcttctatggtcagcactattgatgtttttcttctaaatttctaaattaaaaacatgtatgttagaaaattaccaagcatacttgtgtacttctaagttttatgtggttatctaagtaacaggatctacctctaaatgataatattataacatcctatagtatgtggttatctaagtaacagcatctacctctaaatgataatagtataacatcctatagaatcacagtaaaccacacaagattcatctgctctaggaacacataacatccaatcatagatgcttagatcacgttcgtcagccaatcatccttttagtattatttacctatttgatgatctctaatctgtgtctgtgtgtgtcttataatatatagttttgataatattccacttttttatatactaaacatttgtactatacaatgttttctctgtggatcagttgctaaatcaaggatttaaaggattaaaggacaaaaagctggcattaactctcccgggcaatgtgttggtgttctgtgtttacattataatttttaagtgccctatggtcaaagaaatttggaaaattctgttttaaagtcaagctctactgaaaatgttttaatggttccccactttccattgaattaagaacatcttaccaagccattcaagacactccacaaattagttccaacatgttcccctttccctccaatcaaactgaaccacgcgtctctgtccctacacagcctgcttcaccgccagcacccatcaccttctgtgggcctccttctgccctgacctctcttc

SEQ ID NO: 464 - DNA, 40872 bp, Homo sapiens
gaccaacatggtgaaagtctgtctctactaaaaatacaaaaattagccaagcgtgttggcgggcacctgtaatcccaggtactcggtagggtgaggcagaagaatcgcttgaacccaggagacaaaggttgcagtgagctaagattgcaccattgcaatccagcctgggtaatacagtgagactctgtctcaaaaaaaagataaattccacaaaggctgacctgaatccccccttttctaacctagtcccacaaaccctactaaatgtgttaccttcctccaaacatgtctacaccttctgcaacttcatgcctctgtggatagtcttccttctacctggaatctctttcctcagtccctacctgagaactcttactcattcttcaaagccctgttgcaacatcacctcctctaggcttccttctattcttactggcaaagttaatctcctaccagactccttcggcaggttgtttccccatctagaatacattctctaccttgaattctaataaatccacatattggcctacttcctgaaaaaaaacaataattaacattgattaagtaattactactatattccaggaactgtgctaagcattttacatagattatctcatttgatcctcaccagaacccagtgagggtaatattataattcttattttacaattgaggaaacgaagactgagaaagtgaaagactggctcaagactggtctcacagctagaaactaggtggaaactcagaatgaaaatcaggtctggctgactctctggccacgtgctaacaaacatcttcccctaaactgtgggttcctggaaacttgaaccccttaagccctgtcttcataatctcagcatctatcatctagcctagagctcacctaagactgaattaattaaatattaataaataagtcttgaggcctgacgtggtggctcatcctgtagtcctagcactttgggaggctgaggcaggcggatcacttgaggtcaggagtttgaaaccagcctggccaacgtggtgaaaccttgtctctactaaaaatacaaaaattagctgggcatggtggcgggtgcctgtaatcccagctacttgggagtctgagggaggagaatcgcttgcacctgggaggtggaggttgcagtgagccgaggtagcaccactgcactccagcctgggcgacagagcgagactctgtctccaaaaaaagtcttgaataatgacatcagcattaacaaacacagagtgttgaatatgtactagccactgttctaagaatgtaattcatgtaacatatctgtgaactcatttaatccttacaataaccccatgaggcaaatactgtgactttatagatgcagaaaatgagacttacctaaggctaagtcacttccccaagaacatacagctggtaaatggcagagccaggattcaaattcaagcacagtttgtctaaattgagagctttatatctgtttttccttaattataactatatttgtgtccaaaattctcgttaaccctgtgagaactgcttcacctcttccccgaaggaattagcagtaaaacccaaagtcaagaggaaagcatagcaagaaagagaaccttggggatggtaagtgggtggcaagtcactgtggtgaccaaagggagtaaggggcaacctgtgagggtgatgagatcttcatggggttcagcaacagaaaggctcacccagggctgcccaaaactcccactaatatcacagtgaagagcaggtctgcgcaacacaaactctttgggccttctctctgccaaaacacctcaggcatcgttatgcagatatgtctctttccttcagtctgaacagtcctccccactcaatattttctttttttttttccttttttgtttgtttgttttgagacggagtctcgctctgtcgcccaggctggagtgcagtggcgcaatctgggctcactgcaagctccgcctcccaggttcacgccattctcctgcttcagcctcccgagcagctgggactacaggctcccaccaccacgcccagctaactttttgtattttttttagtagagatggggtttcaccgtgttagccaggatggtctcaatctcctgactttgtgattcacccaccttggcctcccaaagtgctggcattacaggcgtgagccaccgctcccggccttttttgttttttgaaaccaagtgtcgccctgtcgcccagtctggagtgcaatggcacgatcttggctcactgcaacctccgcctcctgcaaactcctgaccttgtgatccacccaccttggcctcccaaaattctgggattacaggcgtgagccaccgcgcctggcccccagctcaatattttcaaggctatgatgttttttcctgtatcgcttaacacatcattcataccatgtccttcttttcttccagtcaattctcatggggctttggatacagttcttctttatctcatctccttcaaggccctgcctaccccacctacatctctgctgcccactaaattccagccagtccacttcccagctcaggacctttgcatatgctgttccttttccttccccggctttggcgtggctgtttccttgttactccaacagaccttgtctaaccactcctatctaaagttattcacagcctgttaatccctatttctatatcctgtttcctgtggaattcatcacagttcttttctatttatttaattttttttttttttgagacagagtctcgctctgtaacccaggctagagtgcagtggcaagatgctggctcactgcaatctccatctcccgggttcaagtgattcttctgcatcagcctcccgagtagctgggattacaggtgcccaccaccatgtccaactaatttttgtgtttttagtagagacggggtttcaccatgttggccaggctggtctcaaactcctgacctcaggtgatctgcctgtcttggcctcccaaagtgctgagattataggcatgagccatcgcacccagccttattttattttattttttgagatggagtctcgctctattgcccaggctggagtgcagtggcatgatctcgagtacagtggcacaatctcagctcactgcaatctctgcctcccaggttcaagcaattctcctgcctcagcctcccaagtagctaggattacaggcggacaccaccatgcctgtctaattttgtatttttagtagagatgggatttcaccatgttggtcaggctggtctccaactcccgatctcagatgatctgcccacctcggcctcccaaagtgctgagattacaggcgtgagccaccgcgcccggccttattttgttattattttttttgagacagggtctcactctgtcacccaggctggaatgcagtggcatgatctcagctcactgcaacctcttcctaacaggcttaagagatccttccacctaaccacctgaatagctgggactacaggtgcgcaccatcacccctggctaatttttctatttttagtagagacagggtttggcacctctctctgtcacccaggcaagagtgcagtggtgtggtcatagctcactgcagctttgaacccctgggctcaaggcatccgccagcctcaccctccctagtagctgggattacaggtgtgtgccaccatatccagctctgtttatagggtttctcatctatctttctctttatactgttagttccaggaagaggtgtcttctctgttccaggctcccttgactccccagtcaacatgctgacataatagatgctcaataaataatgaatgcatggaagtgctcttgatcccgcctctcccctctttgagtgttctcaattctcttctccttcctgaccttctccacttgttctcttctttctgacttgaagatccttcctctctcctatactgaccttgctatttcctcaagttacccccatcacttcacattcattgccccatgtcctcatccccacttgctccatcaaggtggtttctgccctctcttgttcataggacagagctcttgaagggctaccagggacctcctcatcaacgttgatatcttttttttttttttttttgagatggagtctcgctctctcgcccaggctggagtgcagtggggtgatctctgctcactgcaagctccgcctcccaggttcacgccattctcctgtctcagcctcccgagtagctggtactacaggcacctgccaccacgcccggctaggtttttgtttgtttgtttgttttgtatttttagtagagacgggatttcaccgtattagccaggagggtctcgatctcctgacctcgtgatctgcccgcctcggcctcccaaacgtcaatatcttattagtcattttacttaactttgcgttgaatctagagctgttatcctcctcttccttcctacacattctctcctcccttgaccatcacagcagttgatagaagcaattgcattaaattgagagctgaggggagctgaggcgagacatcctggctctgacacagaagaagctgtgcaaccttgggctagctccttaacctctttgaacctcagcatcctcatctgcaaatagagaacataattctaactttagtgaatttgcattaaagtgttttttgttggaagatactctccagctgaccatgcagcatagcagataagagtcaggtcctaagccaggtgcagtggctcacacctgtaatcccagcactttaggaggctgaggcgggcgaatcacctgaggtcgggagtttgagaccagcaagaccaacatggagaaaccctgtctctactaaaaacacgaaattagctgggtgtggtggcgcatgcctgtaatcccagcactttgggaggccaagacaggctgatcaacctgaagtcaggagttcaagatcagcctggccaacatggtgaaaccctgtctctattataaatatacaaaattagccgggcatggtggtgtgtacctgtaatcccagctacttgggaggctgaggcaggagaatcgcttgaacccaggaggcagaggttgcagtgagctgagatcatgccattggactccagcctaggcaacaagagcgaaactccatcacaaagaagaaaaacaaaaaacaagagcccttttagttctagcacaccaaaattcttttttttttctttttctttgtctttttttttttttttttttttttagctagagtttcgctctttttgcccaggctggagtgcaatggtgcaatcttggctcactacaacctccacctcctggggttcaagggtttctcctgcctcagcctcccgagtagccgggattacaggcatgtgccaccacgcccggctaattttgtatttttagtagagatggggtttctccatgttggtcaggctggtcttgaactcccaacctcaggtgatccgcctgccttggcctcccaaagtgctgggattacaggcttgaactaccgcacccagcctcacaccataattctataattattaatcaagccttcagccctatgcctttctgctttcacgctgttcgttttgcctgaagaacctccctgccccgtatcactgcttgcatttcattcacacgtattgtgtacctgcctagctcacaggtcctcttttcctgggagtttcccctcctccctgcaatcagacactgaaatgggtcccttcagccacatctgtattatatgatcctgtcctcctggcctttgattatttattttttgtttatttatttatttattttgagacggagtctcattctgccaggctggagtacagtggcgccatctcagctcactgcaacctctgcctcccgagtagcttggattacaggcgctcaccaccacgcccggctaatttttgtatttttagtagagacgggggtttcaccatcttggccaggctgatcttgaactcctgacctcgtgatccacctgacttggcctcccaaagtgctgggattacaggcctgagccactgtgcctggcgggcgttattaaactcagggcaaacactaatgtgaactagcttactcagagtctctctgtcaggaatttggaatgttgaaatagaaaggcacagagcctgggagcccttagagctgagttccattaatatcagcactcagggagcactccctctgcagaagtccctggaaatcccctgattcctactctttcactaagtaacataaaccactataattgtgtttgagacacttttaggttctggtgacacaaatatcaagtaaaatgctgcctctggcctccaacagttatctattgaaatcctgcccatgtttagaatcacagctgaaaagctcccttcttcctttaagttttctcatattccccaagcaggattaacccttctccagggtattgtcattgcactttgctttacttctcttaccttaagtcatgtctttgagcttgtatttacttatgatgtatttgtttgtttgatgccttgaagatctttctggatattattgtgttcgtgcaaaggtaattgtcgtttttgtcaaagtaatggcaaaacccacaattacttttgcaacaacctaataatatttatttatttaaacatttttgtagagatggggtcttgctgtgttgcccacagtcatctcaaactcgtgtactcaaacaatcctccctcctcagcctcccacagtgctgggattacaggtgtgagccaccgtgccaggccactttgagctattttgaacagctgcctctcccactaattgcaaaccctttaaaattaaggactagatctggctgtctttttaagtctctcagctcctggcacagaatcacaaacagatcatttggaaagaccatctgttgttttgtctgcccatctttctctctctttttttccccctccttaaaaaataaatgaataaataggccaggctctgtggctcatgcctgtaattctagcactttgggaggcccaggtgggtggatcatttgaggtcaggggttcaagaccagtcttgccaacatggagaaaccgcatttctactaaaaatacaaaaattatctggaaatggtggtgggcacctgtaatcccagctacttgggaggctgaggcaggagaattgcttgaacccgggagacagaggttgcagtgagccaagattgcaatgctgcaccagcctgggtgagagtaaggctctgtctaaaataaaataataaaaaaatagagacagggtattgctttgtcacccagactggagtgcaatggtttgggtcatagctcactgcagcctggaacttctgggctcaagcaatcctcctacctcagcctcctgaatagctgggactacaggcacacaacatcctgcctggctaatttttgtattttttgtggaaaaaggatcttattatattgcccaagctgatctcgaagtcatgggctcaagctatcctcttgccacaaactccaaaagtgctgggattacaggcaggcgccactgcacccagcctcccttttctattggtaactatatccctgttttcctttgagaaaacagccctccttcacttgtgattgttaagtttaggtgtcaatttgactagattaaggaatacttatgaggtgtttccagaagagattagcatgtgaatgtgaagggaggaagtggggaagatctgccctcaatgtgggcaggcaccacccaatcagctccccctaacccaccatagaacaaaaaacagagaaatagctgcgttggtctctctcctggagctgagatactctcctcttctcctgccatggacatcagaactccagcctctctggcctttggactccagcacttacttataccagtggcctcctgggttctcaggcctttggcctcggggtgagagttacaccgtcagcttccctgattctgaggctttcagagttggactgagccaagctatggcatcccagggtctccaggttgcagatggctcgccgtgggacttcttagcctacataatcaaataagccaattcccccaataaattccctctcctctatctacctatccatccatcctattggttctgtctctctgaagagccctgattaatactactcttaattccacatttcaggtgggttctacaagtgatcacatgacctgtgtttggtcagagccatagtgatttggatatgtgacctatcagggtatgacagctgagattctggctggacaaatctggaaagaacccctcttcactggggttgctcacctgttagtccataagcctgctgctatttatggtcacttttgccaccacatgggaagaatctgattattattattattattattattttgagacggagtctcgctttgtcacccaagctggagtgcaatggcatgatctcggctcactgcaacctccccctcctgggttcaagctgttctctcacctcagcctcctgagtagtcgggattacaggtacctgccaaaatgctggctaattgttttatttttagtacagacggggtttcactgtgttggccaagctggtcttgaactcctgacctcaggtgattcacctgccttggcctcccaaagtgctgggattacaggcacgagccaccttgcccggccctcttcctcatcttataaagtcactggtcccatcatgggagccccaccctggtgaccttatctaatgctaattaccttgaaaaggccccacttctgattctcctcaacatatgaatgtggggtttccaacaaatgaaatttgcgctgggtgtggtggctcacacctataatcccagcactttgggaggccaaggcaggcagatcacttgaggtcaggagttcaagaccagcctgcccaacatgatgaaaccccatctctactaaaaatacaaaagttagctgggcgcagtggcacatgcctataatcctagctaattgggaggctgaggcaggagaatcacttgaacccaggaggtggaggttgcagagcagagattgcgccactgcactctagcccaggtgacagaacaagactccatcaagaaagaaagagagagagagagggagagagacagagggagggagggagagagagagggggagggagagggagagggggagagagagagagaaaagaaagaaaggaaagaaagaaagaaagaaagaaagaaagaaagaaagaaaaagaaagaaagaaagaaagaaagaaatatgggtaatacatttaaaccatagcagtgcccgtcacagggttgtggggagattgaaatatgctgtgtggatacaactgggatatgtcatgtactttctttaccgatattcagccctctgagggcctctgatattcccctcccctaggctgcctcctctaggcctatgattccaaagggtatgtgtgtgggaagctcaggctgagtacagtaactgggtgtgtctggagggctaatgccctgactgcagggaagtggatccagggggcacagggttacagaccctgtatagacacagggttataaccatgaaacagactatacaacccggtacagacacagggttataaccatgaaacagattgaggatccaggtgcctttgaatcccagctccactgcttcccagctatggcaccttagacaagtcactgtttcctcatatctagactgggaatgataatgataggctctgcctagaggggctgttatgagattaaataagcaattccataccaaagtgcttagaacagttcctggtagagaataagggctcaataaattggcaattattgttatctccctggccttcccccaccccaggcacgtgagacaagtttataccaacagttctccctccctctctttctctctccttcccacctgccctctgtaaccctatgtaactgccttcagagaatacaatcaaacacagatccttttagaaaagcaggtttattggtcgggctgctcaccaggacacagcaacgtgagaggttccccaagcccacagaaaactgcatctgcccacagctcaggccccttcaggccatcagcaccaagggaccttgtcccacaatccccaacctccctcggcagaggggtcttcagccattcagaggagagaagagaaccgagaaagggaaaaggaagaaaaaaaaaaaaaaagcaaagctttgtattgtataaaaggtttgtgtccccaggctccctcccccaatcccttaaaacaatgaactgcagttctaaaaagcagggcagagaaggtaaggagcaggtggggggaaggaggaagctctcggggcctcccttcaggctgtgactggggagaggggctgttcttgcttctgacaaaccccctttaatggggaggaacaaggggactcgtgtcttgagaacctggtcgtgtcttgagaacccagtccaaacagaatcaggcctctggactgggagcaacactcccttcacccgcaaagattcaggaaaagcaccccaaggacaaggaaaccaatgaggtctgggctagctctgcagctttaggatactagctctagggaaggattttttcctttttaaacagcgtatcactctgttgcctaggatggagcacagaggcaccctcatagctcactgcagcctcaaactcctgggctctggcgatcctcccgcctcagcctcccaagtagctgagaccacaggcacgtgccaccatgctcctagggaaggagcttgagaagaaactgccaggagtgaaccagggctggctgctctgtgatgttctctccccacctcccctccagctctcaacttggtggcagggccggcaccctgctctccctcctaactcccagcctgctgctgcccccttctgggaccctaattttctggactttgagaaatgggctgcccctgggggtgcctccaagagcccatttgagggatcgggtggggctgacctctctgtcttctttggatcatcgccttctcacactgtcctccctcttgattctgaaaaatggtcctgctgcccatggagaaccacagtaagatagatttctcatgcagctagtgaggggacttctctcttcacccatttccaccttctcctattttccttttttttccttctgttgagatggagtctcactctgtcacccaggctggagtgcagtgtcgcgaccttggctcactgcaacctccacctcccaggttcaagcaattctccccacctcagcctccaaagtagctgggattacaggcatgcgcaaccatgcccagctaatttttgtaattttagtagagatgggttttcgcttagtagagatggggtgtttgccaggctggtcccgaactcctgacttcaggtgatccgcccacctcggcctcccaaagtgctggggttacaggcataagccaccaagcccggccgaccttcttctatttttccattctcctttccaaagccatggccatgcgctcctgtgtacaggtgcataaacacatcagtgtgccatccctcacatgcatgtcgttccccacccctccttcccagggcttctcttggctccagcgttcctctgggaccctctgcagatacagcctgtgctggacccccagccagggtgagggctcattctgctctgtcttccccactgcctcagtttcccccaaaagctgctttcacgtccttctagtagggggcctcccatgggggcagggatcccctttaggattcaatctttcctctttgggcagttttggctttgagtcccccagggatcagggtgagaatgaagaagagctcagtgagcggaatgacagcagctgggtgggtggtgtggggagaggctgaggggaaggcagcccccccaggggggcctaaccgtggaatcactgcaatttcctctgagatcccgacttggacaaccaggacagggattgaccattcccttcccattccactcggactgtgtccaagcgggggttgtccactgcgggggctgcctccccatcgggtcctaacagctctaagactgggagtggagttcctggaggtgtggggaggggggcgtgttttcaatttagaaaaatctcagccagctcgagccgagagagaatgcgaaagaggaagttcggaaggagcgaggaatggggtgggtggcagcgggggcggctcagtcgctgtcgctcttgtccaccagcacggcgtccgactcctcggtgatctccagcagcgcgtgcacgtcggggctgctcccgcgccgcaggtcgccggcctccccgcgctccgcgccgccctcgtcgtcgtcggcgcccacctccaccatctcggtggccttgagcacttccacctggccctcgcggatcttcttgacgtggaaggtgaagggtggcaccttgtagaccgcggtcttggagcgcgcgtacaccacgtggtcgggcgtgaaggatttgcgcaacttgtcccgcgacgtcttcagtttctcgcgccgctcggcgggcaccaggcgcgtgcccagcttgttcatgcgcttctccagggtgtgccgcgtcttctccaggttttccttggtcttgaggcgcgtcttctccaggttctcgcgggtacgcaccttggtcttctccatcttctccttggagaaggccttcttgaagtcgtccacgcgccgcaggccgctgcgcttgatacgctctgcgcgggactcctcaataacctcctcaacctccaccgcctcgtccgacgaaagctccagcgccgctgcgtcctcctcgggccgctcgccctcgcccagctcctcgccctccttctctggcagcgcctccgactctttcagcgatttgctgatgctcagtttggccggcagcttcacttcatcctaagggaagaggagaagggacatgagaggcgtcggaggaggcggatgtgggcgagcctgagtcagggtggtgacgatcctggagagaggggagcatgggacgctcgtggtccccaggaaactggcgggcgctcaataaatgtgtgtaggctcacgcctgtaatattagcgctgtgggagaccgaggcaggaggatggcttgagtccaggagttcgagaccagcctgggcaacatatcacccatctccggccccccaaccccgcgtcgccattctttctctctctctctccttgtttttttttttttttttttttttaaacggagtctcgatctgttgccgaggctggagtgcagtgggcgcgatcttggctcaccgcaacctccgccacccgggttcaagcaattctcctgcctcagcctcccgaatagctgggattacaggcgcccgccaccacgccggctaaattttgtatctttaatagagacggtgtttctccatattggtcaggctggtctcgaactcccgacctcaggtgatccgcccgcctcggcctcccaaagttctgggattacaggcgtgagccactgcgcccggcctcgcgccgccattctctaaaaaacatgtgtgttgaacgaatggtgactaaacagaccgcgggagcaggggaccaaacttcgggtcggagatggggttgcgtaataattgcacttgggctaaaatctctgtggtcgtccaaccctgtcctgatccctttccacccgtagatgatattaaaccactacggccctcgggagacacagctccactttggaaatgggcggagcgccctctggtgccgcaaatcgcacactgcccgagccaggccgaaaagcaagtggtgggagtgtctaagttgaaagcgggtaggggtttgagcccacagctgcacctacccacccaagcaggtaaagtaaaggaagtgcatttcctagactcaagctatttctttttttttttttttttgagatggagtctcgctttgtcgcccaggctgcagtgcagtgacacgatctctgctgactgcaacctctgcctcccaggttcaagcaattctcctgcctcagcctcctgagtagctgggactgcaggcatgcgccaccacacctggctaatttttttgtatttttagtagactcggggtttcaccatgttggtcagattggtctcgaacccctgacctcaaatgatccacccgccttggcctcccaaagtgctgggattacaggcataagccactgctcctggcctcaagctatttcagaaccagccttagagatggagaactgtggtccaccctcccccacctccaccttctttgactccttcatactgtttggctccaccagtggtcattctccccctcccccacatttagaaattgatattggaaagaggaagaagctggctgggagccacggacatgttttctccccagtctggacatttcttctggttgtgacttccctactttgggatagaagagagattacttttcaattcttgctttccctaccccctgcccccagcacaaagcctgagctcaggggtctaggagtaggatgggtggtctcagattccccatgaccctggagctcagaaccagttctttgcttttctgtcttctccttggaggacttagcaccagaactgctttccattccgggaagattttccaagatcttgactctggccaacatttcagaatctctggatcactccctcccccacctccaccctcatcagagagcaggggaggctgagcacagaaagggaaagggcagaccaagatcatcaataggatctctttggcccagactccctttagtgacttcaaatgaaggaacgagagatagtcgcttttctaaagggttttctgaagaccatttcccagaattataagaaaaatcctgtcccctaagaaattaaggcaacataaactgagtcctctcactgacaccacacacacacacccctatacataggctgctcggtatctctgcaccacctgctacagaaattccttccccagcccccaacctctttcctcttccctcccatcaacatccccccagagtttcctggtttacactgaaaactaggaacaccctctcccaacttccttcccttcttgtcaatagcattagcagggacaaagagggaatgctggctccacctcttctctcatctgggcatcagctctgctgggcaccaagccacctccagctctctgttacccaactacacctcccagcaggcaaggtgacctgggcacagggcatgctgggacttgtagtctctacctgccatagacggcttagtgcagatcatgggcaatcctagggcattttgtttatccctctgcctcttatcattcactgaggcattgaagggtgttttccttgttctgagtgtaggagagtctcaacttctctttgcattccctctgatttccagtcattcactttggggctcctacaatcacccttaccctgcctgctactggagtgcatatcatttaagacttatacatcattgtaggatctaaaccctcttcatccatctccacccagaatttacctgcagccccagtatatatatatattaaaaaaaattcagctctgatctttccttcataacctcccagacttaaaaacccacccacgccccaccaaagggtggagagagcccctcctttcactaaactcagacaatgtgaataggctagggagggattaagggtgacaggcagggaatagtcaggaaacagccccagctgctggaaaacaaatccactttgtctctctgccctacccccagcatcccccgcttctcccctacccctgctgcctgctccaccccacccctaaaggctgagctggctggttttcctggcctgtggcttcctagataaaggtctttgccagctgaacttggaagtgaatgggactggggagagagctgcagacttcttatagccaatgccatcttcctagtgcctcatgaaaggtctcaaactacaacataaggaagcaatcctagtgagaggaggtttttgttttttagtttttttgttttttttgagatggagttttgctcttgctccccaggctggagtgcaatgacacgatctcggctcaccgcaacatccgcctcctaggttcaagcaattctcctgcctgggcctcccaaatagctgagattacaggcatgtgccaccacacctggctaattttgtatttttagtagagacggggtttctccatgttgatcaggctggtcttgaactcccaacctcatgtgattcgccctcctcagcctcccaaagtgctgggattacaagcctaagccaccgtgcccggccttttttttttttttttttgagacatggtctcactctgtcacctaggttggagtgcagtggcgcgatctcggctcactgcaacctctgcctcctgggttcaagcagttctcctgcctcagcctcccaagtagctgggattacaggcatgcaccaccacacctggctagtttttgtattttttggtagagacagggtttcaccatgttggccaggctgttctcaaactcctgacctcaagggatcctcccacctcggcctcccaaagtgctgggattacaggcacgagccaccgcatctggccatttttgtgtttttgtttgtttgttttgagatggggtcttgttctgtcaaccaggctgaagtgcagtggcatgattacaggtcactacagcctcaacctcctgggctctagtgatcctcccacctcagcctcccaagtagctggaactacaggcgcacgccaccatgcccagctaatttttgtagtttttgtacaggcagagtctcactatgttgcccaggctggtctcaaactcctgggctcaagtgatccccttgcctcggcctcccaaagtgctgagatttctcgcatgagccactgtgcctggccaaggggaggtttattcctggatttagaaatctctccagaccagtaagggatctgggggctctaaccccattcatcgtaggcttcccctggagtgacggcttacaccataggagctgccttcttggtggaaggtcaggggacaggagacgaaacaacttgagctgaatcctgggatgatgtccaataggctggctctggagagggtatttcaccattagcttttcctctccactccaggccaggtttcccccatgactcacagccttggagtgctgtcttggtcccacccatctgcttgctggtacaaccaccacaaacacaatccaaaatcatctccctccaccctgggcacacaggccaggcacccttgtcccacccctacttctctggcagagctcctaagccaaaggaaggacctcaggggatggcaaggagggacggctctgcttgttctgtttctcgtttttattaaacaaaaccaccactcccaataggcttggtttccagagttacctttaatgaccagctctgaacaaaagcattacagttccccctgccctttgccaagcacacatagctcctcaatcctcgatggatgcagaggagccacagggaggctcccagcctcttccactccaccccccaaccctgctgtctaaactcgagatctggcttaggaagatttttataagattataatgtcattgagcacctattacacatctggcccttggccaggcacttcacatttgttagggagaagggacagatgccacatgggtctgggtaggaggctctcttgacttaaggctgaccagctctaggtccccaaccactgcctgggaatggctggaggagactggagaggtaattcagagacccaggatctgcttagagtgtatgttagaagagggtgcagaggaggggagaggtgaaggggagagaacgtctttaaaattcaggacctctgctagaggttgctaagacaaggagatgagagaccccaagggcagaagtgtccctcccttctgctctagcgtgcattcttggcaggggtgaaattgcatccaaaagggtgaaaactgattcttggagattgggaggggacttagatatcacaatgatttgtgccactcccaagagccacagtacataaacagatatacagtttatctattgttttaacatttcgtgagggagatgaacagcttggttaaaaatatctgaaaggggccgggtgctgtggctcaaggctgtaatcccagcactttgggaggccgaggtgggcagattacgaggtcaggagatcgagaccattctggccaacatggtgaaactccgtctctactaaaaatacaaaaattagctgggtgtggtggcacgagcctgtaatcccagctactcgggaggctgaaccagggaggtggagattgcagtgagccgagatcgtgccactgtaatccagcctggcgacggagtgagactctgtctcaaaaaaaaaaaaaaaaaaaaaaaaaaaaaaaaaaaaaattgaaagggccaggggtggtggctcatgcctgtaatcccagaattttgggaggcggggcagatcacctgaggtcaggagttcgaaaccccgtctctaccaaaaaatacaaaaactagctgggtgtggtggcacatgcctgtaatcccagctacttgggaggctgaggcaggagaatcacttgaaccgaggaggtggaggttgtagttagccgagatcactccactgcactccaacctgggtgacagagtaggactatgtctcaaaaaaaaaaaaaaaaactaaaaggtctgtatatgggagtgattatgaaaacaacaacaaccatcaacaacaaaaactggctgggtgaggtggctcacatctgtaatcccagcactttgggaagctgaggtgggaggatcacttgagccccaggagttcagaaccagcctgggcaacacagtccaaccccatctctaaaaaaaatttttttaacattttttttaagttgagaaacactctgctataggaaggccagaggtcctgagccagagccagctagaatgtccccctcctggcatctgtgagttggcagcttttgggcaccccacccaaggcaggatctggcaaacataagcgatctctttgcaaagcattttctaaaagaaactggagaaaatacgtgtaaatgttttcctcagctgcagggagtgggtggagagggcacagaacagaccccaggcctgagcctcatgatggccctctccaaagaggctttgagccaaactgggttgtccctcaggaggaggcagcagggggaacggcagaaccagaagccatgcgccttcatgctaggcagccttcgggtgcagcttaagtgtgggggagcatttactactaaaaacagaaaccaagaagtggggaggccccttccattcccctcccatccccactgtatacatcccattctcctgaactttgcataacgccagtgttctcacagtacccggcacccgtccacagtgggcagtgactggggatggtggccctcctggcagtgatcaccactaggctgtgggctgacagtggactgaagagataccccacgcccacagaacgggatccgggagaccctaaacactcccaccggctgtcagctcctctggggtgggccggggcccaggctctgggtaatatggcagtgccctaggcgtctggtcaaaaggtgggagctcaggcactgtctcaggcttcaggtcaaagggctcagtctcaggcaggtcaaaaggcacgatcttgggtgtggccaggtcagagggtgcattcggcttcttcttgggctaagatgaggaaaaggggtttaaatggggcttggggtgggtgcaaaaggagttgagaaaaaagggccttggtggcatgcagagtaggggctggtgagtagggaggggagcacaatgtattaggatggaaataaaccactttttttttttttttttttttagaaatgggggtcttgctctgttgcccaggctgtagtgcagtgcacaatcatagctcactgcagcctccaactcctgggctcaagcaatcttcttacctcagcctcccaaatatctaggactacagttgtgtaccatcaaacccggctaattttttttttttttttgatagagacaaggtctcactatgttgcccaggctagaaactattttattttatttttttgagacagagtctcactctgttgcccaggctggagtgcagtggcacgatcttggctcactgcaacctccacctcccaggttcaagtaattctcctgcctcagcctcccgaatagctgggattacaggtgcatgctaccacgcccagctaattttatacttttagtagagaccgggtttcactgtgttggccaggctggtcttgaactcctggcctcaagcgatcctcttgtctcggtctcccaaagtgctgggattacaggcgggaaccactgcgcctggactattttatttatttttttgagatggagcctctctctatcgcccaggctgctaaactgtagtgcagtggcgtgatctctgatcttggttcaccgcaacctccgcctcctgggttcaagcgattctcctgcctcagcctcccaagtagctgggattacaggtgggtgccaccatgctcagctaatattttgaaattttagcagagatagggtttcaccatgttggccaggctggtcttgaactcctgacctcaagtgatctgccctccttgggctcccaaagtgctgggattacaggcatgagccaccatcatgcctggcctagaaactcattttaaatgcttcatcaagagggccctgggagctgggcacagtggctcacgcctataatccctgtaatcccagcactttggaggccaaggtgggtggatcccttgagcccaggagttcaagaccagcctcagcaacattgcccaggtctctgcaaaaaatactgttagtggggcctgttggcacatgcctgaaatttcagctactcgggaggctgaggcaggagaatcacttgaaccagggaggtgaagtttgcagtgagctgaggtccagccacttcactttagcctgggcgacagagcaaaagtctgtctcaaaaagggaaaaaaaaaaaaaaaaaaaaaaaaaaaaaaaaagaggtccctggggccaaaaggggtggggcaaactcaagcccaagaattaataaacacagcttcaattgagcccctcccttcctccctctacaatattccccagtcccattcttgggcttccatctccaatccttccccagccataatcataggaagactatggaggctactaggggtggataaggagttttctaaggggctagttgttggattataactggggaggctcagatgagtaaatacaaaggcacacaacttcactgtcttcagagtcagactctgccaatcccagttttgtggttgttgtttttttttagacggagtcttgctctgtcacccaggctgtggagtatagtggcgtgatcttggctcactgcaacctctgcctcctgagttcaagtgattctcctgcctcagcctccctagtagctgggattacaggtgtgtgccaccatgcccggctaattttttttgtatttttggtagagacggagtttcgccatgttggccaggctggtcttgaactcctgacctcaagtggtccacccacctcagcctcccaaagtgctgggattacaggcatgagccagtgtgcccagattaatctgttttcattcttccctggggtagggtggacacaggatgctaccccaaatgaggagagggataggcatggaagagggacatcctggcaatttccctttggccacgtccccaccttctgtctcccttgccacccctccctcttgctaccacttaagatatcatacactaaaatgcacagagaaatcaggatccaaaaccaagctctatttttttttttaagatagagtctctctatgctgtccaacctggcttcaaactcctagtctcaagcaatcttcctgcctcaacttattgagtagctgggactacaggcacacatcactgtgcctggcaaaaccaagctatttttatgacaggtgagcctatgtcctgggacctctggacctctgcggcagcccccaactctctctcctgaggggctgagttgtggaagactataggcttcttgctttgagcaatcagatgccaggcgagagggacacttggcggcactattggactcaggcaatagcagtatttgataaagcctgtagtctcaaaaaaacaaagcagcaggtcccaacctcccctgcagggtacaaggaggaggtgggagtggcagagaggctgaagagaaagggaaacaacatgtccctctcctaggtatgtgtggagtccctgccagggcacaccacggctgaccaggagctccactcctcccctacgcccctcccctccccaacacccctcctttcccccacttttctcccctacacccctcccctcccctacacctctcccctcccactgtcaccaggccaggtgaccacacattgcctctacttcagcacttacaaggctaagcagccaatggccaccaatgctggccactcatagccaacgccacacacacaaacacccatacacacgcaaagcagccccagggccaggactgtgcaactaactccctcagcaagtgtcggagccacagctagccctagctttgtcagggctagtcttcactcagctttctgctgcagagcccagaacggaaggagggggtggggagcagtgagtgtagcggaagggtacacctgggttctggctccagtttgactcccaatcacttgagtgacaataggctagtgacttcccctctctgggcctcagcttcctaaaccacaaaatgaaggagttgaagttgattatttgcaaagtgtcttctagctcaagaagtgtataatgaggccgggtgcggtggctcacgcctgtaatcccagcactttgggaggctgaggcagacggattgcttgagctcaggaattggagaccctgggcaatgtggagaaaccccatctccaccaaaaaatacaaaaattagctggatgtggtggtgcatgtctgtagtcctagctacttgggggcctaaggcaggaggaatgcttgagcccggacgacaggggctgcagtgagccgtgacagctgccactacattccagcctgggcaacagagtgagaccctgtctcagaaaaacaaaacaaaacaaaaaacaaaaaaaaagaaaaaaagaaaagaaaaatttaaaaaatgctaatgacagaatgatgaaatattcacaatgttatatttccaaaaaaaaatggcccaagccactcctacttctgaggttagttgcttagcaataatatcccctcccctcttgctatcagttgcccactctttgctgtctcctcatgcttttgactttgatctttacaatatgaaaaataaaaataaaaaggccgcgtggctcacgcctgtaaccccagcactttgggcggccaaggcaggagtatcacttatgcccaggaattcgagaccagcctaagcaacagtggggaccctctagaaaaaacatttaggctgagcacagtggctcccacctgtaattccagcactttgggaggctgaggcaggtggatcacctgaggtcaggagttcgagaccagcctagccaacatggtgaaaccccgtctctgctaaaaatacaaaaattagccaggtgtggtggcacatgcctgtaatcccagctacttaggacggtgaggcatgaaaattgcttgaatccaggaggtggaggttacagtgagctgagatcacgctactgcactccggcctgggtgacagagcaagactctgtcaaagaaagaagagagagagagagagagagaaaagaagaaaagaagaaggaaagaaggccggaaggaatttaaaaattagctgggcatggtggcttgtgcctgtagtaccagctacttgggaggctgagatggtgagatgggaggattgcttgagcctaggagtttgaggctgcagtgagctatgataccaccactccagcctgggctgcagagctaagatcctttctcaaaaaaaaaaaaaaaaaaaaaaaaagggagggaggaacccagggatagcatgatttcctttcgtcttgggaatacccctaaaaataccctccctgctttggacccagtgaccaggaaaaacaacccaaactcagtttgggaggaagggatgtactatgcatactctccatggccgctgggttttagggatgaaagggaccaaagccctgggttgagaatatttttggacaaaggtttggggttcttctagagcaaggtagccctaatttgcgttgaatccaggaaagaggtacaggttggattgcgatttggggaggagaagccatcaggctctcgttccagccctggtgccctaccctttaatgcccatgagacacctaatcccttaaatgcttcctggcccttatccccaggcacttggagcaggtctgatgggcctttgctgctggtccatatgtaggtcactgactttgcctcctcaaaactgctccagaacacatttttagtcatgagccgcatagcaacgtttcagtcaacagacggcatacacaaccgtggtcccataagattgtaatggaggctggttgtggtggcttatgcctgtaatcttagcactttgggaggccaaggcaggtggattgcttgaggccaggagttcgagaccagcctggccaacatggtgaaaccctgtctctattaaaaatacaaaaatattagccaggcatggtggctcacacctgtaaatcccagctactcggaaggctgaagaagaacaattgtttgaacctgggaggcagaggggttgcagtgagccaagattgtgccactgcactctagcctgagcaacagagcgagaacttgtctccaaaaaaaaaaaaaaagattgtagtggagataaaaaattcctatcacctaataacattgtagccatcataatgtgttagtgaaatgaattactcaagtgtttatggtgattgctggtgtaaacaagcctgctgcactaccagttgtataaaagtctagcccatacaattatatacagtacataatacttgatattgataagacatgactgtgttactggttatgtatttactatactatactatttttttgagacagtcttgctctcttgtccaggcacaacctccatctcccaggttcaaacgattcccctgcctcagcctcccaagtagctgggattacaggcacccaccaccacacccacctaatttttgtatttttatttagagatggggtttcaccatgttggccaggctagtctctaactcctgacctcaagtgatctacctgcctcggcctcccaaagtgctgggattacaggtgtgagctaccgtgccatggctattgcaccttttctatgtttagacacatttagatacacaaatacttaccattgtgttatagttgcctacagtattcagtacattaacatgctgtataggtttgtagcctaggagcaataggctgtatcatatagcctaggtgtgcagtaggctatactgtttaggtttatgtaaagttactctatgatgttcacacagtgaggaaatggcctaacactgcatttctctgaacatatcccagtcattaagcaatgcgtgactgtatttcctttttttttttttttttttgagaccaagtttcgctcttgttgcccaggctggagtgcaatggtgcgatctcggctcaccgcaacctctgcctcctgggttcaagtgattctcctgcctcagcctcctgagtagctgggattacaggtatgtgcaaccacgcctggctaattttgtatttttagtagagacggggtttctccatgttggtcaggctggtctcgaactccccacctcaggtgatccgcccgcctcagcctcccaaagtgttgggattacaggtgtgagccaccgcgcccagccccgtatttccattttatccccactttctggatctaaaagagccctactctccaaattgttgcctggagggatggttaatgggtacaaaaatacagttagatagaaggaataagatctaacgttcagtagcacaatagggtgatagagttaacagaaattattgcgtatttcaaaataattaaaggagtggaattgggatgttcctaacacaaggaaatgataaatgcttgatatgacggatactctaattaccctgatttgatcattatacattgcatacttgtctcgaaatatcacatgtactccaaaaatatgtacaactattatgtatccatagtaattaaaaataaagccttttaagtttaaaaataaacaaactggatgcacgtggtagctcatgcctgtagtctcagcactttgggaggcccagacaggagaactgtttgaacccaggagtttgagatcagcctgggcaactaagtgagaccccggactctacaaatatgaaaaaaaacaatttgccgggcacggtggtgggcacctgtagtcctagctactcgggaggctgaaccaggaggatcacttgagcccaagagttcgagactgcagtaagatatgactgtgtcactgcactccagcttgagcaacagagtgagaacttgtctgaaaaacaaaaccaaaaaaccccaaaaaacaaattgttgcctggaagaattggttctttaatgatcatagttccactcatctgcatggcattttattttatttattgttgttattattattattattattatttttgagatggagtctcactctgtcgcccaggctggagtgcaataacacgatctcgctcactgcaacctccgcctcccaggttcaagccattcttctgcctcagcctcccgagtaaccaggattagaggtgctcaccaccatgcccggctaatttttgtattttagtagagaggggtttcaccatgttggccaggctggtctcgaactactgacctcaagtgatccacctgcctcagcctcctaaagtgctgggattacaggcacgagccacctagcccggcctctgcatggtattttagagcaactgcctctatattcacaatctggcctgatcgtcctgcaaccctcagtccattaactcctataactagtagaattcacttctctcatttactagctgttgctagccaagtgtcgcctgatagaatgcaatgtcaaactgctaggttttgtttgggagacagggaaggaaatgccagagaagggcagtaatgactcagaagtgagtttaagatgagggctgtgataccttggggtgggaggtgctgaatttcgtgtgtgtgtgtgtgtgtgtgtgtgtgtgtgtgtgttcaaatgcaaacttaaagctgtgaaatcattaagtctagaagttccctgaatttggggtggggccatacaagggattccctccttttctccccaggaatagggtatggaaggccagatgtctccatcccacaacgggggccttcccatcccttggtgttctctgccccgcccccactgccacatcatcacctcccacccctgtagtggggaatacagcatcccttcccctatggcccctccagagaattcacaccatcccaggaaactttctccaaatctctgtctctttgcctggccacccaacatcctcccccttcagccggactttaccataaatgctgctgcccccaatcttccctaataggcctgccaaggcacagagctatttttacctccttcccttctcaggcctgcagacctctgggaggagcaggagcagcctctgctttcctccagcagccgggtccccacctggaacatctgctctgcagctcagggaagttctgctttcccaagcctcaccccatttgctggaatcttttccttacgtctgaagtcttccccaggttgggaccatttcagttcttagttattccctctgtgggtttgggactccatttgagctactcttactacctcaactctctgtcacccactggccttggtttagtgcagattcatttgaagccacctgtgattagaacacattccctcccaccccctaaaatatagacatatccctgcagattgctggagagggcagaacagagggatgccagtggcctctgcagataagtctttctccctccatacctttccctcttctctcagaatctccatctttggcatagggaagtttacctccaggccaagacttttcccaggttctatggtctgggatagttagcgtgagaagggtcacccctcgagctcttcatggtggctctcggccacaccaggctctggaggaaatatagagctggcttgctgtcccagacccctgtcttgttccgctcctctcaatgtccccagtactaagcaggtctcttaaaaaacgtcaaaagcccccctctcatcctgcgtcctccaagcagttagactaagtggaaatagctctgggcaaacattttctatctaaatagtgcttaagtaggggaagtaaagcttttaaaagccacgtatatgcctcctgggaggagtctgtcatccgtgggtaagggtggggagggggacaagtgccacttctgcctctgtcccaccacctcagataggtaccagctgacccacctttctgtctctactcttcccagatacttgtcctgatttgcatctatcttaactcctcctggggaaaccaagccaaggaccccctcgcctcaccccagatggtcactcagaacccggctcgaccaggccccagagcagtcagcagagccacaactcccggaaaggggtcttctaacttggagggtgtgggaaatccagccttccctttctttccattcccttcagcagggagaggaaggggagaggggagcatagactaacccccctgccccacacgatcccgcctccctggggttaggagcatcagcaggcctttgggaggcggggaggagccaggctggaacacttgccgcccagcccaaaatctcatccccgatggcactgcggaagcggcgtggagaggagcagcatagaaacccgagactcccaggtttattgggggttatgatccaaaagctacatttttatccaagtgtgaagaatggggagagctgcaaagaaagcaacaagtggccccgggcggagccggggggtgggggcgccagcctcctcccgccggctgcgctgctgcgcctggcccccgcccccgcaggcatgcggggtgattcacctcgcccagactgcgcccagaccgccggaccccgcaggggctgtccacccactccaccagcccctcttgcactcctgacgcccactcttccccgcccagccccgcccgcttccaggaggcccagggtgccagcgcgccgcgggtgagggtgtcctcaagggcctgaaaatgcctggtggccaggagcagagagcagcgaggggacaggggtgggccgccgaggccgatgtgggggcgcgggggcgcagggtctggggaggaggttggcggtcgcgttccccgcttggcacagcccccgctggtgcgtgcctgagccctgaatcacccgctatatcaggcccgcaggcgcagaggccccaggcccgggccccgcagccagtgtccgcttacagcggaccccaacgatcgcgagggacccctgactttcctagaaacttcccccaagtaggaagaagtttgacagagccaattagggagggagcggtctgcgaggggcagcgtcctcgagtccacccgctaattcggttctgctacaagtttgggacccgagggaaggatctgagtggggaggtgcgaggtgcagagcgcgcccctctacgcgccccaggagtccgccgctccctccaccccatcctaccccacccaaccccaccccagccgcgctcaccggaaggagggtggatctgccgggcgcccgggccaggctgggaggggagcagcgccacgggcaggtctccccaccccaactcccaggcaggggacgcgggccgggcgcgggagctctgggcgccttccgccctgtgggctcacctggtagatcatgactttaaagttgcggcgccgcagcagctcggcctcgttgacctccagcttcttgatctgccccgcctggcgctccaggctgccgcgcacggtcttcacgttgacgctgaccttgcgcaccttctccagcagcttgctcaccgtattgctcgtggtggcgtgcgccttgcccagcttgctcagctcgccctggatgctctgcactgcgccctccatctccgcctgccgctcctccagctgtgcttgagtcagctggatctggtctacggccccgatgattttgtccaggaggctcagcaccagcacgccgttcacctggtccgacttgatcagctcttctgagccggcccccgacggctcctccgctgcctgagccccagcggaggaaggctccggggcctcggcgtcggggtacccgggaagcggccgctcgacaatatagagcgtggggtcctccatggctacccggagccgtgcgggaccggccgggtggggctggagctggagcgggagacccggagagaagcaggagcggaagggaggagagctagcgggcgagagcggagagcagaggaaactcgagccacgtccgtgcgcaccgggacagcggccagaactgctgggcgggggatcggtgagctccccagctcccgggccaaactccggagtctgatcgctgattggctggccccaccccagaaagggagggaccggggcagaaggggagatcgacgaggcggggcggcggagggggacccaagagccgagcgccccacccttcccgggatggttggaatagttggagcgggagactagggcctccgctggcggcgggagcgggacgggcggaggaatgcgagctgaggaacggaatcaggttctaagagtgttgctctctgtttccctctcacttgaattgctcatccgaaaatcctcaagatctgggagccgggtggaccaggagattctgaaattataggcaaaatcttgtatttgcctttacctagattttgagcacaaaaggacccttgccctttacaatattttctaagaggcctctcggatttcctcatcaccaaccccaaccaggttactaactcaggggtaagcttagggggttgtttgtggggggcggggggagaaagagagaacgtatttggggtcacggtggtggtgaagggctgcgaagctcctctaagttctttttagaattgccctaacagagtagaattaagatgggcaatcaaacggaaaataaagcccacctcccaacccccctttctgagacagggtgtcactctgtcacccaggctggagtgcagcggtctgatcacagttcactgcagcctcgacctcttgggctcaggcaatcctcccacttcagcctcctgagtagatgagactataggcgcttgccaccacgcccagctaatttcaatttttatttttttcaatttttatttttttaagagacggggtgtacactattttgaccaggctggtctcgaactcctgagctcaagtgatctgctggtttcagcctctcaaagtgctgggagccaccgcgcctggtgtaaagccctttttaaaagcccacctctcttaggccaggcgcggtggctcatgcctgtaatcccagcactttgggaggcccaggcgggtggatcacgaggtcaggagttcaagaccagcctggcccaagatggtgaaaccccgtctctgttacaaatacaaaaattaggccaggcgcagtggctcattttgggaggcggaggtgggtggatcacctgaggtcgggagttcgacctcagcctgaccaacatggagaaaccccatctctactaaaaatacaaaattagccaggcgtggtggcgcatgcctgtaatcccagctattcgggaggctgaggcaggagaatcacttgaacccggggggcagaggttgcaatgagctgagattcgcgccattgcactccagcctgagtggaattctacagagtagaattcctcttttttccaaaagctttttcaatccttagtagaaggaatttaaattactttaatacatttctcctaaattctaaagtaagttggtaatctgccagttggtaatccactgtctgagtgcagacagagtgagactctgtctcaaaaaaacaaaaaaaacaaaaacaaaagcaacccacaaacccacgtctcacctctctctaaaactcacctttccctgtgttccccctcccaccgccccctcagaggcagctgacaccaatctcagtgagcaggatctaggagtccatttctctttcaagattccagggactaacagtaagccatcggagagaccatcaaatcccaccccctcatttgacagacaggaaaaggaaagcctgcagaagacaggtggcttgccagagatcactcgcaggttagtgttggcattggcacttgaacccaggtctggactcctgctttcatgctctttccaccttctgctctaagccttccactggggcagggagacaggcacccacagccactccccaactcccatgtgctgtttcagaagattaaccaaagcatattttcatccatgctgggtacaagggagcaggcaattctgagcaggcccaaggagggtccttagtgcagaaagtccagaaatagggaggctgcccatcctcccccattttgctgtctagcacagcactggtgctgtgagtgtctgaagtggcgccagctccctttcccacagaaaagcggcaacccttttccctccttaggaaaccacacttgggtttccccagctggctggatgatggtcctggcaaaaggtcacttctagtctggtatccattatcattaggaagagtgaaaaactggtctatggggacccagggcctcctcaacccagacagagaacccacaaactcagaaaggagaccgacagtgcagggactgggttagtgccctaacaacattgtagggttttttaagggtttacaacaccatatttgttatccgaaattctcatagaaaatggagccatcaactagggctgtttatcaggttatcctgaagtactgtttctgctagaaaggcaagatacgtggttactggtaacctctttttttcctttttttttttttttttcttgagatggagtctcactcttttgccaggctggagtgtagtggtgcagtcttggctcactgcaccctccacttcctgggttcaagcgattcttctgcctcagcctcccgagtacctgggactacaggcacgcaccaccacacccagataattttttttttgtatttttagtagacacggggtttcgccatgttgggcaggatggtctcaatctcttgagctcgtgatccacccaccttggcctcccaaagtgctgggattacaggtgtgagccactgtgccccgcctttttttttttttttttaagacagagtctcactctgttgaccctgcagcctcgaactcccgggttcaggtgatcctcccacctcagcctcccaaatagctgtgactataagcgcacaccatcacacccagctaatttttgtattttttgtagaaatggggtttcaccgtgttgcccacgctggtctcaaacacctaggctcaagggatccacctgccttggcctcccaaaatgctaggaatacaggcgtgagccacttcggctttgtgttttttccaactttttttttttttttgagacaaggtcttgctctgtcatgcaggctgagtgcagtggcacaatcacagctcactgcagtcttgacctcctggactcaagtgatcctcccacctcaccctctcaagtagcttggactacaggtgtgccaccacaccgggtaccctaacacttcaataactgttttctcacaaacaaatggctttctcatttgaggctcaagtagaattaagctagtatataagatcatatatacacatataactgctagaactggcagattaccaacttactttagaatttaggagaaatgtattaaagtaatttaaattccttctactaaggattgaaaaagcttttggaaaaaagaggagtgacagtagagaaccttataggaccttcatttcttaagtgtcccataagatccttagatgatgatgattattattattatcatttttttttttgagatggagtctctctctgtcacccaggctagagtgcaatggcacaatctcggctcactgcaacctccacctcccgggttcaagcgattctcctgcctcagcctcccaagtagctgggattacaggtgtgtgcccccatgcccagctaatttttttttttttttgagacggagtcttgctctgttgcccaggctggagtgcaatggcatgatctcagctcactgcaccttccgcctcctgggttcaagcgattctcctgcctcagcctcccaagtagctgggactacaggtgcctgccaccacgcctggctaatgttttgtatttttagtagagacggggtttcaccatgttagccagcatggtctcgatcttctgacctcatgatccgcctgcctcggcctcccaaagtgctgggattacaggcgtgagccactgtgcctggcctcgcccagctaattttttgtacttttagtagagacggggtttcaccaggttggtcagcctggtctcgaactcctgacatcaggtgatccacccacctcggcctcccaaggtgctgggattacaggcatgagccacagcacccggcctctaaaaaattttatctctatcccagcaactagtttcttttccaggagacatcaattattactatattctcttttttttttttaggtggagttttgctcttgtttcccaggctagagtatagtggcaccatctcggctcactgcaacctctgcctcccgggttcaagcaattctcatgcctcagcctcccaagtagctgagattacaggcatgtgccactacgcctggctaatttttgtatttttagtagagaaggagttttaccatgttggcgaggctggtcttgaactcctgacctcagatgattcacccacctcggcctcccaaagtgctgggattacaggtgtgagccaccatgccaagcctattattactattctcttgcggaatcttctatagactatttctgcatatatgatcatacatatatatatttcagcactttcctgttttcagttattaatatgttttatggatagttccatatcagtacatgtagaactgccttgttttccaatgtatacgtctactatatttgtttaaccagttccctatcaatggacatttacagattacaatttaaatctcatgggggaggagttgctgaagacaagtgggatttttttgtttttgttttttgcttttgaggcaggatctcattctgttgcctaggctggagtgcagttgctcaatcagggcttactgcagcctcgaactgctgggctcaagcaatcctcccaactcagcctccagagtagctgggaccacaggtacacaccaccacacctggctaatttttaaatttcttgtagagacagagtcccagccatggggttttgccacgttgcctaggctggtcttgaactcctgggctcaagtgatcctcccgtcttggcctcctgaagtgctgggattacaggaatgggccactgtgcccagcctcatcaggaaagtatttctataccacttcttcaaacaggaatgtcagaatttgtggatgagtcaagttatgtcccaggggtagtccagtgaatacatctctgactcatttaatgcctccttaatggatgatttctgtaaaagggccctacccctgcatgcctatgttggagaaaaatctgcatcaacaagtttctctcacattccttttcttactaaatgccagctaagtccaacagggggcatgctgaggcatattgtactagctccaccagcacagatgccgcaaactggagcagagcagtcctttccagagcatttcactccattccagtgaaaataagcagtttctcttcatttgtaactgcattcagcatgccattgcctgcattcagggttgttggtttgcattttccattgctcactctatttgcttgctgaaaggcacactgttccattgtgtgctttcagccactgagacagaatccataaaagggatagtgaggtaaaagcaaacaacccctttggcccagaaaaaggacaccaggatgcaacatgtcagcagttagaatcttacagggtgctctatcgtattcttccatccatctacttgttcaataaaacatgactacttcgcactagccatttactgggctagggactttaatgaggataaatcaagtctagtccttttttttttttttttttttttgagacggagtctcactgttgcccaggctggagtacagtggcgccatctcagctcactgcaacctctgcctcccagattctcctccctcagcttcccaagtacctgggatcacaggcacccaccaccacatctggctaatttttatagagttggggtttcgccatgttggccatggctggtcttgaactcctgatctcaggtgacccgcctgcttcggcctcccaaagtgctgggattattggcgtgagccactgcacccggccttttttttttttttgagacggagtctcgctgtgttgccaggctggactgcagtggcgcgatcttggctcactgcaacctccgcctcccgggttcaagtgattctcctgcctcagcctcctgagtagccgggattacaggcacacagcaccatgcccagctaatttttgtattttgagtagagatgggttttaccatgttggccaggctggtctcaaacacctgatctcaggtgatccacccaaagtgctgggattacaggcatgagacaccacgcctggccacccccagcattttttttttttttaaagacaaagtcacattctgttgtccaggcttgagtgcagtggtgcgatctcagcttgttgcagcctcgacttcctgagctcaggtgagcctcctatcagcctcccatgtagttgggactacagctgtatgccactacacctggctaaattttttttttttttttttttttgtagagatggggttttgccatatttcccaggccactcttgaactcctgggctcaagtgatctgttcacctcggcctcccaaagtgctggcattacaggtgtgaaactctgcacctggccagatgcatagtgtctgacacagctgaaagctcccccccagcatagggaaagcagtcactactctcaggaagagtggggaagggttcacaggtgagggtaggtacaaaggagggggaaaggaccccctcccaaacccagtatcttgcggtgtgaaagggcactggggaatagccaagcactgctcatctcctcttatcatggttctgccataagtcttatcagtttacatttagggagatccagcaaagggtgtaatatgtaatatgttctgttcagttttggatctgtgctgggagagatcccagggagactgtgtgttttgttaataataaacagctgggacaaatgatgtgtcttcacattgggacaaccgtctcacatgggaggctagccctcagcagctggctcacagctgccacaaacaacagtgattttttttttgccagttttataggcactattcttgtctctctgatatacatatatgaaaaatgcctataatatttgtatgtttctctttctcaaaatcccttcctttctttgccttcaaatattaatatatagggtaacttccctgaaccagaaaacagtcaaaattatttattaagtgctaatttatgcatagtttggtgctagaaaccatccaaaggacacaaccagcacttttgctgtggagtgggaattttagtttcagagaagcagtgattcaggctaacaaacagaaaatacaaaaaaacaggagaagggggctgcagaaaataaagcaaaatacatacagttttaccagcgtgggcaaagtggtaaaaccccgtctctactaaaaatacaaaaattagccaggcatggcagcgtgtgcctgtggtcccagcaactcgggaggctgaggtgggaggattgcttgagcccagggggcagaggctgcagtgagccaagatcgcaccactgcactccagcctgggtgacagagtgagaacctgtctcaaaaaaaaaagcaaaactaagaaaccctagattccaccaattgtttctccttttctttctttctttcttctttttttatgttgttgcccaggctggtctcaaactcctaagctcctgcctttgcctccaaactgttgggattacaggcatgagccaccacacccagccttttctaattttatttgaactctgatttagcactgctgaccaatttatctttgagattcttccctcttagccttggacactgtactatttttatttacttgtcccatttgctagcttattttttcttcctttcattttctttttttaaatagctttatttatttatttatattgaaacagggtcttgttctgttgcccaggctggagtgcagtggcatgatcacagcttactgcagcctcaacctcccaggctcaagcaatcctcctacctcagcctcccaagtagctgggactacaggcatgcaccaccacacctgacttacttttgtatttttgtagagacaaggtctcactatgttctccaggctggtcttgaactcctgagctcaagcgatccgcctgcctcagccttccaaagtgctggggttacaggcatgagccactgtacccagctaattttcaaaaattgtcgtagagatgggatctcgctgtttcccaggctggtttcaaactcctaggctcggcttcccaaagtgttgggattacaagcataaactggtacatttggacaaaaaaaaaaaaaaagcttttaatactgctttaaaaggttaaacaatataactttattgaggtagaattcacataccacacaattcacctaaagcatacaattgaatagattttaccatattcacaatgttgtgcaagaatcaactttcatcagcccccagaaagcccccgacaaagaaaaaacactaaagggagactttatcctaaagaatgtttgcaaggaggggaaaaagactgttgcaatacggggagggagtctattgcaatagggagaaggatcggcccatagttctgcaaatgtcttaagggccagacctttttccttttatagagaggagtaaacaaagctagaaagaaccaggtgtagagaataggaggaaagtggcctgatgagagaatagatcagagaatgttttaccctgaggtcaggctatcctcaggaggggttgtgtgctggctcaggcccagtgagggtgggccagagttcagggcctggaggaagaagaaaagcttaaacaaaatgtgttattttttttttttgaaacggagtttcgctcttgttgtccaggttggagtgcactggcgctatcttggctcatagcaacctccgcctcccaggtttaagagattctcctgcctcagcctcccgagtagctgggattacaggcatgcgccaccatgcccggctaattttttgtatttttagtagagacagggtttctccatgttggtcagcctggtctcgaagtcccaacttcagattacaggcttaagccaccgagcccagccttttatttatttatttatttttgagacggagtctcactctgtcacccaggctggagtacaatggcgtgatctcggctcactgcaacctccgcctcccgggttcaagtgattctcccacctcagcctcctgagtaactgggattacagacacacgccatcatgcccggctaatttttgtatttttgtagaaacgggtttcactatgttggccaggctggccttgaactcctgacctcaggtgatctgcccaccttggcctcccaaagtgctgagattacaggtgtgagccaccacgctgaaccaacaaaatttgtttaatgagcattttgttcatcgtgatcagtgttgggaaaaccagtttagctggtcattcatgaggcagagaataagaatttgaagttctgtgtctgttcctgtcacaggtaaacaatggggggcatctgcgagtcacatggggaagggtggttcttggcagtaaacaaaaacataggggattcctttaaccttggatgttttccaagagcacagggctcaggtgaaattcaccactgttacctcatacccattagctgtcactccccactcctctcttccctgtcccctagcaaccagtaagttttaagtctctatagattttcctgttctgaacacttcatatgaatggaatcatacaatttgtagccttttgtgtctcgcttcttttacttagcatgttttcaaggttgatctatgttgtagcatgtatcaatacttcattcctctttatggctatattccgttgtataaatatgccccatgctgtttatccattcatcagctgatggacgtttgagttgtttccatttttttgtttttttaagagacagtctccctgttgcccaagctggtgtgcaatg

SEQ ID NO: 465 - DNA, 122630 bp, Homo sapiens
aatcttgtttacagatggatggaatatttgctgtttaatttgcaaattctaaatgggattcgtcgacgttttctccaacctcaaacctatctattgtccctcttacctcttattcagccttggtgtgtgcttggctatatatactattctaccagtatagatgatgtcagtataaaaatgctgaaagagagctcaaagaaaatgggtcatgtaccctcaaattgaattctggttctgtcactaagcagccatgaagccatgagaccttgtgcaagtattcttttccaaacataaaatattacctaatgaatatgcatttccagggtagaagtgatccttaagtacatttttaaacacagtcatgcattgcttaatgaccgggatatattctaagaaaagcaccattagccaatttctttgttgtgtgaacattacatagagtgtacttatacaaacctagatggtatatatttttattttctatatattttatcatattgaaaaccaaatgtcccagcatcattactgaatatcagtcatttccctgcttgatctgcaatgccaacatcaaatgcaatatattaggtttctataaatgctccgttaaagccttatgggaccactgtcataaatgtggtccatcatttgtctgaagcactgttacgtgacgcatgactgtaacactattaggcagggagagtagagtccccttatgagaattgctgccctcaattttcatagaaaagaataaatttcattatgcatccaatgatttatttatagcaagtgaattaatgtgtggctactgcagctatgaaagaaatacaacttcagaggcagtctatgcgacctcaaagagttaggaaatgctttggctagtcttctaaggtgaccaaagtgatagacctgtgattcctttgttgtggtcttgtcaaaagtctgatcttacccccaacctccaaccaaaagatagggatctgcagtgagaagctcagcaaagggatgagaagccagaatggctgtgcctaaatggccaagtcaggatgccaattactgggtgcagtgaactggcatagggatatactccctcacatccatttgagccttcctctttgaaacaatgcaaattgaggaaatgctgacaactttgattctagctaaatgggcatagcgttaactggttaaaaggccatcgctaccctcttgtcattcagaaatggccatgtagttcacttcttgctgatgagacacaaatggaggattgttggaggtttctagaattctttctcactctggagagcaattgtaagcatttgtttgtctcccactggatataaacaagaaaacatgaagcactaattgctgctggtagctgtcttacaacctaggagtagtgaatcagccatagaatgaggctgaaaaggtaaacagcagagtggagagaaagaaaaactgatatttgatgaccttcactgagtctaccaatcacaaatatgtcctgccttttaacttgcattacataaaaatttctttagtatttaagtctgagttgggttttctggtacttgcagcccacagtatcctaacatatgcatgggatgaagtattatcctctagttgtctcaaatatatggtgatgtactgcctcctaaacaaacagacgtatgttttcttctactactctatcacctatacttatggaactcaggcttcaatctgcactaaaccacctgaggagcacattaaaatgcagagcccaaaggcctaccctcagggattgattccataggtggctataaatccattttatttaactttaaaacaatattttagacacagggtctcactatgttgtccaggctagcctccaactcctgagcttaagggattcttctgcctcagcctcctgagcagctgggattacaggcacataccaccacacacagctcacaaattcacttttgacaacccaggtgacctgtgacagaatacaacaaatactgctgttgttccaccaatacccatttccctcttaagccttactaagaacaccaagattgcattagggtaacaaggtgaggtgccatttcatctcaaggtgaattttgaaataggtgtggccatgtgacagttctggcctagggtcaggtcccttcctaactgaaaaggcaaagcctcattaggggaaagctcttagccctactcctgaaaaacaatcgggaggcctggtgttaacaggtgttgttttgccaccatgaggataaatatcacaagccaaggatgaagaagaagtaggctacaggaaccctgggtccataataacatcctgaagcagctgcaccactcctgtctgcctatttccagacatcctattaaactggaaagatgaacccctatgtggttatgccactgtggtcaggtttctgtaatgttcagaaacacctcatatttgttgacacacagatgctccaaggaccatgctgagaaatactgccttattaagctaggtatagaagtttcttaatagtttgaacttgatttcttctcttgtattcccttctattcttacctctgtccgaggtgtgtgaaccagagcaactccatcttaaataggagctgggtaatgttgagaacaggccccccaaaatctggccattaactggccctaaaactggccataaacaatatctctgcagcactgtgacatgttcatgatggccatgacgcccacgctggaaggttgtgggtttactggaatgagggcaaggaacacctggcccacccagggtggaaacctcttaaaggcgttcttaaactacaaacaatagcatgagcgatctttgccttaaggacatgctcctgctgcagataactagccaaacccatccctttatttcggcccatccctttgtttcccataaggagtacttttagttaatctataatctatagaaacaatgcttatcaccggcctgctgttaataaatatgtgggtaaatctctgttcgaggctctcagctctgaaggcggtgagacccctgatttcccactccacacctctatatttctgtgtgtgtgtctttaattcctctagcgctgctgggttagggtctccctgaccgagctggtctcggcagggtaaaatgagactgaaacctactgggctgtgttccccaacagttaaggcctcctgagtcacaggataagataggaggttagcacaaaatacaggtcataaagaccttgctgatgaaacaggttgcagtaggccagccaaaacccaccaaaagcaaaatgaccacgagagtgacctctggtcgtcctcactgctacactcccaccagtgccatgacagtttacaaatgccatggcaacatcaggaagttaccctatatggtctaaaaagggaatctgcctcctgtttagcgtatcatcaagaactaaccataaaatgggcaaccagcagccctcggggctgctgtgtctatggagtaaccattcttttatttctttactttcttaataaactcgctttcactttgcactgtgaactggccttgaattctttcttgcacaagatccaagaaccctctcttggggtctggatctgcacccctttcctgtaacgtatttctggcgaccacaaagggactatcgtgcagaaaccctgacccaacagctacctttgcgtaagtagtggggtcctgtaacatctttctgatgacaagggaagtgactgtactgcagaaacccccaacccaaaggctaactttgggtaagtggtggggtccagtaacatctttctggatgtaaccacaaaagggacaataccgaggagacccccccaaaacccaaggaaaatagacggcagcactgattggatgacttggggtaagtggtggggtacccaggtaaagaatggaattgagttagaggcccaccttaggggagttagaatctctcctaagactgagtgggttaaaggcctctcttaataaaaggcaaggacgtttgaccaaccttgggttacaggcccaacttaggacggttagagtcccttctaagatttagggggttggttagaggcccctctcagtaaagtccctaagaacaggtttggtactatggaatgttaactgctattctcgttgtattaatttgccttgcactctttgctgacagctgtgggtgacaggattaggcatgtacaggatcatgggacatggggaacttttccatccctaaaaggggaaacttgagagctaatgggactgctggaagagacttgtttgctaccgacaagcggccacccgaactttttcattgtcggatggaataagtgggtttctctggcctccctaagctcttcaccttccccaccctgccacaggcatactttccttctctacttttttcttttttttttttttgagatggagtttcactgtttcgctcaggttggagtgaagtggtgtgatctcggctcactgcaacctccacctcccgggtttaagtggttctcctgcctcagcctccctagtagctgggattacaggcacccaccaccatgcccagctaatttttgtatttttagtagagacaggttttcaccatgttaaccaggctggtctcaaactcctgacctcaggtgatccatccgccttggcctcccaaagtgctaggattacaggtgtgagccactgctcctggctctacttttcttttcctatcttttcgttattcatggcagccatcttgtccagagaccacatgttgaaactctaagtcagaggttggattaaagatgacagggcacatctgggggcaaatttaagccttgccagtttgatattgggtgctaagcagagtggctaatgtctatgttttatcacatgtattttgctctggtcagaatgaaaaaaataattttcctttatgatgcggcttggtccccagggcaatggtgccacaagccagatcactagggccgctcaaggaaagggaagccagaagcctggcatgccagcaaaagggtaagaatttcttaccagtcagctttctggcttctctctctctgtgcaaatggttaaatgaatggtaaaaaacaaacaaacaaaaacggtgtttatttcctctgtaaagttttgattaatgtgaaaaagaattctagggctagtcttaagctgatgtattttgtagtataaatttgtttttctgttttgaggggtacttcaggataaaacatgggcttagaacacctgtaagcctgcttttcaagaagacccagcaggctggtcagtagcaaacttggctgcaggtccctaaaacaaacaaaccaaaaaaactggatgaagtctccaccttgttttatgtccttgggagcttgaccttttaaccacgtggcggtacattcttttggtctccgccttcagggaacaggaattttagggttcatgtcatagttagctctaaaaatcatattaaatagttaaaagcctttgcgagctcgaaatcaactactctaaactccttctgggaaagaaaatggagactgccctgtgctgtagctcagtaacaaaggtttttgcactttcacagttgcagtccaggttcaattccccacctaggaagtgagttgtttctggtttaatatctgcatgattttgtctgttctattctcctccatggactgtcttaaattttcctttctctaatcacccgggaggttacctttggtaaagttcaaaagccagaaatatcggccgtttggcataagaaattctaaaaggactttattaaagagtgctatggttagaatcagttcaagctctaacagcctggactccttgggaaaaataggaggcaccagagacctctttcctggcccttttcttccaagggctccaccctaaagccagtaatccaattacaaaacttaaaaattggcaaatgaaaaattttactactactgtagtaatcttctgtctttctgtgtagctatatatgtgttgtgtgtaatgtttatataaaagaactcattaattggcttaaacaaaaataaacacaaatcaaatattttgaaagcaaaataaaaactgtaatgccttttagttcgtgtaactttaataattttggggaaataaaaacagctttaaaattttgataaaaacgttcagtctaaattatgcagatcagatattaagtttgctaaatgctttaaggtcataaattgcttctttgacttttaaaaattgttcaatttacctaccttaaagccattagattctagataaggcttggggacatgtgaaattagccatgtaccctacctatacaaagaagattatttaaaaagagattttatataaaaaaggatcttgtatggtaaactcttgtcctaaagtaaaatgactggttgtttaaaaggaaggatgtttaggacaaatcagaaagtccaagaatgtctcagatggtctgtgtaagttgtgaaaagatttgtgaaagggaatttatgcaagaaatgtcgtacaattcaaaggttgttaggcctcctaaatgcttcataaaatgccactatgactcctactgtacaacttgcctgcgttactgctaggtaaggcatgggaacatgtggagttagccacacccctagctatgctggagagtcagcccttatctgcacttctgcctggtgtgtcctgggctaggctccacacctagtacacaattcaaattgcttactaaccagggcttccaccaaaagtaaaagtcactaaaagttaatgttgtaacatgtaattgagactattgaagaaacacttttacatgtaaggtgtgtaaggaaagtaaaatatatttttggtaaaagattataaaaaggcatgagaatgtagtttttttttgcctaaagggttaaagaattgttttaagttggatagaataaagctaaaggtttaaacaaatgtggaaggtttgtaaaaatatatatatatataaaagagagtctgtatgtggacattggctaaattaagggatattattcagtttttctataaattaaacattggaataaaagcacaacaggtttttcttagagcaaaaccatgcttctgctctttaacaaaaacttgtaaagggttataaaaggcttatgagaatcttactttatggtcaaactgactaagattggatggatttatttataaggttttattaagaattgggtttgacataaataatgcactaatgcaacagtgacatttggcttatttggtaagaaagtcatacaggaagtattctgaaatataaaatggtgtttggttttctttgggctgtattttcataaatgtgttattggtatatattccaaaattatgggaaactcctataattctgatatgacttagtgtacattatcagtaacaattataattgttgcataaaatcattgtatgccacagaggtaacaaatttccttgtcaattgtttctttgattgtggctgccctaaaacattttgtcagccacagacaattattactttgttttaatcctctttagaaggtggtttataatcaattatagaactctaacaggtgttcttaaatgcaggtttttctgataactttggagattataacatcagaatagagaaaacaacttttagaactctcatgaagagctggaatgttcatgaatataaaatagaacaggtgttaactaaattaactgaaccaatagaaaactgaactaatctttttaactttgcttaaaatgctgctgatcctttgttttgtttttcagagtcaaggaaacttttcttttgagtttttctatttacagctgttagcaattgagtaaaatatactactgtgaacaaaatttggaacatatttgtttctctctacctgatttctccagaatttggaaactagttgcaagtattcctaacttatggcaatatagtaatttgcataagtacaataagaatctgttttcttttgtaaaagggcacaattgcagaaatttataattttaccaaggctttcattggaatggtgtgttttcctttaaggaattaaaatgaacttgtagagccaataaaagccctttggggaactggcctcataccttgcctacacagtccctgtacagggtttctgacttgtggtaactaaagaatgtcactttctatcaagtccagtagaagtagaagtaagttatctcgggactgcaagaggaaagaaacttacccaactcataggtattagagggtacaaacccatggctggactcagtttttaaaaagtcttatctgagattccttataaaacagagttctatcaaagccaattaaaaaaacctatgtgaaaaataattattcttgctgcactttatacaaataatcaggccatgtataataaagtaaatcagtctcatcatgatttgtctttagtaaaaatggaatactggagagagaaatattatgtttcaagaactatggtacacttaaattctagtctcattagttgtctctgtttctgcaatttaggctaaccctgcttattcctatgaaccaaccagtaatctctgactgttgctcagaaaaaaacaagaggacgggtaatgtgaaaatctggatcagtattctaattctgggcacattacaaccaactgaccccataccagcttagctccaacggttgcccaattcatgaaaagccttctaatttagtttatttagaatataactttacttactttgttttactcttgtggaatatattgctgttatactctttgtgtaggaaaacagaacaagcatactaaatgtttcctttttttttttttcttttgagatggagtctccttctgtcacccaagctggagtgcagtggcgtgatcttggcccactgcaacctctgcctcccgggttcaagtgattctcctgcctcagcctcctgagtagctggaactacaggcacacaccaccacgcctggctagtttttgtattattagtagagatggggtttcaccatattgaccaggctggtctcaaactcctgacctcatgatccacccaccttggcctcccaaaatgttggtattacagttgtgagccgccacgcctggccctaaatgttttcttaaattaaacacttataaatcttccagatatcaccttttgtcaaaattcaataattatgaatggaccttactatactgatgctttcttactaagctcctctctaccctgaatgcaagagaccctcatagttaggcaagaatatcatcaccccattcaacctgaaaaagctacagaagatggatcgtcatccctctgcaaccctcaggattaaggattctttcataaaagggagagggaaatgtcagagacatgtgaaccagagcatctccatcttaaataagagctgggtaaaatgaggctgaaagttactgggctgcattcccagacggataaagcaatctaagtcatgaagtcagcacaaaatacaggtcataatgaccttgctgataaaacaggttgcagtaaaggagccagccaaaaccaaaatggtgacaagactgacctctggtcgtcctcactgctacactcccatcagcaccatgacagtttacaaatgccatggcaacgtcaggaggttaccctatatggtctaaaaaggagaggcattaataatccaccccttgtttagtatatcatcaagaaataaccataaaaataggcaaccagcagcccttggggctgctctgtctatggagtagccattcttttattcctttactttcttaataaacttactttcactttgcactgggactcaccttgaattctttcttggacgagatccaagaaccctcttttggggtctggatctgacccctttcctataacactattatggttttcttctaaagtattatgtattcctttcagtcttgttgagatgaaaaggaataatgggttctaataataaatagacaaccataaaactcaactttatttgatttttaaaaataaaatgaaaggtgacatcaaacagtactatgcaatatgagaatattaatttctcctaaatttcactgaaagcaaaagttacttacttactgaaagttactaagattgtggaatataattctgtttttcaatatttaccaaactgggaaggggagaatagctatactcgggaaaatattagggaggcactaattataacaatttcacaaatgaaaattacaggttctatgctttagagagtaacatatcagttatacaacactttttataatgcactatgttaaaatttgctcttagctggaaacagggtttcatttggtaggacatatgtttcagtgtattttatattatcctgaagacttttttaacatcccaaatataatgcaactacttaaaattaagaagttttacagaagtccatccattgcttataaactaaatgcagcagtaacctgtttcagtagcttctaagtaaactccttgcagataatcctttagtatttgagcgaggaaagtagtttggtctttaacctgactccacacatcatatttgtatcattaatacccttttctaaaatggtatccagttttcaactataaaagaaagtcaaaagttaaatattagcctataaacatttcaggaaaaacttcttacctattaaatggaaccagaaaacttatgtaggcatttctattttattatctgaaacattcctcctaaaagatcttcatatgaagagttttgagtgatgcatataattaattacatgtgcatctctacgctgtcatcttgtgaagagatactacattaattccatgagagtagtctatcaaaggtgggtttaagaagaagagaaatgttacagaagttgaattccaattaactttatgactgattgcagggctattggaaactttttttgtaaatcggaatgggaatctttttaagtaatgggggctgagacaagatagtaacaaatgaggaactcaattatttgactctttttttttttttttttttttttgagacagagtctcactctgttgcccaggctggagtgcagtggcatggtctcggctcactgcaacctccgcctcccaggttcatgccattctcctgcctcagcctcctgagtagctggaactacaggcgcccaccaccacgcccagctaatttttggtggtgtgagccaccacgccagaccaattatttgactcttaattcctctttgtgaaataaggtccctttaagagagaggagaggaaggccctaggagggctgcctaaaaagaaccaagttacctggtttaaaggaactattgaccataaatttggtcaatgcaactttcctttccccaacaaatattctgcagactaccttgattatcataaataacagtggcaggaccaacattgctattagaagagtcttagggtggctgtctagttggggataatgtgggccaagggacttctcttgctgtttatggctgggcgcggtggctcacgcctgtaatcccagcactttgggaggccaaggcaggcagatcataaggtcaggagatcgagaccatcctggctaacatggtgaaaccctgtcactactaaaaatacaaaaaagtagccaggcatggtggcatgtgcctgtagtcccagctactccagaggctgtggcaggagaatcgcttgaatccaggaagcaaaggttgcagtgagtcaaggttgtgccaatgtactccagcccatgtgacagagtgagattccatctcaaaaaaaaaaaaaaaaaaaaaaaaagctgtttatttgggatgacttggcacctggctgggaaaaggctaaaggtccttgaagcctgtgcttagcaccatcactgctacctggcccacttctgcatttgtctagcaccctattaacctgtcagagccatctgctcctccagtccacccagcagtctgctctggcccaaacaggagccctaatagagacctctacagtcatgagccctgcaggctgccccaccaccaccaaaattgtctctattctgtcctggtccaataagacaggcccatattccttttcaactctaggcgtgacttccagccttctcaaacttctctaaatttgtcctggttactgaggaaagaaggaaaagatgtaggggcaaacatctacatgactctccacaacaaaatgtcttgaagtctcttgttttatcttaaaaattcatgcaaatttgtcatcctactcgataatatgttttttaatataaaatgtttcaaataacctaccagttaaatgagttaacctttttctttaaaggatcctcaagtaaaactggtactctaggaagatgcgtgtgatcagcctgtgactccacaaactgcaagcatagcaatctgtacatccaggaatccacactccagaggcagagcatggatatttagaccctagtgtctacacgtgtgcatgatgtatgtccctcctcaccccaaattccatagatccctactctttgacctaaatatcagtgaggggggtaaaaatggggtggggcaaaattacatctttcaaaaatactctgtaattttaatttttaagtaatttaaatggggtttattctaatttgtccaaattaatgagttgtagctaggagtgtcttttctcaccacctacaatttgctattttgcctcaatttattttagctgtatagttcaatatttgcaataagaaaaaattctaatcaaagtgtcaagtttattacctcatcttttgtcttccatttatattctttcctggttgttcaaagaccgtgttgactgaggctaaccaaatccaagcattgaacagaaaaagtaaattaggaatttaagagtaaaggcaaccagaaaatattttgaaatatctatttgctttctccctataagtttcccttttcccttccccctctcaaatgtccctgtttttcttccctcagaggttcgtagtaggctccctaaagtccaatacaagggctgacaaactcatatgagaataggcagatcacgtaaacagttgaagtgggcggggtaaaggcgagagtgagcagtgtggactgtggcaagctgcagagcatctgctccctctatagaagccaaatgatactcagccctatctattgccacatacaggaatgagggctgagtgctggcagaccttattttttcatgaaaacttcaaaatctgcatttttaaaatgcaaaacatttgtttctacttggcaactaattttaaaattttaaaagaaaacaagtgactcttaaacaaattaagagtcaaagatccagtccacgtgcctaccatttgtgacttttgtctgaaacccatgaggaatacaaagtgatgtgtttccctctatctaaaaatgattacagagaaactcatcaagaaaaggggcctgtgggcacaagaacactagggacctgtgccctgctccctgacagtgcttaagatctctgactcaatagcccttcttagggtgccccaagggggctgacgctagaccctgagttcccagccttgccatagactcctgtgccccaagagtgatttgaaagcagcagagcggcagaccttcagagactgtgagctggggaaatggtcatctcagtgctagccaacttggaaaggtgacccaggagcagagggggctccctaaatcacagtgctgcatatgaccctagaagagggtgagccacaggaacctctgaggttcaaattgctgccaagggaaaagcttaattacttattgaatatctgtctctcctccctatgaaggcaaacaccttatctggctcactcaccaattggcacttggcacagtacccagcacacagcggggctgcattttataaaaagcaagcaattgagaaacagtgagatataagactgagaaaacgtcactcttcgcacacaatttgaaatcgtgcaaatcctccccccaaagcaacaatccattaagaattgcataatagctaaactgatggatcacatgaattgtaaacactgggatggtgcaagttagagttacaaagctagagtgtgtcctcaagctggggcagctgggagaattttgtcattgggcttgggagggcagggatgctgagcacaagatggaagatcttgtgtgtgttttttctagagcaagctcttcctatcaagtcttctctgtataatgcttagcaccatgatgcatgcagttggatgctaataaatgtaactatagctactcagtgactatcaaggcatactcaaggcaagtcatttgacttgtagctgtgaccatggaatactcactgactatgggtaaggtttcctattcccttcagttgctgggagcaaaccagttccccatacctgggctcctgtgaaagagtctgttccctccccattcttgcactgccagcaccatgtggctgcagcctaccagggcagcaacagagtgcattgcagaagctgctctcccctgactagtgtatggagggagggacatggcagaggaaggagccacctggattttagggtctggaagtctctcatatgtgacctcccagggcaatgtggcagccagggtgggcccaaggatggggactaatgataaacccacatagtgccctctcaaatcactttcttagagttaaaggaattttacatgtattgaagttccttctcaatagttttcctaccactaaaggtctaccccttacccatgacattggtgttactatttctttgggtaagctcagatgcttggattatcagcagcttgcttaaatcagaagttccctgaacctagaggagaaaagtcaaaattagtcaaaagagcattctttgatctctaacctggctgcttcctaatctttccaaagagtataaaaaataagccaaagcctaaagctgggtcttcaatcttggctctatattctaaatttcaaatcctctttgatgttgagaagtcttagaccaacaaattgtccttgcatatttagacaccagagaggaaatttctacaccttactcataactaggctggaaattcccagtttggaaagcagggaatccccagcatccagtaagctacttttactcctacactgatgctcaagggctcaaggctcagcattcccaggatggcaagactgtcttcctttcttagaccatttgtcccatgtgccataaaatctgcctcccagaatgccagcatcaaacaagtaatcattataactatcatttttagattaccacatattatctcatttaatcctcccaataacccgataagatggctgctgaccttatccctatcttaccatgaaggaaattgagggtcagaaaggttaagcaacttacctaagctcaagtacaagtaggcacagggatcaagttttaagcctaagtgtgcctgactccaaaccctggtctcttaagaaactaagctgcagtattactcctgttgcttccttgcttcttgcctccatcctttgtttcaaagctaaacaagattttaattttctattaaaaacatgtaaattaccttcatcatctgaattgatgaaaggtacaaaataagaatgttttgaaagaagaaaattcattttttaggtttaccaacttttccaggacaaattttcataatgacttttcacagcctgaactgggagaaaaggtctctcccataaggtagaaacttactgccagatttaaagagatgtcagtcagctcttcccatggcctctgggtcctccccattcctttgcccagtggcaggcagcttgggccattagggactttgcttctatccttcccatgccctcttatgtcctaggtggtcacacttcctttgtctttacagaggtatggaatgctgaggcccagggcccaggatctactatcaagtgcccatagcccctaatgtgtcaacaaagtgatgtggcccctactctactccttttttgtcaaccagtgcagatacttccagagctatgctagaacacggcatcgttgccttggcgtaaactagggaaaacttacagcatctcatccttcctttggcacagccccacgccagggcaaagggcgtggcaagcaaacagcaggcagatttcagctccctgtcccttgggcacacccttgtgtagggcacctgtattacagtacacagaagccctaggtacatttttactgtttgtaaaaggcaagtaagaactacagggtcattccaggttaaatttctttttaaggtgatcagttgagttttaaagtcacttttggagcaccgtgaagagcaagagactctttagaaatgatatttcttacctgctcacaggttgtaggtataatgcaaggtgcaaaatatggttcctctgtcttagtatcaattacactgccatacacaatgataacaaatttcatggtcatattatcaataatcatgtcactatagcttgataaagtttccacatatgcttgattgaacatcacacagttctgaaaccttaagtcctataataaaattgcattttagaaaataagtcatacaaactgacagatggtatcaagaagaaaacagatttactgatctatctgaattatttgagggtgtcagaaggtacacagcccctggcaccaacagacaggatttatttagcattcagaatggcctctgacaaatttctaaattccaaatgtttatgctgttaatgggccctggatactgttgcccagccctaaattgtgagctctcagccacagcagggtagttggctatgactcaggagatttctatttgcacaagactcagagtcttaaaagattcagagtttcacttacaagtaagcttatgttccacttgacaggtgaataggaataacacaaagccaaaacaaagcaagctagagtctgagctatacttcaaggctcagagtcatagactttagaactgggagggagttattatgggttgaattgtgcacacacacacacacacacacaccacctcccacccaattcttatgctgaagtcctaactcccagtatcctggaatgtgaccttattgaaatgggtcattgcagatgcaattagttaagatgaagtcatactggaataggttgggcctctaatttgaacaactagtgtccttataaaaaggggaaacttggacgcagacttgcacacagggagaacgccacgtgaatataaaggcagccatttataagccaaggagggaggcctggcccagattctccctcacagcccctcagtaggagccaatcctcccaacaccttgatttctaatttctagcctccagaactgtgaaacgatgcatttctggtttttttacgccacccagtttgtggtactttgttacagccgtgcttgcaaactaacccaggaatttagagatcagcccaacagtaggcatctcctgcacagggccctgacagggctgtcagctcagtctaaacatctccacccccattcagggcacagctacatgagccagtccctgaatctcagtcactgacaggtgaatcatacatttatttgctgagggcaccagcacaactgggaaccaaaaacatttaaaaattagcaaatgtatctagtatttcacaaccagaaaatctaaaaaaaaatcagctgttttggtttgattttaaaatgcatatacattttgagttctgtgatttagagggaaaaaaatcttaattggctagttctttaatggaaaaaaaaagaaagaaactaagtattaaatagagattctctatttaataataaatacaatttttttaatgttttatatctgtactttctcatttatataatgaatatgtgttgcttgtgaatttaaaaaaatttaaaggacattcatcttattattgagtcaagtctgagtccatacagtttctacccattggtcctaattctcacccctgaagtttcatactagactctaaatttgtcccacttctcatgaagatgcaaggtaaaaggaaaagagaagaattccaatccccttatccctctgctaaaatttttctgaaagttattattgcaataaagtaaaagaaacctgactggcttgtatgacacactcattttttaacccaatatttatttatacccagtcgctcagttcagtgaatattactgaacttccaatctttcccagttcacttccccagttcctgactcactagctagtaagggttccaatagttactaaataggatacaaatgtgagattgtaaattgtgcttgtccagagaaaacttgaaccactactctttggaggggaagtccatgagagaggctcagtcacctccacaaagattttgaaaaggcaggagatttacagacttatattaacatcggcagagtaggcaataataaatacagacagagcgtttgttaacacattctgattaacactatgcttggttcagggggggatctacctattttgaatttgctaaatctaccttctttttttttttagaaatgattgcaagtagcttgggaaaattagctgtgacaaaaggattgacaacctgtaggaactcaggataagagagcagttaaaattctagcaatctcattttagaaaagcagacacagggccaggcacagtggctcacgcctataatcccagcactttgggaggccgaggtgagtagatcacttgaggtcaggagttcaacaccagcctggccaacatggtgaaatcctgtctctactaataataaaaaaaattagccagaggtgggggcaggcgcctataatcccagttacttgggaggctgaggcaggagaattgcttcaacctgggagacagaggttgtagtgagctgagactgcaccattgcactccagcctgggcaacagagtgagcctctgtctcaaaaaaaaaaaaaatcaaacacaaatttcctttctatttttgtctcaaaaatatgaaatgcattttgtaaaaaatacaatgcataaaaattcaatttattaatattttaatcacataacttacctcatcaataagacttgattcaaaatactgataggcagtactgagagcaagctttagccatattttatattccagagatggccagaaggcatcaaagccttcatataaatcctccagggagataaagcaggcctgaaacaaaaaggaaccaggccatagcagcttgatgtggaactaaattacaagaccatcaaaaaacaagatgcctgcagatttaaccttcagaaaaactatcaattctagcataattatgatactcttgtcatttagaagcatttgtattgtgaaaatggttgtttgctaagtataagatgataaaatgtatggtgtgattaaagctatagactttaataagagaccagaaaaatgtatatcagtcaatagatataatgaaggatatggctcatgagcccaaagtccaggattcaggaactaagccatatgaacttatctatttttattgtcatggtagataacatgagctcattcacagtatttgtttccagaggcaaatagtttagctgaataaaaaagatacactttcagattcaagttacacgaacttcagtgaattcaattcagccttatgactaaactcatgccttctctcctcttccaaaaatgaaatgacatgaaatagctaaaacaacatttccttccactccacacacccctaagactctggatcctgctcttttgcatcatatagtctccaaagattgagaattctttggctcatttctttttttgtttaattatttcattgtactttaagttccaggatacaagtacagaatgcgtaggtttgttacttaggtctacgtgtgccatggtggtttgctgtacctatcaacatgtcatctaagttttaagccccccatgcattagctatttattctaatgctctcattcctctcaccccctcaatccccaaacggccctggtgtgtgatgttcccctccctgtgtccatgtgttctcattgttcaactcccacttatgagtgagaacatgcagtgtttggttttctgttcctgtgtaagtttgctgaggatggcggcttccaatttcatctatgtccctgcaaaggacatgttctcattcctttttatggctgcacagtattccatggtgtgtatgtaccacattttctttatccagtctatcattgatgggcatttaagttggttccatgtctttgctcttgtgaatagtgtggcaataaacatacatgtgcatgtgtctttatagtagaatgatttatattcctttgggtatttacccagtaatgggattgctgggtcaaatggtatttctggttctaggtccttgaggaatcatcacactgtcttccacaatggttgaactaatttacattcccaccaacagtgtgaaagtgttcttagttctccacagcctcacaagcatctattgtttcctggattttttttcctttcttttccttttttttttttttttttttttttgagacagagtctcactctctcactaagctggagtgcagtggtgcatctcggctcactgcaacctccacctcctgggttcaagcaattctcctgcctcagccacccgagtagctgggactataagtgcgccaccatgcccagctagtttttgtatttttagtagggatggggtttccccatgttggccaggatggtcttaatctcttgacctcatgatccccctgcctcagcctcccaaagtgctgggattacaggcatgagccaccgtgcctggcccatttcctgactttttaataattgccattctgactggtgtgagatggtatttcattgcggttttgatttgcatttttctaatcagtgatgttgagctttttttcatatgtttgttggctacgtaaattgtcttcttttgaaaggtgtctgttcatatcctttgcccactttttgatggggtttttcttgtaaatttgtttaagttccttgtagattccggatattagacctttgtcagatgggtagattgcaataactttctcccattctgtaggctgcctgttcactctaatgatagtttcttttgctgtgcagaagctctttaattagatctcatttgtcaatttaggcttttgttgcaattgcctttggcatttttgtcatgaagtctttgcccatgcctatgtcctgggtggtattgcctaggttttcttctagggtttttatgattttgggttttacatgtaagtctttaatccatcttgagttaatttacgtataaggtgtaaggaaggggtccagttttggttttctgcatatggctcaccagttttcccaacaccatttactgaataggagatcctttccccattgcttgtttttatcaggtttgtcgaagatgaggtagttgtatatgtgtagggttatttctgaggcctctgttctgttccattggtccatatgtctgttttggtaccagtaccatgctattttggttactgtagccttgtggtatagtttgaagtcagctagcgtgatgcctccagctttgttctttttgcttacgattgtcttgtctatgtgggctcttttttggttccatatgaaatttaaaatagttttttctaattctgtgaagaatgtcaatggtagtttgatggaaatagcattgaatctataaataactttgggcagtatggtcattttcacactattgattcttcctatccataagcatggaatgtttttccatttgtttgtgtcccctcttatttccttgaggagtggcttgtagttctccttgaaaaggtccttcacatcccttgttagctgtgttcctaggtattttattctctttgtagcaattgtgtattggagttcattcatgatttggctctctgcttgtctgttgttggtgcatagcaatgcttgtgatttttgcatgttgattttgtatcctgagactttgctgaacttgcttatcagcttaaggagtttgtggactgagacaatggggttttctaaatatagaatcatgtcagctgcaaacagagacaatttgatttcctctcttcccatttgaatacctttatttctttatctttcctgattgccctagccagaacttctaatactatgttgaatagaagtggtgagagagggtatcctcgtcttgtgccaggttccaaaggaaatgcttccagcttttgccattcagtatgatattggctgtgggtttgtcataaatagttcttattattttgagatatgttccatcaatacctactttattgagagtttttaacatgaagggatttgaattttattgaaggccttttctgcatctgttgagataatcatgtggttttgtcattggttctgtttatctgatggattatgtttattgatttgcatatgttgaaccagtcttacatgccagggatgaagccgacttgattgtggtggataagcttttttgatgtgctgctggatttggtttgccagcattttattaaggattttcacattgatgttcatcagagatattgacctgaagttttctttttgttgttgttgttgttgttgtgcctctgccaggttttggtatcaggatgatgctggcctcataaaatgagttagggaggtgtcccaccttttcaactctttggagtagtttcagaaggaatggtaccagcttctctttgtatctctggtggaattcggctgtgaatctatctggtcctgggctttttttggttggcaggctattaattactgcttcaatttcagaactaatttttggtctattcagggattttaattcttcctagtttagtcttgggagagtgtatgtgtccaagaatttacccttttcttttagattttctagtttatttacatagaggtgtttattctctgatcgtagtttgtatttctgtggggtcagtggtgatatcccctttatcattttttattgtatccatttgatttctctctcttttcttcattagtctagctagcggtctattttgttaattttttcaaaaaaatcagctcccggattcattcattttttgaagggttttttgtgtctctgtctccttcatttctgctctgatattagttatttcttgtcttccgctagcttttggatttgtttgctcttgcttctctagctcttttaattgtgatgttagggtgttgatttgagatctttctagctttctgatgtgggcatttagtgctataaatttacctcttaacactgctttagctgtgtcccagagattctggtatgttgtctctttgttctcattggtttcaaagaacttcttgatttctgcctcaatttcattatttacccaggagttattcaggagcagattgttcaatttccatgtagttcaatttccatggttttgagtgagtttctcaaccctgagttctaatttgattgcactgtggtctgagagacagtttgttatgatttcagttcttttgcatttgccaaggagtgttttacttccaattctgtggttgattttagaataagtgccatgtggcactgagaagaatgtatattctgttgatttagggtggagagttctgtagatgtctattagttccacttgatccagagctgagttcaggtcctgaatatgcttgttaattttctgtcttgttgatctaatattgacagtggggtgttaaagtctcccactattattgtgtgggagtccaagtctctttgtaagtctctaagaatttgctttatgaatctgggtgctcctgtcttgggtgcatatatatttaggatagctagctcttcttgttgaattgatccctttaccattatgtaatgcccttatttgtcttttttgatctttattaaagtccgttttgtcagagactagtatttcaacccctgctttttttttgtttgttttccatttgcttggtaatttttcctccacccctttattttgagcctatgtgagatgagccccctaaatgtagcacaccagtgagtcctgactctttatccaatttgccagtctgtgtcttttaattggggcatttagcccatttacatttaaggttaatattgttatgtgtgaatttgagcctgtcatcatgatgctatctggttattttgcgtactatgcaaaatagttgatgcagtttcttcatagtgccattagtctttatatatttggagtgtttttgcagtggctggtaccagttgttcctttccatatttagtgcttccttcaggagctcttgcaaggcaggcctggtggtgacaaaatccctcagcatttgcttgtctggaaagaattttatttctcctttttttatggagcttagtttagctggatatgaaggtctggactgaaaattcttttctttaagaatgttgaatattggcccccactgttttctggcttgaagggtttcggcggagaggtccactgttagtctgatgggcttccttttgtaggtgacctggcctttctctctggctgcccttaacattttttccttcatttcaaccttggagaatctgatgattatgtgtcttggggttgatcttctcatggagtatcttagtggtgttctctgtatttcctgaatttgaatgttggtctgccttgctaggtcagggaagttctcctggataacatcctgatcctgaagtgtgttttccaacttggtttcattctccctgcctctttaggtactccaatcaatcatagctttgttctttttacatagtcccatatttctcagaggttttgtttgttccttttcattctttttttctctaatcttctctgcatgccttatttcagcaagatggtcttcagactctgatatcctttcttccacttgatagattcagctattgatccttgtgcatgcttcatgaagcgttcatgctgtgtttttcagctccatcaggtcatctatgttcctttctaaactagttattctagttagcagctcctgtaaccttttatgaagattcttagcttctttagattcggtttgaacatgctcctttagctcagcagagtttgttattacccaccttccaaagcctacttctgtcaattcatccatcttgtcctccatccagttctgtgcctttgctggacaggcattgcgatcatgtataggggaagaggcactctagccttttgagttttcagtgttttttcgtttattctttctcatcttcatgagtttgtctaatattgatctttgaggctgttgacccttagatggggtttttgtggggacttttttgttgttgttgatgctgttgttgttgctttctgtttttcttgcaatgatcaggtccttcttctgcagggctgctgcagtttgctggggatttgcttcaggccctattcatctggtttgctcccacacctggagatgtcactcgaggaggctggagaacagcaaagataggtgcctgctccttcctctgggatctctgaccttgaggggcaccgaactgatgccagtaggaacgctcctgtatagggtgtctgataacccctattggagggtatcacccagttgggtggcacagggagcaggacccatttaacgaaccactttgtcccttggtctttggctcatttctatttgaattccccacacctagtgaaatgtcaggacacttaggtgttgaatagataacttcttacttagcaaatgaaacatagaaggaagtttaaaaacaaacaagtattccttttttaagttttaagttcagtggtacatatgcaggtttgttacataggtaaacttgtgtcatgagggtttgttgtacagattatttcatcacccatgtattaagcctagtacccgtagttatttttcctgattctctccctccttccaccctccaccctccaataggccccagtgtgttttattcccctctctgtgtctgtgtgttctcatcatttagctcccacttatatgtgagaacatgtgatatttggctttctgttcctgcattaatttactaaagataatggcctccagctccatccatagttcctgcaaaagacatgatctcactcttttttagggctacatagtattctatggtatatatgtaccatgttttctttatccactctatcattgatgagcatttaggttgattccacgtctttgctgttgtgaatagtgctgcagtgaacatacatgtgcatgtgtctttataatagaatgatttacattcctttgggtatatacccagtaatgggattgctgggtcaatggtacttctgtctttaggtctttgaggaaacgtcacactgtcttccacaatggttgaattaatttatactcccactaacagtgtgtaattgttcctttttctccacaacctctccagcacctgttactttttgactttttaatagcagccattctgactggtgtgagatggtatctcattgtggttttgatttgcatttctctattgatcagttatgttgagctttttttcatatgcttattggccacatgtatgtcttcttttgaaaagtatctgttcatatattttgcccactttttaatggagttgttttaaaaacaaataaatattctttaaaaacactgttgtcataatggtgaccatttattgagcacctatatgtgtcaggcattttacgtagatgttttcctaatcctcataacatcaaaaggttggtattctctctacttcataaacaaggacactgagacttaaggaggttaaataactactcccttaggcaggatgcagtggagcttggcagagcctgggatgtgagacactaaatctgccttttcagctatgttacctcccaatagctggttgggtgactaagatgtcaaaaccccaaaaaagaaaagatgctggtattttttatttacttgaagaataattaataactcatgacagaaccattttcctacctgtaaactagtttcacagatgacggtatattcaatttcacgcttaagcagacagcttagctctccaattatgtccccagtagtacagaactctgtaaacatgtctctggaccctctatcacacctttgattactctctattccaaaggtaggagataaactatgcaactgcaaagggaaaaaaagtgtgcaaagggaaagaaaaaatgaaaaaccctttgatcaaatcataggagctcccactatttcttacaactttccaatggaagggaaagatctcctgtcaggtgtgaaagaagaattaggcttaagaaaaaaaaatcatgatttctttaacatttcaactccccaaggcaaggatttttttctaatctttagttttacagatgacccctatttacaactttctacttatacctgtcttatacaaaaatcccaccagggctgggcgcagtggctcacgcctgtaatcccagcactttgggaggccaaggcgggcggatcacaagatcaagagttcgggaccagcctggccaacatggtgaaaccccgtctctgctaaaaaaaaatacaaaaattagtcgagcatggtgacgcatacttgtagtcccagctactcaggagactgaggcaggaggatcatttgaacccaggaggcagaggttgcagtgagccaagatcgtgccactgcactccagctgggcgacaaagtgagactccatctcaaagaaaaaaaaaaaaaacccaccaaaactggaaattatagtatgcaactaatgcaatcactcattgagtccattagatattcttaccgcaatgggctaatgcatcaggtggaaataacttttgattgcatgggcacataaatcagatattatgaattaatatgcctccaaaccaagccatgatgttaatgaaagccttgtctctttttaaaatgctttagaaaaattaccatgcaatatcaacaggaaaaggttttaggatgaacataggatggttgagttacttcaagaaaataactggtaggcatagctggagaaagaaccgcggtatcagattttagggggaagctgaaagaattgggattagaaagattacagaatttttcagaaagtttagctgtaaacatcaaagaggaaggttcttgttcaagacacaggaaacaggaagcaaaaggtcattctctcccagcaattagcattcagacttttaaaggcattcatgcttccagaagagtttgaatttgtttttaatggctgtaattttgaatgcaattcaaaggatctttgagcaatgaagaatgcctctgctttttgcaaacaaagaaaagatgatggcatttgaggtaggcagcattctaaaggaggcccccccaagattcctgtctgttgttcaaccaaatactaatctagggactgcagtgaagggactttgtagtggaattaaggttgctaattggctgaccttaaaaagatgatttttggagttaaggctactaatcagctgaccttaaaaagatctacaaagtcccttcacagctgtaccagattagtatttgattaaacaacagacgggaatattgcggggactgtaatcacatgagccctcgcaagtagaagggagtccatcagagagagatgtgtgaaggattccatatgcctttgcttgctctgagatgtgaggacctgcatgcaaggacaaaagagaagctctaggagctcaaggtgggctccagctgacagccttgaagaagcaaggacttctgttcaatagccgtaaagaataactagatctgccaacaacctcaaagagcctggaaacagattgtgcccttagagcttccagaaggtaacatagcactactgacatctagatttcagcttcttgagacccaagcagtgaaatcagcagaacccattggatttctgacctacacagccatgagataatatatttaagcactaaatttgtggtaatttgttatggtatcaaaaaagtactaatataacctcttcagaccagacattattggactatagtttaagaaggtttagctagtccagtcatggcaggaaaatccccaaagaaacatgttacagcaagttgcagcttttaagtatcggacttgccgtatttcataaatactggcagcagtgtgtttgtcctagaattctaatgggagtatagtataatggctaagcacatggatactggagacagactacatgggttcaaagtaatctttggcctctgagtatgtgtagttggggccaagtgaattttttttttctgttcatcagttttctcatgtaaaaaatagggttgttggcctggttcggtggctcacacctgtaatcccagcactttgggaggccaaggcgggcggatcacttgaagtcaggagttcaacaccagcctagggaaatcccgtctctactaaaaacacaaaaattagatgggcgtggtggtgcgtgcctgtaatcctgtaatcccagctacttgggaggttgaggcaggagaatcacttgaacccgacggacagaccttgcagtgagctgagatggtgtcactgcactccagactgagtgacagagactgtcgcccaggctggagtgcagtggcaggatctcggattctcatgtctcagcctcctgagtagctgggattatagacatatgccaccatgcccggctaatttgtgtatttttagtagagacagggttttgccatgttggccaggctggtctcaaactcctgcctcgtgatccacccacctagccctcaaagtggtgggattacagctgtgagccatcatgcccagcttatattgcctttctcgactaccttttaaaaaatcacaactaatctcttcatacctccatcatctgtaacatactgtaaacttacttgttttgttcattgtcccatctccttttatccctctactagaaattaggctccaagaaggcaggaatttgtgtctgttttgtcaatcccatgcctagaattaacagtgcctgccacatggtggtaatgaagcaaacattttgttgaataaatgagtgaatgaatgaatgaaaagtgcttagaatagtgccagatagtaaataagtgttatattgtgttagtattctatttattatggtagtttatttccatgatattttaaggtctaatatacccgtttcaaaaccagaaagccaatggtattatttttgccatattaaggatttgtcattttatgaccatcatccaggatctaggaattatttggttcacaaaatggggctcacgcatgaaaccagctactaaactactgttatgcagatacaaaggattcttgtccccatcactctactgaaatctctctccctctctctctctctgtctctctctctggtcaacaaaagcctcccatgagacagattaaaagctgtatttttgatcctcattctatttcctttaggtgagtaatttaagccacgccaagtattgatttccttctctgaacattctgaaaaatcctgcttcctcccaggattgctggaaataagtaaagactatgacagcattttgtagaatgggaagcacatttcaggtgttgaatattcacctctcagctgtcatgctcagagtagaaatggtttcatcacattaaaaatttaaactttttcagtatctaaatttattcttattctacaattacatgtttcaaaatacattttaagtaaaaaaaaaaaaaaaaatcaatagtcccttacaattgccattcctgaaataattaagtagattccttgtggcatttcacctcctttacaaatggtatctccagagtcaaaacaggcaagtttggctctttcctgagtgggaaaaaaaaaaacgaaaagaaaaagagagtcaacacaaaagcttcctagtctacttttctaaatattttctatatatatatatatatatatgattttattatatatgtgtgtgtgtgtatatatatatatgattttaaagctaaaatagtttccaagtagcataaaaacactaattatattcttggtttattactgaactgtaacgtgctaatataccacatcaacttttagaaataaaggaacaggcaaacaaactttgactttgtgattagtacctagcatagtaactgatataactatggaataaatatgcatatttatgaatgaaaactttttttcagcccgtttgaggcttgggttataatggtaagctaaacaattcccctgccttcagaaaaaagttttagttatgttgggtagatatttacaatccaatgggataattatgacaaagaagacagggacagggcgctatgcaaaaaaaaaaaaaaaaaaaaaaatgcagaaaaggccgggcgcggtggcttacgcctgtaatcccagcactggggaggccgagatgggcggatcatgaggtcaggagatcgagaccatcctggctaacacggtgaaaccccgtctctactaacaatacacggtgaaaccccgtctctactaacaatacaaaaaattagccgggcgtagtggcgggcgcctgtagtcccagctacaggctgggcaggagaatggcgtgaacccgggaggtggagcttgcagtgagccgagatcgtgccactgcattccagcctgggcgacagagtgagactccatctcaaaaaaaaaaaaatgcagaaaagccacaggatcctatcttggttgttcggtgaggactttacagcagacaggacagctaagctgagacttgaaagaggagtagcagatagctcggataacatgagttgaagacctccagggcagaagattcatatatgcaaaatccagaagcaaactgaacgtctgcagttagggtaatagcaaagattgtatatgtctcaggcagggagggatggagaccagggtggagccatccactaggcatcagcaggcgcagtgcctgcatctacaatacttttagacacttaaaacaatgttttaatgttttttagaatctggaggaaaattagttttagatagagaaaaatgttttaatagataatactaatatattcattgtgatactaacacagtcataaagtctaatttttaatacttttttatggaggaagaggcccactaaggcagaagtgcccagggcacctgagagtcatgatgttcttcgggccctctgcaactgccctgacttcatgtgctctctccagctctgctcctgccagggacctctgtgctgctcctggaacactccaggcacacttggcctcggggcctccttgcacccactactccctttgcctggagtgctcttctgtaagatactagctggcttgctccctcacttctttcacatctctcttcaaatgtcaccttattagagcagccttccatggccgctctgtgttaccttttctccccttatttttctctagcacttaacaaccatctgataggctacttatttatgtgtttggtgtgtttattgtctgtctccatccatacactaaaagcttttgaaagcagggacttctgccaggcacagtggctcacacctgtaatcccagcactttgggaggccaaggcgggtggatcacttgaagtaaggagttcgagaccagcctggccaacatgatgaaaccccgtctctactgaaaatacaaaaattagctgggcatggtggcacaggcctgtaatcccagctacttgggaggctgaggcaggaggatcacttgaacccgggaggcggaggttgcagtgagccgagatcacaccactgcactccagcctgggcggcagagtgagactctatctcaaaaaaataaataaaaagaataaaataaaaattaaaaaatgaaagtagggacttcatctgttttgtttactgccatatcccaaaacctagaacagtctctggcatgtagaggatattcaatagatatttgttgaaagaattcaaagtcctgtggcaaccgtcagctgacagagcatgaacttgaatacacctcagttctcactgttccctattacactatgcccaattggctttacttttacactatctgcccggtctgtgcagtaacttaaatttgagacccttgctctaaaaaatgtctctcccagagtgtacatcaagaagtccagaactctacaacataaaatagaatgggattggtaatagtcagacacatatagctactcataagcggataagccattgtgaaaaactatctttgccctttaggctcaaaaagagatctagtcttcctctaggctttcctgggcctccattttggctttccctgaattggccagtatgtgatatgcttttctgttaatctttcattagggagtggaaaaaaatggataattaccatcaaacctgagccagaatagaaaacggaatctttaccttgaagaagtcaatgagaacatctttaccttccagccaaatgatgttgtgaaggtatatgtcaggagttgggggtgggattgcctttggaaagttatttagtgcttttaattttttaagaagtacctaaaaacaaataatcaaaataatggggatcagatcctgtaacagaaaatggacactagggaaaaactaaggaaatctaaataaactactgttaggcaagtttaaccttgattgttgactcacagcttgtctcatcctatctaaattcctctaaccatttttgtccctagtctccccttattactattttcactgacttattaactcagattgaacctatcatcttcataattcaattgacacagtggatggagaagcagaaaaatctagtgagtctatagggaaagccaaaggaagatgccatagagggcaaccctgataggaaatggagaatctagaaagctttctacatcgctgttcaaatcccttccttaggccttgtcacatatcctggctattgtgggttctataaagtactctgcgtccttttgataaatcccccaaccatttctttactaaacttagttcaagttggtttctgttacttgcaatcaagtagttttgacaaatggagtgtaccggattgcatcggcattcgttgtcctttgcattatcaaaggctgaaggtgattatagagttaacacctgtggttaaacaattttttcaatctccctccttattacacactgctaaagtaaccatgaaggctggggtgttatgcggacagaatcaagcaaaattaccttatttatctcaatgacttcatgcttatcaataatgcctcttgaacaaaggaaggtgagattttttagagctttagcaatcacattccggattgcctgtttagtcttcaaagcaatgacaacatcacgaccctcatgctccatgagtactacagcaaagaaaataaaattcagtaagtggcctatgcaataaccacaataactaatattagtataatactgtataatttccaaagcatttacacaatattctttgattctagtttcatgcagaactcatgaggtcagcaggcaaagagttattttcaactctattttatggatgagaaaattggaaactggcttcccccatcagctaagagaaaatcactctctctctcttatccccatggcatctcctccatatctctattatggaactcattacattatcatgttactatttttacttctctgtctcatcctccatattgtataatttttgttggttagacgaataaatgacacaatgaaagtacccctggactttggctggtgggtctttctgagatcaaggagcatattctttccccttcagtaaacctcagaagacatgaactggactgtgagtcaaggttaaaattgcatctgtttcatcttcatattcaacattgaacacaatgcttgccatatcgaaggtacacactcttttctttttaactaaatgaattgaccactaaagtgaaaggtagcaatgatcaaaagcataggttttagtgtcaaatacacctgggctagaaacctggctcactacttactagccatagggcctcaggcaaattaacctctgtaataatagtatttgcctcacagagtaattataaggattaaatgagataatgtacataaagagttagcagttcctgccatgataagcattcagtcatcagttgcagtaaccacatggaaacaagcactgccttttagagtagtgaattgagaaaactttgtaatattccatactgatctaaaacataatataatgcagctgtcctaacccctaatctttaaaagcacagaaataaaaatctgtcaacatataaatggcaacaatgggtcatgggttttctgagataatgccaaaatattctaatctgttgtctctaaacttacactttcattcattagatcacattctttccattttgatttggaaagtgtaaccccatatggcatcttacaatgtggtcatgaatatgaaatggttttactttattttcttttctgataacttccatttattaagggccttccatatgctgggccctctaccagatgcttttgcacacactgacagcctggcccacagccccccatgagaaaagctgacccaaaaaaacttggcataaaatccctgggctcctgctctgtgcttcaaataaagtggagtgactgtagatactcaggaaatgacattcgttgcagccctatgttccagagtatctttgcaaaaaacaaaacaatgaaacaaaaccattttgtcaaaggtaaccttcacatgtctttttcttctaaccttgaggactctgaccttgccaccttaatacactttccacactcctctcattctttcctgtacactcccataacaactaacaggactctgctaactttttcaattatctattgatacgctcatacactccacaagattctgcactgtttaagggtcaggatctactcatctttgctttcccatacctggcccattagctgtgtttaataaatgcttgttgaatgcataaatgaatgagcaagtaaatgaaagcatgaattgttcttcttttattaaattataggacaataaggtatgactttaagaactcagatacttcaactacctacctaattctttgacagcatcctgtttgttggtttccaaaatttcacatagtttctgtaaaaaattaagaaaaacatgtatttcttattattcatatagtttctgtaagaaattaagaaaaacatgcatttcttcttatattcctgagaagcatacttattataccaagtatagttctggctttccttttatttttattttttgagacagagtcttgctctgttgccgaggttggagtgcagtggtgcaatctcagctcactgcaacctccacttcccgggttcaagttattctcgtgcctcagcctcccaagtagctgggatacaagtgtgagcgaccacacccagctgatttttgtatttttagtagagatggggtttctccatgttggctaggctggtcttgaactcctgacctcaggtgatctactcacttctgcctcccaaagtgctgggattacaggcataagccaccacacctagcctggctttccttttaaattcagagaaaaggaagtatggtagaggacatttcacctagttttagaaaagctattggctcatttcttccctctgggtcaattctgctgctttgcccatgctcagacgtcaatctcaatgagtctagtacagtcagtagcttgcataactaccttgcctaatagttatcagaaaagatcagtatgtactccactgtgcaccaaggagaattctcatagcgcctcatttggcagtgagccaagtgagcagctagttgggaagccagcctatcaggagcacaaaaagaagtggaaaaatgagaaaatacgatattgattagttcatatttctaacaaataactccttagataactgaagaaatcactgcactccagggctaaccaatctctgttcaatcaatcatacaacaggtatttgttggatgcccactatgtcccaggcacttttcctcttaaagcttaccctccagctttgagtcactggggagtttgcacttggctacaccaacagtcctggaatcacacaactgacagttctttagggttgtcaggtacagatgtctgaaactctgccccaaataatgcatggcatagtgctctttatagggaacacctggtttgttatctaaagtttaagcaaagttaagtttttgtggggtttttttgttgtctttgttttggtttagaaaaaaatcgcatgtaatgaatccctcattttgaatataagaataaggtatgtaatatttattaaattatttcttcttactcgataacattgcatcaatattgggaaggtgccaaattactagcctgtccatggcaccaacatatcctagcccagccctgcttgcataggtgcaaagaaagcagctaggcccccttcacaccaaactagacttacagcaaccctgtaagactgctctagaacgcctttgcacaaaagcgcatgggacctgactcctgcctacaaagagagcataatcatgaaagcctgggcatacatttatttttcttaaggtgagctgccacaggccaatttccagaaccaagtcagtttcagaataaacaccagttagacatctaaacacatctcaaaaggccatttaaatctttactggtgcttctttcaaaatgtcacaggggattcacttcacctgtgacacgtcaaggcaactgccctcagatctctgcatcttctcccaaactcctgaaaacacattcttaactccccccactgtctcttgtttttcttctctcttcctccttctgctgaaatcttttctcctatgaatagctctgtgttctttctaatgcagatcaatccagcctttgagtagttcttttaattttcttctccattcttcaaagtaaagcaacaggacagaattctgttacacattaatgttcaatccaataaaggtagatatcttcacagcctcttttcctcttcttatttcaataagtaaagagcctctcttgactgaggtaacgtaaccgtcaccacaaaaaataggcaccgtaaccagaagacataacctctaggccatccatggttttatgtatccacacataatcattgtagtaatcaggatttaaatccatctccagttaaaaatcaagagtgtaacttgggctgagaaaacacctttcagctgttgatactgttcaccttagcccctcattgacacgtatgaaaatataaccaaaatcaccaaacactgggggcaaaaacagaatgaaatatagaaaccaaacacaatgaataggagagtgaaccccaaggaagcagaattaacacaggaagcaaaatatcttttaagatgaaaagaagattctagataatattatgttaattcttttaaagcaaacagttgttatgaaaaggaagcaaccacagtttttggagatcaaaaagtaattgtcaaaaaaaattaaaaagtttaatagatgggttgaacagaagaaagaacacaactagaaatttaaaaatctgtaacctggaaaatcaattgaaagattctcactgcaaagagcagagttgacagctatgagtgaaaaataaggaagttttttatctaaagaatgcgagtctcctctacattatcaggcccaaagaagcatgagaatgagagagcagtcacgttccactttccccactcttttgcgagtgactggtaatagacagactggtgcgagggagcctggttaggagaggattcactccacctctaggctcccatctagtacttacagcatagtggctggaaatgaagagggtcttaaatgataaaaaataaatacttctactcacccaccccacagtaccaggatttcaacttttcactatcaaatctttgttctcttttcctctcttcctcttcacttaagacttaccctttctttgaagcctttttcaagtctcaactcctgcatacacctttccaagtgccctgtcttttagagagtgttacagagacatactagatctcttctctatactctgcactcagaaaagagatcatatgttttctgccatgaagataataaatgagtttgatgataacagctgaaatgtaatgatcagagactgttctctgtagcacctcatatgatataataaacaactgaatccctttcaactgttggaatttgtctgtttcgtcaaacacacatagaactagtcttaaaagaagttaatacacctaaggggtttttctccccaaatgaccagtgcttgtttctcacctgatatattgattcacagacagctatttgttttattagaagtttggcatcttcttgacttttgatatagccttttgtaatactatacatcaagctgaggcgctttttgatctgcacatctgcaattcttatcagtattggtactattatctggaataatgagaagaagaaaaaaaaacctgtacatttgatgaggaaaagcaccctctgaggcagaaattcataaagtgtcatctccagaccagcaacagcagagcccacaaacttgttaggaatgcaaaatctcaggtcccactggagacctgtggaatcagacactcttgggtggggcctagtagtcgatgtcttagcaagtctgccaggtgattctgtgcctacaaaagtcaagacccattctctaaagaaggtgaagcttagtgaataactgactcttgctttaggggaaagtctctagcactgccttttccctcattctctgtacccccagatttcagaaaacccctaaccaggtctcctaacctgggtcatagttactcactgaacaaatcgtctctctgtgcctcagtttcttcacttgcaaaataaagaacttagggtatctaagatcctgcttagttttatatttctccaatcataagctaaggcaggctagtgtcatgacttaagagaatgggattttaaatatacacctctctaaattcaaatgcaagctctcctattcaccagctctgtgaccttgagcaagttatttagtgactttgaggactcagtttcctcatgtgtaaaatgaggaaataatatctaaataccagaattccaatagaggggctcctcaaaatccacatcgtcactcacacagacagggggcttcccacagggttaaagtcatgtcagagcacaggggcagatggcgagggactgggtaacaagggagaagaaaaaagtgaaccgggagatggcatcatagtgaaggaattccaagagcagagaagggaattttttttttaagctgctattttgcctttgaaattttggacaaagggagagatgtttaaagaggattttttcaaagttacactctacagtgcactgacactccttgagctatcctttagggcacctaaagattgccagtattctttcacgttttccaatgcagatttgttttttttgaaagccacattatgctgacaatggctatgagccacctaactttacatagtggtgaaatctacctcacaaggctatcctattaattaaaccagataatttatgtaaagtgctttaaacagttcctggaaaatagtgagtgttcaattaaaaaccatggtaatatacttcactgagatttgtcagagcatgctagacagaagggatgactagttcagaacattgctgcccacactctaaatggatttggtttttgtaaagtccctaattaggcaaaaggagtcaggctggtgggatcaggggaaagcaaaaagaagcagcagataagctgcaagtctgcctttctttatggcccaggacgcattgccctcctacacaaataactcaaaatcttgtgcccaactaccaccagactcctgcaagttagctcactgcaaccatggcattaacagcacaaagcccttttcaacagacagcataaacactatcctataaaatctccagcaagcctttgcttctttgcagttggcttctttcttgcaggctgcctgttgtttccctggcaatgtatttttctactgtctctaataaataaatatgcctttcttcatctacaactgtcttggtaaattcttttactgcggcgccgccagcccatagagctgtcactccccgtgacagtttccacaataatacacttttaaatctttgtttcattttaaatacttttcacgaagtatgacttctaaaataattattttatatttacctgcatacgatttctgtataaatactgattacctaaagaaactcctaccttccattttaagtctttgcatcacacaacacatcctgatttctaggacagtttacatgacggtggagttacaccttacatgagcactttgctccaaactcagctcataaggcaaaaagcacattgaatcaaaattaccctttaaaccaggtacagtaactctgaacggtaattcttatgaacactaaagtttggtcacaccaatgtagaataaatgaaggaacaaaaaagaaaatctgtaagcacaaactggatagtcaaacaattctgccttaaagataactattaaatgttgtggagaatgggaagtaggtggaggagtctaatatgtgcatttcaccatcagagtttatagcaatttttttaatgttaagtctctgtatctaacttcaataaatactaatataatagatttgcttgatgtaataagaattaaacaacaacaaacatggcatggcaagtgaaatcatttaaagccctgaagttaaaagcttatgtaatgcaactccattggaaagagagaaaggaggtttaagaattgaaactgaaagtataaaaatctgccttcagtatcaaaaccagagtcatggaatgaaggcatagtaattgttaaggaaattgaaggccacagtaaaattaaattccataggtagtatcctatgtgactgtggagctatggaggaaatatttttgtttctgtacagtttgggagacatgaacaaattttactgaaacttaaagaacttgtatttgggttaccctgcttctactggcaccaagatttttattctttcactcaacaaatatttattaagtgcttactatacgccaggcactgttctggaggcagaggttacatcaatgaccaaaacaggccgagtatggtggttcatgcctgtaatcccagcactttgggaggccgaaacaggaggattgctggagcccaggagctttagaccagcctggacaataaagtgagatcccatttctattaaaaaatgtaaaaagaaagaccaaaacaaagatctctacctcacagagagtacatacaatatacagtaaattgctgataagtactgtggggcaaaaattaaagttgagcaggtagagggtaatcaggaggatgaggtagaaattgagggtgtgaagggtgggttgccagttgacataggctggtcaggagaggcctctgtgacaagctgagatttgagcaatggcttgaaggtgacgagaaagggaaccatgcagatacctattgagagggtgttccagaagagacaactcctgctctcatttctttcaaaacaatgaggtttcttactcacttaacacacaatgtaaaaaaagaattttaatactttattttattattattattattttttgagacagagtctggctctgtcaccagagccatcattgcactctgtctgactggagtgcaatggcacaatctcagctcactgcagcctcacctcctgggctcaagcgatcctcccacctcagcctcccaagtagctgggaccacaggtgcacaccatcatgcccagctaatttattaattttttgtagtgatggggtcttgctatgttacccaggttgtctcaaacttctggactcaagcaatccacccacctaggcctcccaaagtgctgggattataggtgtgagctaccactcctggcaaatcttaatattttaaaatgtgaaatcttaccttgaagagaggaagaaacctaattattcttaaatatcccattattactgtaagctgtataagagccaagttgtctggtctcaatttcacaaagtatacacaaaagatatcaatgattccaataaccaggataaaaaattccaaagtattccaacattgttgaaaatatttccttttcaaaattattatctgtacagaaaacaaatgtcatttcatagcacctatacagtaatgttggggggaagaaatctataaaattaacaactaagttcttaactacaaatgagttatattccgaaagttgagctttaagttattcatttggaatccccccaaaaattctttaaaatcttcaccatttataatttgatttaaaatatatactctataataaagctggaatgccaaaaacaactattaaaaatagcaataaacagattcattgcaatactattaataataaagtatgaaatagtaatgctcataaatcaccttttacacatttatactaataattaactcacattttatgacaaagacctagcaaaccaattcttattcacttatttatttcttgcatcattacacaaaatatttgagggaaacgtccatgtctggattttcaattctcctttacctgatccttgagaatctctctacttttatgatacttaactgatgtccaataccatgactcttatactaatttcactattaaacttggaaaattcaaaaagcttactaaaattctaggatctcatcaactatcatagcaaatggctcttggtatcaagttacttcaataatatgacaaaatagattcaaaatacctgaattgctctttttatagattctatttctattttaaacagtaccttcaatgttgattctaatacatataaaaacataaaatagtagtttattgatatcagtgctgatacatttaaacctcttgccattggccacagatgtattatcataggataaatatatatcaaatttataatctgtcctgtatattcaaattcttcagaaaatactatgtgaaatataaaagtcagaaatgtattactcctgaaaagagatcaaataaaatgttagatcacttaaaagtataattagcagctgaagttcaatatttgtttaaacaaatcattaaaattaatttgaagactatacataatataaaataatagtaagcaaaaatcaaaagcatattttctatacataaaaatcataatgaagaaaggtaaaaaacatgatttttaaaaatccatatcagggatgagaagcatttttaaaactcaaggccacagtaccctggaaacaatgcaaagattcataaataaaaacaaaaaacaaataaatttagaggaaaacaaattacacattggattgtttaaaatcaagaatgggaaaaatatgatattaaataattactatgacatatatttattaaaacttttcattccatctaatgtacagcatgacaaaaagaaattctttggatatatgtcaaggtcctacacttttgattttttgtatatctctttaaacttattaaatggaaaaaagtaaaaaatattactagaatttgttataaaaggttaatgacctcttaaaatttagcagcattaacgcccttggtatgttcttgttttggcatgttctattggtataaaaattatgtctctctgctctaaaaagtatgtaagctcacaatttataaaactaagtaaaatatctaccccagttaagtaaaatctgtgttttgtgatattttggaaaattggttacaggtattattaaggccatgttgtgtttttcctaattatagatcaacagaatcacacaatagaacagatgaaattaaacagagctagatctagtctaccagttagctatttctcacccctgctctatgttatatccagaagaatattaagcagcccgcaacacactacaaccctcagacacagcaattaaaacttgaaggatccaaatatgaacatcctttttcccttcctgactactctctcatagagatgtcaatgaagttgctaaaatagaatggaagaagagaagcaagcaccacccaatcagtgaaaataaaccataatatagtttttctcaaataaggaaaattgagataagctattatgacaatgtagaaatggtagtattttcaagtatgtttctattaaaggttcacaatacttactcaggtggaataaaatgtatcttttctatacaatattccaagaaagttaaaacatttttaaactttataagccaacttctagttctcatataagttgaaacatcataaatactcatgaatctaacagagaaaaatgtacatatgtgttataataaaaagcaagtgctatactttgggttaatataaaaggggaaggtgtactaagtataaatttaatatggacccaccaaataagctcagtctcatgcctctgcatccatccacctatccatccatggtcatggtacaggagtagttttagcatgagactcctgctgcctctgttcctgaccagaggttgaacataagtaaagcttctctagaccatttggagtttggaatcaagctttcctttgtcatgctggtctggcccaaccctctccaaggccctgaaagctctaactttcccaaactttattccagggactggtaaagatcttccaaatagattacctggctgctgaaatgttatctatcacccagccaggatctcctattattattgccccacagctttgtgttagatcatctattatctaatgtttgccaggactgtaaccagatattgttatatctccaagatactgagcttttcccaccagacttaattgcacttgtcagcaccagcagttgggtcaattcttccagagcctgctccaccccagggagcagtctaatggcagcctccaggcttctaaacctcctctgtctggtaatttaaagtgaagataatataaaggcaaaataattataatagttattgaggttatataagttccctttcatggattcccgagtgtcttatctaattacatgacagtccaatctttctccagactcccctaatgtcaccaaggttataaaactttagaggaaaaaaataaaccaataaaataaaaagcagatggatagatggatggaaggacagacagatggacagacagaagatggatacatacagatatgtgaaataatagattgatcaatcaggacatttaattctcattttattcattcttcatcatatagtcattcaattttggaaatatcaattaaagaagtgttatacttactttccttggatggagtaatagcattttgctgcaccaattaatatccgggctgcctctatttcaagaattccattgttacgctgtttttcaaagctactctaaacatacattaaatgaagattacaaaagatcaaaacataaatggaatgtattcttcttaacccttacatagccctcactattattactgaactcaatatatcaaaatatgccattacaaaaaattatgtagtaggaaataaatatcattcaatgcaaatgtttacagaatactcatttttataaagtatagtcctgaatgttatgagataaaaagggtcttagctttctagaaaatcaaaatgtatgccactcagccaggcatggtggctcactttgggaggccaaggcagggggatcacttgagtccaggagttcaagaccagtctgggcaacacggtgaaaccccccatctctaccaaaaatacaaaattagccgggcatgatggcgcatgcttgtaatcccagctactcaggaggctaaggcaggagaatcgcttgaacccaggaggcggaggttgtggtgagccgagatcatgccattgcactccagtctgggcaacagagcaagactccgtctcaaaaatttatatgtgtgtgtgtatatatatgtgtgtgtatatatatgtatatatatgtatatacacacacacatatatacgcatattatatatacaactcaaagagtttacttcagtaatataaataacatcagtagcatcatctttctacagcagaatagagagtgcaaagtattaattctaagtgtaactaatcatttcagccccacaaagaactatcaaaagaaaaagataggctgtattgttgtgtcaatcctccccctaaaatagcagaaaaattatagcttctacatgacactgacattacattcagaggttagcgttacctcctggaactgctgcctacatttcctcacatactgaccatacactttgcctatccattgtttagaaatgttgactccaaccactactgcatttaacacattttctcaagtcttaaaatttgagggatgatagtcatttcaggaaaggagagaattcacaccacttatatctcaagacaattctcattcactcattagctccttttccagaagacagaaaaattatccaccagtaacagctttgataaaggatatgcaaattctgaaactgccttccaaacggtatggggcaatggccaggctctctctactctgagggctactggagcacttagtggatttccctacgttgtaagcctccgtgatggccctggtaggatgtccactgtgagaaaactatgtcccagaagttcagtcctgaggcctacctccagtgtttacacttgcagtttttccggccctgcccatcaagaagtaggcctggatcaagaaaattatgatttactaatatgatggattgtttatttattcattcatcctttaaacaaatgtttattaaatgcctactctgttccaagccctgttttagggcaatggaggtatagtccaaggctttaaggggttcacaatctagtggggcaggggaaaagttagatgcttatatgataaaacaggaaattaaggggataacattcagcacagggtgttaatcagacttgatgtagagatgggatcagagagagtttctcttggaggagatgatacttcaactgagttttaaggagaagtacaattatccagatgaagaatggtcgtggggcgagcagagtgaagaaagaggtaggcagagggtggcatctctagtgcacgtacagaggtgagaaacagtatgctgagtgcagtaaaaaacaagttgtggggcagagcatcagttagagaaacagtcagaggccagattttaaaataccttgtatattgtgctttgacttaatatcataggtaaacttttcttggaatgtgatatacacattctgtgagatactccttcaaccccaatccctgaaaaactatgcagggcaggggaaagggtaagaaaatgttgcattctatagtctctcttggagaatctcaatgtatatcagcatattaaaaattctgaagagttctacaagaagttctaaaagaaacccatttaactttatttaagccaccatttcccaaactaatttgagcatggaaacttcttttttcatgcagtttctattagcatcccatggaacaagtgttctttgaaactcacaatggaaaatgtaggcactgaggagtcatttagggttttaagcaggaaggaggtatagtcacatgtcttttagtaagtcactataatttgagaatggaaatattggagacaaggggaccaattgaaagttatcgtctggacaagagattatgacggcctaaattaagattcacaagaatggaaaggggtgtatttgacaaacatttagaaggtaagattgatagagcttggagaaggatagaggaagaggactgactccagcaaccaatggtctaattcactaacacttggaatataacagtaggcttgggatgagttcaatatggatttgaggtagagtgaaaggagaagctgtctagccaccactggattcatgagtctaaagagctggtgttgaaaggtatggaaggaagattacagatttgtagagcatctatgcatagtgttaaaatcatgagtgtagctgggactaaagaaggagagactataaaataagaacagtggacagagttaattgtcctgaggtgcaccaacattaaagggttaaaaagagttcatagaggagactgaaaaggaaaggggtcataaacacaggaagaatgccagagtagaaggtactcttaggaaagctattcaaaaatagcatgcagcaagtccttccatgggattgttggtttaaaaaagtaaatgtggtaggtcattataacaatgactgcagtgtgtcatgcctctctgtgtccatgcccactttgcaattggcatcgctgtttccccattaagaggtgtaatctacttttctactcattgactctggactggttttgtgatttgctttgactaataaaatgggggtaaaagtgacattgttcaggctccagagcctggaacttaagaggctttgtggcttcccctctcaccctgttggaacccagagaccatgctgtgaagaagcccagtccagccaactatacagaataggccatagaggggagaaacaaagcaccctggaagacaactagcatcagctgccaaacctgcgagtgaggacatcctggaccctccaaccatagctgatctaggaaatgaccacaggcataagagtgatccaaagcgagaccaacaatagaatcacctggattgccaacacacagaaccatgagaaataataaatcattgctttaagccaccaaggtctgggttgcttggttaaacagcagacgctgactaaaacaggaaaaatcagtatcaattgtggagagcctccagaaattaaaacatactgcattagctttggaactgggtggtgggcagagggtaggggggcagtgagaagactgttagtggaagctggaagagcagtggggaaactgtagcaggaggctggagggaggcagccatgctatcaaaaggcagtaccactggccaggctgtcacctgaggcaactcggaagacagaaaatgtacctcatgaatctgctaagaggatttctagatttctaatattccaggaacattaaaagtactgctttttgttagcttcatatgataaggtagagaaagacagagacagggataaaccaaagagaaatagttcagtcttaaagcagaacttagacaaaatatagaagccatggtttgccaggttggaaagtaaacatgtttctcgtctatggtttctacagctggcaaagatctaagagtaaagaccaaaacatgccaaattgtaaagaccatctatgctgagaagaaactgcatcaactaaagggcaaattaaccagttaacatcataatgacaggatcaaattcacatataacaatattaaccttaaatgtaaatgggctaaatgccccaattaaaagacacagactggcaaattggataaagagtcaagacccatcagtgtgctgtactcaggagactcatctcacatgcagaaacacacatactctcaaaataaagggatagaggaagatctaccaagcaaatggaaagcaaaaaaaaaaagcaggggttgcaatcctagtctctgataaaacagactttaaaccaacaaacatcaaaagagacaaaggcggccattacataatggtaaagggatcaattcaacaagaagagctaactatcctaaatatatatgcacttaatacaggagcacccagattcataaagcaagtccttagagacctagaaagagacttagaatcccacataataataatgggagattttaacaccccactgtcaatattagacagatcaacaagacagaaggttaacaaggatatccaggacttgaactcagctctgcaccaagtggacctaatagacatctacagaactctccaccccaaatcaacagaatatacattcttctcagcaccacatcacacttattccaaaactgaccacatagttggaagtaaagcactccttagcaaatgtaaaagaacagaaatcacaacaaactgtctctcagaccacagtgcaatcaaattagaactcaggattaagaaagtcattcaaaactgcacaactacatggaaactgaacaaccggctcctgaatgactactggttaaataacaaaatgaaggcagaaataaagatgttctttgaaaccaatgagaacaaagacacaacataccagaatctctgggacacatttaaagcagtgtgtagaggaaaatttatagcactaaatgcccacaagagaaagcaggaaagatctaaaatcaataccctaacatcacaattaaaagaactagagaagcaagagcaaacaaattcaaaagctagtagaaggcaagaaataactaagatcagagcagaactgaaggaaatagaggcataaaaaaccttcaaaaaatcaatgaatccaggagctggttttttgaaaagatcaacaaaattgatagaccgctagcaagactaataaagaaggaaagagagaagaagcacatagatgcaataaaaaatgataaaggggataccagcactgatcccacagaaatacaaactaccatcagagaacactataaacacctctatgcaaataaactagaaaatctagaagaaatggataaattcctggacacatacaccctcccaagactaaaccaggaagaagttgaatggctgaatagaccaataacaggatctgaaattgaggcaataattaatagcctaccaaccaaaaaaagtccaagaccaaacagattcacagccaaattctaccagaagtacaaagatgagctgctaacattccttctgaaactattccaatcaatagaaaaagagggaatcctccctaactcattttatgaggccagtgtcatcctgataccaaagcctggcagagacacaacaaaaaaagagaattttagactaatatccctgatgaacatcaatgcaaaaatcctcaataaaatactggcaaactgaatccagcagcacaccaaacagcttatccaccaagatcaaggtgtcttcatccctggaatgcaaggccagttcaacatatgcaaatcaataaacgtaatccattacataaacagaaccaaagacaaaaaccacatgattatctcaatagatgcaggaaaggcctttgacaaaattcaacagccctacatgctaaaaactctcaataaactaggtattgatgggatgtatctcaaaataataaaagctattcatgacaaacccacagcagtatcatactcaatgggcaaaaactggaagcattccctttgaaaactggcacaagacagggatgccctctctcaccactcctattcaacatagtgttggaagttctggccagggcaatcaggcaagagaaagaaataaagggtattcaattaggaaaagaggaagtcaaattgtccctgtttgcagatgacatgattgtatatttagaaaaccccattgtctcaccccaaatctccttaagctgataagcaacttcagcaaagtctcaggatacaaaatcaatgtgcaaaaatcacaagcatccctatacactaataacagacagagagccaaatcatgagtgaactcccattcactattgctacaaagaaaataaaatacctaggaatccaacttacaagggatgtgaaggacctcttcaaggagaactacaaaccactgctcaatgaaataaaaggggacagaaacaaatggaagaacatttcatgctcatagataggaggaatcaatatcgtgaaaatggccatactgcccaaggcaatttatagattcattgccatccccaccaagctaccaatgactttcttcacagaattggaaaaaattactttaaagttcatatggaaccaaaaaagagtctgccttgccaagacaatcctaaccaaaactaacaaagctggaggcatcacactacctgacttcaaactatactacaaggctacagtaacaaaaacagcatggtactggtaccaaaacagaagtatagaccaatggaacagaacagaggcatcagaaataacaccacacatctacaaccatctgatctttgacaaacctgacaaaaacaagcaatggggaaaggattccctatttaataaatggtgctgggaaagctggctagccatacgtagaaagctgaaactggatcccttccttacaccttatacaaaaattaattcaagatggattaaagacttaaatgttagacctaaaaaccataaaaaacccagaagaaaacctaggcaatactattcagtacataggcatgggcaaggacttcatgaccaaaacaccaaaagcaatggcaataaaagccaaaattgacaaatgggatctaattaaactaaagagcttctgcacagcaaaagaaactaccatcagagtgaacaggcaacctacagaatgggagaaagtttttgcaatctacccatctgacaaagggctaatatcaagaatctccaaagaacttaaacaaatttacaagaaaaaaatcaaacaaccccatcaaaaagtgggcaaaggatatgaacagccacttctcaaaagaagacacttatgcagccaacagacacatgaaaaaatgctcatcatcattggtcatcagaaaaatgcaaatcaaaaccacaatgagatgccatctcacaccagttagaatggtgatcattaaaaagtcaggaaacaacaggtgctggagaggatgtggagaattaggaatgctcttacactgttggtgggagtgtaaactagttcaaccattgtggaagacagtgtggcgattcctcaaggatctagaactagaaataccatttgatccagccatcccattactaggtatatacccaaaggattataaatcatgctactataaagatacatgcaaactctgtttattgaggcatcattcacaatagcaaagacttggaaccaacccatatgtccatcaatgatagactggattaagaaaatgtggcacatatacaacatggaatactatacagccataataaatgatgagttcatgtcctttgtagggacatggatgaagctggaaaccataattctgagcaaactatcacaaggacaaaaaaccaaacaccacatgttctcactcataggtgggagttgaacaatgagaacacttggacacagggcggggaacatcacacaccagggcctgtcatggggtagggcgatgggggagggatagcattaggagaaatacctaacgtaaatgatgagttaatgggtgcagcaaaccaacatggcacatgtatacgtatgtaacaaacctgcacgttgtgcacatgtaccctagaacttaaagtataatttaaaaaaaaagaccaaatccagggtgctgccagtaaaatatggcctctgcttccaaatcaaatcaagggtgtggctgaaggccctttgttaagaccacccaaagattcaaggtcgtatttcatctaccttctcaacaagactaaaggcctcctcagactcatatctgcattgtctgatacagtcaacagtctacctgaaaagaaactgtgaagtggggcggactaaaccagagtcatggaaaacaaacaatttttacggtaattgtgctagattggacaaaaagggacggagacagttctaagtgaatataaataaacctcccagttttctacaggcagaaatcaaactgagaaagccacttggctacaagcatggattatttcctatggaaacggaaagaatggggagaattggtatgtgtgcccagatggatttcagaattgccatggacacgtaatttctcaggccatcccattcttccccctcttaaacagtagtgtctgttgatcatcactgaatattgggtgtctggggggcagataacttttctttttagttcacaggtatctagatcaagaagactcacacttcaggagaggcaaccaaggagcctctcgcctggattgcagatcataagatactggactttgagtctggtagtaaataggatgtagctttttgggttcttggaaaagggtgagtctgttttacatgtcggaggggtagaaatattgtggccagtgggcaaactgtggaacagtaaatatggccacaaattctgtgcatgtcttactattaagaggttgaatctattgccccaccccttgaattgaggcagcctcattcacaagtctggaagttaggtactggcccttttgcctcagttttcctctaggtggcttctcattcttcagagactgcttctttgcatggcagtctcagggtggcattcggagtgggaaaaaggtagaagctacaaatcttctcaatgcctaggctctagaacgttcacaaagccacttttgccatattttatgctcaaaacaaatcacaagaacagccccaattcaagggataggataaagataccactttttaataggaggctctgcaaagaatttgtggccatacgtaattttctactgtggacgagagcctttcaaactctgagaatatgttaaactaagtatagaaatgtttaaaagaatgaaaataatttcttaagaagaaatatgttcttcaagctgggagcggtggctcacacctgtaatcccagtgctttgggagggtgaggtgggcagatcacttgaggccagaagtttgagaccaacctggccaacgtgccaaaacctcatctctactaaaaatacaaaaattagctgggcatggtgccaaaacctcgtctgtactaaaaatacaaaaattacctgggcatggtggcacgcacttgtaattccagctaccagggaggctgaggcacaagaatctcttgaacccaggaggtggaggttgcagtgagtcaagatcgcgccactgcactccagcctggatgacagagtcagactttgtttcaaaataaataaaataaataaataagaagaaatatattcttcaacagaaaaaaatgaaagcaaaaagaagaaatttatatgttaacagagatttgaaggacatatcagttcattgcaatgtgtggactttactggagttcaatttgaaaacataaactgtaaaaataaatatttatcacatttctgagacaattggaaatcttaccactgagtcgacatttgatgttattaaggaattattgttcacttttaagtataatgttagtattttatgtttttaaaaatactttaaaatttagagatatatactgaaatatttacagatgtatgatttgtttcagactaatacataagatgggggttaggatgcagcaggtattggtcacatgtggatggtttttaaggttgggtgatgggtacatgaggatttattacactattctatctacttttgcatatgttaggaattcttaatattgacaataagttttaaaaagaaactaaaaaagaattctgggcacaattcatattttatatacattttatattgaataaaatttgttccatttgattataactccagtttaaaatgtacaatttgacaagctggtataaacttgattttaccaggtaatcttcctatatttatatagaacatttaaatattagtattacaacatttcaagagaatttttgattcatcagatatattttagcttattatatctctaacagttaaattagcacttgagagaatttcgtataaatggaactcagatatgttaaatttataaaagcaattttaaatatttgaaaatgtttaattatctagtatgtaaatagcaccaaacattattctaagggccctcaaaagtgactgctaaaatttgccagacatagaaacaggataataaggtttgtgacttaaacttcaagcctcaggaagaaggagaatttttttattttttaactttaacaaatcacacattaattttaacaatcaatagactatgagaaggtaaagttttcaagtcatctgaaaatcatatgcaaggatcaaagacattgcaagaaaggaaattttaaaacattatgtgaacagcaccaaccatttgtattgcagctacatgcaatctggcttcctccattaaagcttcatctgttgtggattctgtcttcatatcattatgtgaaacgtgggaaaactgaaccgtatcagatgacattttaaaacataaagggataaagttaaaaataagtaaaaatgattaggaactggcaaatactactctcaacaaagattccaataattcaaagcagaattgctagaatgaagagctatgtaatgttttttcatataagaagtgttgccttcaattgtgctaaagtaaatactcatttggggagatttatatcccaaattcttctctaaacttatctatatgtttgattgctctctaaatcagcccatgttttctgctttttataacacttctaccaggagagaattatcagtatcttaagccattaaaaacattatcttggcagaggccattgattggtactcaaccagccagattgtaaaacatccattctcctggtatttggcaaataaagctggataaccaagaccttctctttggagacagaattcaaactcatttcaccaaaatagcaaagccagtaactatctcccctcagttttgtgacatttaattagcagaatcaggtctttaacaataggctaaagcaagtgaggcagaccaagggaaggaaaggaaaactactttttgccaggtatcaactcacaggaatgtattcgatcctcgttttatcttctactaaggtccagttaacatttgtcaaaattttttctgttttaaataaagttattgtgttctgtactatctcctgtatgtgctgagtggcattttgcaagatcatttgtcttgggagggaaagaacacacaaatctgtgacaaagacaaaagcaaaggccttaatagagtacagtgaggactgcaagggaaagcaaaaaatgttgcatgatcatgtagtgaaatcttgagatcacctgcaaaccagagtggttagagcaaggacaatttttcatacaaaactttccagaagattacccaactatttgtttctttttggctgtacagctcaactttatctgactcaactgataaaaaatgtttattagtttccttgctttccctatagctaaagacatgactacttcaacgcacctaatccatatttctcaaagtgtaaagtgtacaggtggaagggctgcctattaaactatgcaaattcctgggttccactccatacctacagaatcagattggcttgaaaatttgcattttaacaagttctctcattgtttcttatactgtacataataacatttaaaggccagtgcagtagagatccctcaagtttaacatctctgttttctggccagtgaatcaatatgttcaaaatttgaagcattttgtattttcttgaggtatgaactacaaggctcacttaccaaagagaagaattaaatgagtaaataagcttagcctacttactcacaattccatctcaataaagctgttctctccttaaaattgcatatgaaatgtctcttcaagggttaaatggcttctaaacgtttcagtttaactttatttcactctctatgggacactgcgtacaatggagtgatttgaagtttggggattcagaaagatctgtagggatatccctctcaaacatcaggatcagttcactgtaacctggagcaaagaggcatctgactgcctgctcccttggatttaaaattcccatggctaagaccacacaaggagaaaatgtattcatttgcccaattagatcccacccatatgatggggcaacagccactttccagttgctcaggggaaatatgaaggcatgtaggctacttggtggcaccagtacatctgaatatactcccagtggttaagataatcctggaagaatatgaggagggaccttttaaaagcattagaccaggtggaaggagttggtttgaaactctgactgataaaactcaagtccgacaagcacctgttaaatgtgtaccacatggtattcctagaaacgatgaacattgactctgaaaagataaagtacttgctatacaatctttattccacagtgagttaaaagaaattctgaagcttggttaatacaatcaaaaatttatagaggggaaaaaaagaaacaagacaaaaaaagcattgtcatgatagtacaatccctcactgatctcacttttgaataccagagtaggaggaatcacaagaaaggaagcatgagagaaacccacatattttatcttaaaaaaagagagtcaactgggtcaggatccctggcagccaaagggatttggtaggaaggaaagtgtgagcaagacttccggcatcaaattaacttcactcatgctgccttgtgagcttttgccaatccaagcacaccttttcactgcaaacaagaataaaccaagaccaggtacagtggctcacaactataatctcgacactttgggatgccagggcaggagaatcccttgagcccaggaattcaagaccaaccagggcaatatagccagaccctgtttctactaaaaaagaaaaaaaatgagctgggtgtggtggtgcaaatctatactcccagctattcaggaggctgaggcaggagtatcacttgagtccaggaggtcaaggctgcagtgagccataatcgtgccactgcattgcagcctgggtgacagaatgagatcctgtatctttttttatttttttattttatttatttatttatttatttatttatttatttttgaggaggagtttcactctgtcgccaggctggagtgcagtggtgcaatcttgcctcactgcaacatccacctcctgggttcaagtgattctcctgcctcagcctcccaagtagctgggactacaggcatgcgccaccatgcccagctaatttttatatttttagtagcaacggggtttcaccatgttggccaggatggtctcgatctcttgaccttgtgatccgcccgccttggccttccaaagtgttgagattacaggcgtgagccaccacgcccagccctgtatcattttttttttttaaatgaagaagaacaaacacagcctggtggggtggtaagcacctgtagtcccagctactctggaggctgagcccaggaatttgagaccagcctgggcaagatagtgagccgttgaaagagagagagagagagagagagagagagagagagagaaggaagggaagggaagaggaggggaggggaggggaggggagcaagtccataactgggggaaaaggagagctgcctaaaatctgccccacgtgctagcctcactcaaacattggagccctttgctttgaggtgggctgtcacaggaagttctgcaatagtgtttatgaggcacagttctaagaatgtgcaggactttctgaaaacacccaagcagagcagtgttgtctctgagtaggacaggatgaatatagcaggctacttccatatttagaacaactctccttcaacattatccttcctttgccctcattagttccatgctctatgagaaaccttttgattaccaatttggtttatcaagaaaattggtatcagaggtgaatactgtgataatggtcacaaaaatttcagacatagaaattcatcctcattataaactagtaaatcggccttctggtttattgatgaatctgtgaatgtggtgcaggcatgccttatctcattgtgctttaccttattgtgctttgcagatattacagttcttacaaattgaaggtctgcagcaaccctgcatctagcaagtctatcagcaccatttttccaacagtatgtcctcgcttcatatctctgtgtctacattttggtaattctcacaatatttcaaactttttcattattattatatccatgatggtgatatgtgatcagtagtctttgatattactaatgtaattgcgttggggcaccacaaactgcacccacataggacaacaatcagtaagtgtgtgttctgactgcccctcagactggccatttctgcatctctctctcgctctctccttggatctcgctattccctgagacacacagtattgaaattaggccaattaataaccctacaatggcttctaagtgttcaagtgaaagtaagagtcatacatctctcactttaaattagaaactagaaatgattgaattcagtgaggaaggcaggttgaaagccgagataagccaagcactaggccttttgcactagtcagccaagttgtgagtggaaaaaaaaatctcttgaaagaaattaaaagtgctactccagtgaacacaccaatggtaagaaggcaaaacagccttattgctgatatggagaaagattgagtggtctgaatagaaaatcaaaccaacacaatattccctttagccaaaatctaatctggagaaaggccctaactctattcagttatatgaaggctaagagaggtgaggaagctgcagaagaaaagttaggagctagcggagattggttcatgaggttaaaggaaagaagtcatctccattacataaaagtgcaaagtgaagagcaagtgctgatgtagaagctgcagcaagttatccagaagatctagctgagatcattgatgaaggtgattttcaatgtagatttcaatgtagattcagcagattttcaatgcagataaacagccttatattggaatagaatgctatggatgactttcattactaaaaaggaaaagccaatgcctagcttcaaagcttcaaaggacagactaactcttgttaggggctaatgcagcttgtgactttaagttgaagccaatacttacttatcattctgaaaatcctaagactcttaagaattaagctaaatgtattctgtctgaggtctaaaaaatgaaaaaacaaagcctggatgacagcacatctctttatagcatggtttactaaatattttaagctcactattgatatctactgctcagaaaaaaaaagattcctttcaaaatattactactcattgacaatacacttagtcatgcaagagctctgatggagatggacaaggagttgaatgttgtttccctgcctgccagcacaacatccattctgcagcccaagtatcaaggagtcattttgactttcaagccttattatttaataaacacattttgtaaggctatagctgtcatagatagtgattcctctgatggatgtagggaaaatcaataaaaaacctcatggatagaattcaccattctaggtgccattaagagcattcataattcatagcaggaggtcaaaatatcaacattaataggagtcaggaagaagttgattttaaccttcatagatgactttgaggggttcaagacttcagtggaggaagtaactgcagatgtggtggaaatagcaagggaactagaattagaagtagagcctgaagatgtgactgaattgctgcaatctcaggataaaacttgcatggatgaggagttgcttcttacagatgagtaaacgaagtgctttcttgatatggcatctactcctggtgaagatgctgtgaacattgttgaaaggacagcaaaggatttagaatattttataaacttagttgctaaagtagtggcaacaggttttgagaggatttattccaattttgaaagaagctctactctatgtaaaatgctatcaaacagcactgcatgctacagagaaatctttcatgaaaggaagagtcagttgatgtgccaaacttcactgttgtcttaaagaaattgccacagctgcccaatcttcagcaaccaccaccctgatctgatcagtcagcagctatcaaccctgcaccagcaaaaagattatgaattgctgaaggctcagatgattgttagcatttttttagcaagaaagcattttttcattaaggtatgtaaatagttttcttagacactgtgcttttgattataattgactacagtatagtgtaaacacaacttttatatgtactgggaaaccatataatttgtatgacttgctttattgtgatatttattgcattatttgctttgtcacgtggtctggaattgaacctgcaatatctccaagttatgcctgatatgtaaatctctagtagtctgatcaattttaaatacccagacaaaatcgggtctctgtagcagcaaagctgaggatcaggccatggcatattgaactatactaaggctctacgataagactttgcctaatctcaccccagttttctcctctccccttgaacctactgccaccaagtatcttatcctggatttctctaccgaatgtgtctatttgttattttattatatttatgcattttattataaatggcctgagattccttttagaaataaccaactgtggcagagcctgctgttatctcccaacatccattctcttcttcttccttctgctaatagaatctccaagttttggctgatcatatcgccagcccggaaagatgatatttcgcagcttcccttgcccatgtgtgtccatgtgactaagttctggccaatggaatgtgagtgataatgatacatacagagggaggctgcttaccctccattgccacacacccctcccccaccatttcccctttctagttggttggattgtagacatggtggtagtgagcaggcttctaccctgtgggcaagagcagcaccctagggcatggaagagcaatcaaaggaaaggaacgtggatttctaaacaactttatgtagagtagaaccatctcacacttctggactttttggtggagggaaaaaaaaaccttctgtcttgtttaagcctctgttcatttcgcttttgttaaactggctgaaacaatatcccaagtaatacagcatctaaatatatgaataaatgaaaaatgaataatttctaaaccaattccttgagcttcatgagaaatgtccccatgacacccaacaataacctgtttgtattattctccccagctaattcatgaatgagacacatactttacctaacttcctggctgactgagtcatcacgtatgaatttattcccattgtcaataatgatattacttgtacatagagtataaactaaaaacaaagcacataaatagttagaaccaaaacattaaataagttctccaaaagcaatcattgttcaattagccacttacaaaattctattaatatcttaatccacattttaaaatcctgtttctgataagtcagttaaggcaaaaaggcagttttgtggacattgcctgaacacactacactggggcagacattaattttcaatctgaatgaggaaaacagtagactggagattctatgctaaggacacagggaggaggtctccacagttgccactcctggcagcagtcatgcaaagacagcacggtggtagccatctcaggcatggctgtggaacctgcagggtggggagaaagcccagcaaccacaggcggtggtgaccgtgggccacagagggatgtgtgcctgccaccagcatttgctacggctgtaccagaggctctgaaggagaaggcaggagctgtggtggggcctggagagatgctgtgcggaaggagaaaggtaatatttgtaggccatgactttgccatttcttagccatgtgattggggggcagttaatttaaccaccactcagagccacagcatccttcactgaaaagaggagttaatagtaatttctcctccagtgtctctcacacttgactaataacaacaatcacctgaagtgcttgttaaacatactgactcccgctgtgggttgtgattctgtaggtctagggtgggattcttaacaccagacagaattaagaaacactgtgaaatgatgcccaggtgctagttaacttctcattgacttggttttaggccaattccttgcataaaagagaatcggaggagctgtaatgttgattattttacttttcttttggagcatggaaagaaccaaagtctttgcaaaaccactggttatttgaactcaaaattcatgcccagatcgggcccacagatataaatcctcagaaaaaaaatgtggtgaggaataggaatatgatactccatcaaaaatagcacttcctgtttggggagttagggcacgtgaggtctttccctctcatgctacatacagaaggctactactctctttgattggatttctccacatgcaagatggagaggtcaatagttgctcccaaaaagaaggtattaaataaatactgtactccttgggacttcggggcagcagcaaaatagtaaagagaagttctaggatggaaattagacaatagcaacaaactctgtacatctacctccagattccttggtaggtgagtcagtgctcttgagctcatatcattcaagcggttttccccctcccagaaacagatctggggttcatctgattaggaggtaatgagaggctgatcctgaagatttctagcagcttctggaaacttctctagctagctcatagtgctgtcacaaatgacaaggtgcacggccagcagatgcactgggctctttgaatcttgcctggaatgtcagatgcagccaccaccagactccccagaaatctaccagctaacccatggggaaaggctttgagaaagagtggaaaggaaaccaagttttgttttgtgatacagataatggagtctttgcccagaatttttcgagaaataaattttttaaaattagccctaaagacataaacctaactagatctttaatgtaaaaatatataaaatcttttttatcttggtatacttaactagcatttcagtttttgttctaagaactataaggattagaatgctcctgacaagagtatcattttttcatgctttctgatggctattgaaaaattgcatttgtacccgggcctggtggctcacgtctgtaatcccagcactttgagtggaggccgagacaggtggatcacctgaggccaagagttcgagaccagcctggccaacatggcaaaaccccgtctctactaaaaataacaaataataataataataatccagatgtgtttgtgcacacctgtaatcccagctacttgggaagctgaggcatgagaattgcttaaacctgggaggcggaggttgcagtgagccaagattgcaccactgcactccagcctgggtgacagagtgaaatcttgtctcaaaaaaaaaaaaaaagaaaaaagaaaagaaaatagcatgtatgtgttcaataacatttattgagcatttattaagtgtctggtattttattgagcatcatctcaattctcaactgaaagttgaagctcagcaagcctggggaacttcctcaagatcacccagcctgtgaatggtggagtccagatcagagcccaagtttatctaataccacatccataactactccatgactattggtccctttcacattctcaacataaataacgttctgctctgttcctttctacttaaaagaatgcattttaaaaatctaattcaaagctggttaactttattactgggttctctgacaagtgggcaagataagtaaaaatgataaatatgaataatcatgagacatgatctttcctaccatttgtggtacttccacttttcgttcagcgagattataaacatcaggagcccagagtaaattaaaaactcctttaattccagaccacgtgattacaactccccatcgccaattatattcataatttgaatgcatcaaaatagggctcactaacaaaatagtaagcaacctgtggagagggaaacattaaaaataaatctcaccttgtttattaatgttattcatagttgaaagcaagtactaaatactaaatttaatataaaaattttcgggaaagaaaaaaacaatgcaatttactgttaagtccttccaattttctgagactaaccaaatctactatttaaagtttgcacataacacttaagtcttgaaaaataatgctagaccttctaaacaaatataaggaattatcatcaacactactgtatactgtttggaattgggtagtaaatgctcacagggaaacctcttctaagaatgctgacaagctcatctactccctgaaaagccatacatgactggattcaaaaattataatgggggcatgtgcagatcatgactcaaatgtaaaattattttgggcacattaataaacaataaataataaaaaaagtttattgagctcccacaagaatcatacgctaaatgtcacacaaataattttaatttgtgccttcttgccctccagattacttttctatacgaccctgtgccaaaatttaaaatctatcattaagggactggcagtgagagaatatcaatactgtacttcaaatgatttagaacaaatgaaatttcagcgaaagtgaaaacagatgtgttcttagcctcaaaaaaaaatattgtgtgtcagttgatcaactataattgcacaagtcaatttagagaattcctgtcattgagaaacagaaaatctacaattaccacctataatgtatataattatttgggcaaactcctctgccttgcattcaagccttttgcaacgtgactcttaccaaccttttcaggcttactaaataacctttccctaaaatatcagagtccaaccaaaatagaaacaacttatgtcatttcctgatatcaaaaacagggaggcagaacagcaaatactctgaagtcagcctacctgtgttaaatctagccttgccttttactaactgcataactacataagcaagttaatctctctgtctcagcttcttcatctgtaaaatgaagataataacaatggtacttgcctcaaaggattattgtggtaattcaattaaataaggcaatactcagggcttagaatgatgctttgcaggtggtcagcactcaatacattatcaatacataattatgactatatatgatacatatgtatccatacaaaatattcaatcagcaatgcttactatgttcgtgtattcccatttctctatcttggctcatcctctctgaaatatttttctctagtctttacagaaaacccacacacacttcgagggccaacttaaggataattccctccattaaagcctttcctctagtgatgtggaaccatcagttcagcaagatctctggcactcactagccatttgaccttggaaaaggtcctttgcttttctgggggttgatttctttaaagtgtagaaaataacagagataaataattggagatgataattcttatctcctagtgttgttatgaagatgaaatgagataatggatgtgtacctgagtcaaacattgtgctaaagccatgtttctttctttatgaccaatctcagcttacacatgagctctcgtggcagaacgaaatgttaactttcaaatggaataatttagtcttttctagtttaaagattctttgggtataacttagtcttgcctatacagatagtcaattcaaagttccctataaagagcagtttctcctgttttccaagatgctccccctgccctgcctttccaagacagggtctgggtgtagaaggaaattcacataactcatggcatcagggaaagtgttgcagagaacatctattgatttaggtgttttgtgttacttgtgtttggcctttggcccctgttcttgagacatctactgggaagtattcttggtctatttttttcagcaaggccaatgcatggtaattgctcagatgacctgtctcctctgccaactaaatgaccaccaccacccagcactgcagatcccttgaggtctgctgccactcccatttgaccctaggtttgagtggtctcccatgcagccctccaacatgggctcactttggtgacccttctggcaaactcaccaaatatcttctgaattcaccacagaggaggaaagaacttcagattccttccatgtcagaaacagattaaggaaggatcaaaagtacaatctcgggcctactgtctacttacataggtcaacccaccatttctactcagtagccttaggcccatgtcactctaggaggctatattttctcagagttccaaacaggaggtataggtggggatatgataggggtggagcagtctcctcaccctaatctcaaccccctctataatcagcaatgttctacgtccccttcctgtttgtcataacctccatcatcttcaccatggcataaaataaaattatataatccgaatctaccaagcttgtctgttgatatgaaaaaagggtattttcagaatttaacaaagtcttcttcagcaaagcctggctttcagaactgttgtctcattgtggggtctcaaaaatattcagaaatcaggagctacatataaactctttattttggaatttcatcataaaatcttaatccttttttagctgaatagaaggaagttcatacataaagaagtgtaatacgaaaaataaaacactttaatatattgcaggaacaccactccttttatagtggatattgtggtgttccatttagacatcctcttcagggccgatagcccatcccccaactggtagggatttgaggatttaagtgggcctgcatggctctgcctctcactgcacattgctctgggccacagggacctgccctactcaaagttgttgcctctcaagggatagcccttggccaatgactgcattatgcagagatacaaaggcctgttcccttgtctcagtgtgggatgactctgaagggctcttccagctccacagtttcccaaagctcaggggagccttggatgaaactgtgctgtaggtcagcttgtccccttgcccaactctgccttccacacttgcccaataaaccttctgccaacaactgtcccaaccctccctctcagaatctgcttccaggaaacccaacctatgactcctttgaatttgtaaatctagcacagagcaggctttgcacagaaccccgcagctagctatgaagccccataacacgtttcttgttccttctctctttctttttaatttttaatttttattgttttttttagacagagtctcactctatcacccaggctggagtgcagtggagtgatcttggctcactgcaacctctgtctcccaggttcaagcgattctcctgcctcagcctcctgagtagctgggactacaggcatgtgcaaccacgcccagctaatctttgtattttagtagaaacagggtttcaccatgttggccaggcttgtcttgaactcttgacctcacatgatccacctgccttggcctcccaaagtgctgggattacatgtgtgagccaccgtgcccggccccataccacatttcttaagcctcccatatgaagcttatctttccttatgttatagttatttatatatttattttatccctccaactagaatataaacttcttgaggagagatgctgtgttttatgcatctctgtgaaccttgagacttcaaacagcaagtcctattgtattcacacggtcactcctttttagagaaagagatgtggggttgctgtttgcctgggatggaggtgggagtgagggatgtcaccagagaccagtgaaaaaaatgtaccatattgtttggcttctaagctgaaagactacttattttttaaggcaagtttgcatagctgtacaaccaagacctggaagtagaattagctgaatcagcatcctctgacctcagactaaagagttaataggagacagtgtctctgttctacccttagttccagctcttcacactggggggaagcttgtcagagaaatgtggggtcctgctgatgaatggagtatggatgggaagtctgacaatctctcaggagtatgactaacctgagggacttagatacaacagagtcctgactagagcccctgtccaggtgacagccttcaaggacatcagcaactggtcccagaacaggcttgaccagataaattgatgatcactggtcccttccattgccaccaccagtgaccaatcatacatgaaaaagatcagccactcccacccattcccccaaggactgaccaatcacataagatacacacacacacagacacagacacacacacacacacacacacacccccaactgtaactaatccaacaatcctgaactgacctgggaagtcactagattggaatgaatttacctgattatatgtaaactaaatccaccaggatccagctcacagctatgtagtaaagccagttctagaaataaaatttcatttttttgagtactaaaaatctgggcaccgttataataggaattaagttatatgcccattacaactctataggaaaaaaattcattaaggtcatcgttcaagtcagaaactagcccctgtgcccaatgactattgaaaaacattcagagctccctagaagtgttgactgcaacatcaaaaaggccaaattaatctttgtcaaggtggaaatcaattatacttttttttctaattttgtacctcatcaaagcgaaatcctgaggtctggatttttaaaaatatcttttaatgcgtttcataatgtttatttttctgattatcataaatgcaagcaatctcacaaattgtagctttcagtctaccttaaaagattattaattttaaatattctttaaacattttatacatagtggagcttattaacagattaggaacaattttctattaatcttaaaaatacacacgtcaagggtaagtgattttataaaaggaaagtacaagattttcttgtccataattcacacccctcaggacctttggattctttctaatttttcatctctatgaatacaactacaatgaaaatacattgaataaatcatcatccagatttttaaaataatttaacagcttcattggtatacagaaatctgcacgtatttagcatatataatttgatgagcacattatccactccacattttaaatcacattcttagaagtggaatacaaacatttataagattcttacagttatttagtcattcaacaaatatatataaaaattttattccagaatctaagaatgttgtagagatcaagagagctgatcccttcccccagggattacatttcactgcggaaacaaacattaaatcattaactatacaagtaagtattctataatacttgcagggagtgctaaaaggagaactatacagtgagaaagagtgtgggagagcggtgcctcccctggtggaggcggacagcagggacaagaagcagggaggctttccctaagcaaggatcgtttgtcctgtaatctgaagccacggggggccaggatgaagggcagccagaggatagccttggaaggacctgaagaaacaagtatctgaggaactttgtcacacgtgtttggaatgaagacagcaagcagaagagggtcctttgagccagctgatgaggggggcagggccagtgttccacaaggtctttatcacagtctcacagggctgaatgcatggtttttaggaaccactgattttaccacttttccttttattttcaaaaatttctagtgagtttgaaacttaaaaatgttttagccactcatatttcttcttttatgaacttgtcgtatccttcataatttttttttaacgctccctcaacccagcttttcccaactccaggaaggaccgggaagagaaggccaatctagttactttatcttggttttaaatgataaaacaatacatgaatactgaaaaaacctcaaacagtaaaaaagtatattaaaaatgttttaatttttaatttttgtgggtacagagtaggtgtgtgtatttatggggtacatgagacatttgatacggggcatgcaatgcataataatgacatcatgctaaatcgggtatctatgccctcaagcatttatcctttgtgttacagacaatccagttagactctcttagttatttttaattgtacaattaaattatcaactatagtcaccctgttgtgccatcaaatactaggttttactcattctattttttgtacctgttaaccatcctccactttccccccttatccccctactacccttcccagcctctggtaaccatccctctactctctacctccatgagttcaattgttttaatttttacatcccacaaataagtgaaaacatgtgaaatttgtctttctgtgcctggcttatttcatttaacataatgacctccagttctttccatattgttgcaaatgacaggatctcatgcttttttatggctgaatagtattccattgtgtatatgtaccacattttctttacccattcatctgttaatggacacttaggtcgcttccaaatcttggttattgtgaatagtgctgcaataaacatgggagtgcagatacttctttgatatactgatttcctttatttggagtatatatgcagcagtgtgattgctgaatgatataactctgtgtttacttttttgaggaacctccaaaatattctttgtagtggttgtactaatctacattcccaccaacagtgtatgtgagttcccttttctccacatccttaccatcatttgttattgcctgtcttttggataaaagccattttaactgggatcagatgatatcttactgtagttttgagctgcatttccctgatgatcaatgacgttgggcacattttcatatacctgtttgccatctgtacgtcttctttagagaagtgtctactcagatcttttgcccattttttaatcagattgttagatgttttcctatgacttgtttgagctccttatatattctggttatgaaactctcaccagatgggtagttttcttttccttttcttttttttttttttttttgagatggagccttgctctgtcacccaggctggagtgcagtggcgcgatctcggctcactgcaagctctgcctcccgggttcatgccattctcctgcctcagcctcccgaatagctggaactacaggcgcctgccaccacgcctggctaattttttatatttttagtagagacagggttttaccctgttagccaggatggtctcgatctcctgacctcatgatctgcccgcctcggcctcccaaagtgctgggattacaggcgtgagccaccgtgcctggccgggtagttttcttttttctttttttctttttctttttttttttttttttgagacaaagtctcactctgtcgcccaggctggagtgcagtggtgcaaactcagctcactgcaacctctgcctcccgggttcaagcgattctcctgcctcagcctcccaagtagctgggattacaggcatgcaccactgtacagatgggtggtttcctcccattctgtgggttgtctcttcaatttgttgattgtttcctttactatacagaagctttttaactttatgttatctaatttgtccattttttctttgattgcctgcacttgtggattattactcaagaaatctatgcccagaccagtgtcctagagggtttccccaatgttttcttgcagtagtttcataggttgaggtcttagatttacatatttaatccattttgatttgatttttgcatgtggtgagagttaggtgcctagtttcattctttcacttatggatatccagttttcccagcaccatttattgaagagactgttctttctccaatatacgttcttgtcacctttgtcaaaaaagagttcactgtagacatatggatttatttctgggttctcttttctgttccattggtctatgtgtctgtttttatgccattcccatgctgtgttcattactatagctctgcagtataatttgaagttaagtaatgtgattcctccacttttgttttttttgctcagattacctttggttattctgggtcttttgtgttgccacataaattttagaattatttttcttatttctgtgaagaacgtaattggtattttgatagaggttgcattgaatctctagatcattttagatagtatggacattttaacaatattgatccttccaattcatgaacgtggaatgtcttttttttatcatgaaggcatgtttttattatgaaggcatgctgaattttatcaaatgctttttcatcatcaattgaaatgattacatggtttttgtccttcattctgttgatatgatgtatcacatagattgatttgcatatgttgaaccatccctgcatccctgggataagtcccagggatgatcatgatgaatgatctttttaatgcattgttgaattatgtttgcttacattttgttgaggatttttacatcaatattcatgagagatattgacctgaagttttctttttttgatgtgtctttgtctggtgttggtatcagggtaatactgacttcttagaacaagtttggaagtatttcctcctcctctatttttcagaataatttgagtataatgggtattattcttctttaaatgtttggtagaattcagcatggtagaagccatcaggtcagggcttatctttgctgggggactttttattacagttttgatctcattacttgttattggtctgttcaggttttggatctcttcatgatttaggtagggtaggtggtatgtgtctaggaatttgtccatttcttctaggttttccaatttattggcatatagttgcttatggtaaccagtaatgatcctttgaatttctgtggtatcaatcataatgtctcacttttcatctctgattctatttatttggattttctctctttttctcttagtctaggtaaaggtttgtcatttttgtttatcttttcaaaaaaccaactttttgtttcatttatatttcctatttttttcatttcaatttcatttatttgtgctctaatatgtattatttcttttcatctaccaattttgagtttggtttgctcttccttttctagttctttaagatgtatcattaggctatttgcttggagttttttttttttcttttttgatgtaggcacatgtaactataaatttccctcttagtactgcttttgctgcatcccataagttttggtatgttgtgtttctattatcatatgtttcaagaaatttttcagtttccttcttaatttcttcattgatgcactttcattcaggagcattttgtttaatttacctgtgttgtatagtttgcaaaattcttcttgttattgatttcttgttttattctggaaaatgcttgatattatttcagcttttttgaaccttttaagacttgttttatgatctaacatatggtctgtccttcagaatgatccatgtgctgaggagaaaaatgtgtattctgcagctcttggacaaaatgttctgtaaatatctataaggtctatttgttccatggtgcaaattaagtccaatgtttctttgttaatatttttgtctggaagatctgtccaatggcaaaagtggggtgttgaagtctgttattattgcattgaggtttctctctctttggcactaataatatttgttttatctgggtgctccagtgttgagtgcatatacatttaaaactgtcataccatcttgctgaattgactcctttatcattatataatgaccttctttgtctcttcttacagtttttgtcttgaaatgtattttgtctgaagtatagctactcttgctcttttttggtttccactggcatggaatgtctttttccatccctttattgtcagtctatatgtatctttataggtgaagtgtttttcttggagacaacagatcattgggtcttgttttttattattaattcatccactctgtcttttgattggagagtttagtccatttacattcaatgttattattgataagtaaggacttactgctactattttgttatttgctttctggttgttttgtggtcttctctttcttctttccttccttccagccctttcaatgaaggtgattttcactggcagtatgatttaatttcttgcttttaattctttgtgtatctgttgtattttttaatttaaggttaccatgaagctggtaaatactatcttataacccatcatttaaaattgatgacacttaacactaattgcataaacgaagaaataagcaaaaagaagactgataaaaaacgatacactttgactttacccccctgctatttaactttttgttgtttctttatatcttattgtatgtactgtctatgtcttgaaaagttgttgaagtaattacaactacaacaaatgtagtttgtcattttgcatttctacttaggagtagtttacacaccacaattacagcgttttttaaatattttattttaggtttgggagtacacgtgaaggtttgttacataggtaaacacgtgtcacaggggtttgttgtacctattatttcatcatgaaggtattaagcccagtacctaatagttactttttctgctcctctccctcctcccatcctcccacctcaagtagatctcagtgtctgttgtttccttctttgtattcgtaagttcttatcatttagcctccacttgtaagttataacatgtagtgtttggttttctgttcctgtgttagtttgctaaggataataacctccaactctatccatgttccacaaaagacatgatctcagtcttttttatggctgcatagtatttcatggtgtatatgtattacattttctttatccaatctggcattgatgagcatttaggttgattccatgcctttgctattgtgaatagtgctgcaatgaacattcacgttcatgtgtctttatagtaaaatgatttatattcctctgggtatatacccaataatgagattgctgggccaaatggcagttcctcttttagctctttgaggaattgccagacagtgttataattgtccatgattttccatgtacccactattaccagtaagtctgtgtcctgaaaatttgttgaaattatcatgtttgataggttcatcttttagtctttctattcaaaatgtgagtagtttacccaccacaattacagtgtcatagtattctatgtttttgtgtgtacctactattaccagtgagttttatatcttctgatgatttcttattgctcattaacatccttttctttcagattgaaaaactccctttagcatttcttctaggaaaggtctgatgttgatgaaatccctcagcttttgtttgtctgggaaagtcttcatttctccttcatgtttgaaggatattttcacagatatactattcttgggtaaaagttattttccttcagcactttaaatatgtcatgccactctctcctagtctgtaaggtttccaccgaaaagtctgctgccagacttttgccttttgtctcctctgactgcatattttcaaatagcctgtcttcaggctcactaattctttcttctgcttgatcaattctgctattaagagactctaatgcattcctcagtatgtcacttgcattttttattctagaatttctgcttgattggtgcttcattgtaagtggcttcttttctgcttttagggtcctttctttatccgtgatctttggcagtttgattattaaatgccttgaggtagccttctttgggttaaatctgctcagcgttctacaaccttcttgtacttgaatattgatatctttcccttggtttgggaagttctctgatattaccattttgaataaactttctacccctatttctttctctactgcctctttaaggccaataacacttagacttgcccttctgaggttatttcctagtaggtgtgccgcattcttttttattcttttttcttttgcgtcttctgactgtgtattcttgaatagtctgtcttcaagctgactaattctttcttctcaagcaattcaggagaatcgcttgagcccaggagttcaagaccagcctgggcaacacagcaagaccctgtcccaaaaagaaataaaaaataaaaagtagtatgaaaagccttagaaatctgcctggtgttctattctattgtgattacgctggtattcaaaccataagacaaagttcttcccactctttcctcctttttccacaggcaggaaagcctctccctatggccaccactaccaccagtcccaagggagttctgccacaccaccacccatgttcacttaaggcccaagggctcttcaagccagcttttaatgaatgctgccaggcctgggactcacccttcagggcagaggtctcccctctggcccagggcaagttcaagaatgcctaggcctggacttgggaccccaaaagcctacttggtgtctaccccactgtggccaagctggtacctgaagccagcacatctgagtctcacccaaggcccacagcataccacctgtgtattgctgttatttactcaaggcccaagagctctttagtcagcaggtgatgaatcctgccaggactgggtccttcccttcaagacagcagtttctcttctgacccagggtgtgtctagaaatgttgtccaggaactagagcctgaactgggggcctcaaaactctgcccagtgccctattctgctgtggttgagctggtatccaagatgcaggacaaagttctcttcactctcctctcctcaagcagaaggaagaagtcactttcattgttctgagctgcgctgcttgaggctgtgggaggggtggcacaaatactccccaagccaccctgtctgctgtctcactaggtcacgcactgccccggtccactggctctgagaccagcacagcatcaggacttgcctaagaattgcagtccttatatcctaggctgccttccaagttcacttagtatcccacagcttgctgagaaactcaagtttctaccacgggaatgggtgcttcccctctggctagggctggtctaaatgttccctctgtgggcaggtgctggctgagttcagcacagttttgctttccactgtcacagggcagcactaagttcagtgcaaattcccccagttgctgtggtctcccttccccaagtgcacagattctctctctgcaccacacagctgctttgtggtggggaggactggggaggggtggtgtcagcaatccatgactgtttttcctaccctctttagtgcctctttctgcaatatgaattttaaagtaggtactgtgatcactcacttgatttttggttcttatgaaggtgcttttttgtgtgcagatagctgttaaaatgtggtgttcctgcaggggggtgagagggatgatcagtggagccttctattcatcagccatcttgctccatcctcagtaaacattttaaaagctaaaatgccctgactttattccccttcacaaatcccattccccagaggaaagtaaccactcttacggggctgatgtacatccttccaggtgttttcttaactcacaaaggtattcatacgtgggttctttctcttactttttttcatacttacctatctatcctcatctcctgctctcccctctctctgtttcagtgatcaaggcctccctgctgtttattgcacataccaggctggcccttcccttagggcatgtacaattatgagtctttccccccatctgcctggctccctcacctctttcatatctttattcaaatgtcactttctcattgaggcctaccttgcccactgggttgaattgcagcttgccatctagtgctggcacatccaacttcctcaccatgctttatttattttcatagtctttattattttctaatatattatattcttcatttaacatgattttggttttttttctgaaaaccccaattacattgtaaactccatgatggcagaaattttcatgttttcagagtattttgtccactgaggtgtcctaagtgcctggaacaatgcctgacatttagtaggtgcttgataaatatctgctgaaagaattaacaaatacagtggtggtttgttttcatgttttaattttattaataatgttttgttttaaaacctactgataatttctttggggaatcctttcattattctgaagcttcaaaagttgtgtcttatcctgagaaaataaggatagccacaatcatggcaaaaactcacttcactgagcatttactatgtgccaggcatggtgctaaattcttgtacttgcattacctcattgaatcctcacagcaaccctctgagatgatctattattatgcccagtctacagataagtaattgaaacttagattaagtaatgacccaaagtcacatagttacatagtcacaaagctaacaagtgtgggagatggaatttggatccagaaataaacataaacacctaaattatactagggagcaatgactaacttaaaaactgttttttaagagtccagacagagaggcagagaaaagatgataagatggctactgatttcacagctgcatgggaacagcaggtaggcaccaatttaggccccactctgatgaggtgggggataggggtagcactcagggctgtgtacacagccttctgtgtgagagtgactatctgagttgcatgcagtgccttgcgttagcagactcaagtttccatgggaacatactataagacaagctaccctggccaccatcctgagtgaaaatgacagtgtttttggagacattgccataaattcttatggaagacacaactaccatcagtgggcaatgccattctagaataaggatgctcatggagtcaggtttaaataccaaatttgctcttatgagttgagtgactctaggcaggtttttacattctctgggcttcgtctgtgaagtgatgcaataacacatacatcacaaagtgatattcacatcaatggcatacagtacatggtaactgcattatcacagctattggtacatagcatgatagtggctttctcatagctattgacgataataaattatggtgaaattcaacaaaaatgttaagagcaattaatctggtccagtgatgctcaactttaacatgcatacaaactacctgaagagcatgttaaaactatttcctggatctcatatttagagatttgattcagtaggttgagatgggctcatgaatatgcatttctgtctagcttatgggtgacgccgatccctctcattttatggataaaatcttgaaaaataaacacttaccccaagttgcacagcaagctattgtcaaggccttgataacaatgccggtttcctggctccatgtccagagccctttttgctgtatgccactgcttcctaattctaattctggccttgagaatctcagtttagtaaacaaactttaaaatattattcttaccttaccaaattcactgttgtaaataaaatgaatatgaaaggtatagtgtgaaattcatagtggctgagttctccacatccaatcacaatgccaaagaaagcatatattaaatgttcatatacagatgaaaaaattcttaagaacctaggatgaatgaaatagaaatgacattttaagcaatcatcttaaaaatatattttccttttcatataaaatcatatatcttatatctaccatgctgtcttagcagaggcccttgccttcatctctgttatagtcaacatttaaaagaattttgttggatctaaaagcacccagttccatatttttcattaccttcatcacaccaatacccatgggctgcttctcacagtagaataataagagcaaagcagaaaaatgaggacctcccccagctgatgatttatcaatttctctgggattcagtgggagcatgtcaactcttgggcctgctactgctaaacccggagttgtagttgctactagtaggtacctcggtaactttgactttgcaatagctaatacgatcatctcaatgctctctgcacaacctctccctctgtgactcacatgtactcttctatttactttgaaagtctctcctgtctgctttcctgtctactgaattcctaaaagtcttgtaaggctaactctaatcccatgttgtccatgaaagcatcttaagcaccctaggtggaggtggtcctgctctgaattcctacggtgctgactgtctgcactaatgtagtttttaagcagaagaaagcattagaatcacccagactgaattctaaaaatggacagaaccacccccagagattcttgctgagtagaccagagcatgtgggttagggcagggggctgaggcctcagtagagtacatgttctgttctgtatggttccatgtggtagcacgcctgggtcagacccaagtgtgacttccacaagcagatctcaaggcctgcctcctctagactctctctcttgagactttccctttcagctgactgggtaagtgcatctgccccacaaaccattctccttacaggtggatctcaaaatttatgctcggaaagaagcataaggaagcctcgttttagctgcagacataaatcatgttcttcgatacacacagcattaccccaatcaaggagacagtttggttctccaagtgatttctatctcttaattcaattggttctgaacccctactggggaagagtttgagtgaggggacctcaaaccccagtgcatagttttcaaaaaattcagaagtcatggaataactgactgagttaagtacttttttttttttttttttttttgagacagagtcttgctctgtcacccaggctggagtgcaagtggtgcgatctcggctcactgcaagctccacctcccaggttcacgccattctcctgcctcagactcctgagtagctgggactacaggcacccgccaccacgcccggctaattttttgtatttttagtagagacagggtttcaccatgttagccaggatggtcttgatctcctgacctcgtgattcgcccgtcttggcctcccaaagtgctgggattacaggcatgagccaccgcacccggcctgagttaaatacttttaaaaaaatgtcatgtgggcacaatggctcatgcatgtaatcacaacattttgggaggctgaggaggatagattgcttgagcccaggagtttgagaccagactgggaaacacggtgaaaccccatctctacaaaaaatacgaaaaattagccaggtatcctggtgcatgcctgtagtcccagctacttgagaggctgaggtgggaggatcgcttgagccctggaggtggaggccatagtgagctttgatagtgccattgcccctcagcctggaaggcaaagcaagatcctgtctcaaaagaaattttttttcaattctctctacaggacctaaaaaatgcattatgtatacagtagaacctgaataaatatgtaattattcacacatattgttactttcttatataaacatgtctgccacttaacaaggagcacttctgagaagggacttattttcgtggccccagacctaagatgcaacatccagaccacaccagacattaagaaaggattggtcgaatgggtgaaaaaataaacaattgagtgaatagaaagtaatttataattatgtcaacagacagcaccactgagctcaggaaacggtctaaattgagcattacaccaagtagatgttctatgaactggttattcccaagcttctggatttaaaaacacagtaatgtttcattcacatacgcacaaaactggaatagttttaggtgcccatgttttttgttgttgttgttgtttgtttgtttgtttttgttttttgagacagagtctcgctctgtcactcaggctggagtgcagtggtgcgaactcggctcactgcaagctccgcctcccgggttcacgccattctcctgcctcagcctcccaagtagctgggactacaggagcctgccaccacgcccggctaattttttctgtatttttagtagagatgtggcttcaccatgctagccaggatggtctcgatctcctgacctcgtgatccgcctgcctcggcctcccaaagtgctgggattacaggcgtgagccaccgtgcccggccgcccatgttttttcattttgccgagtagaaaagaaaataccatcttctatcattggaatgtcataaaagaaaggacattataaacaacaaaaaagtagaacggacataatttcatagtaatgcatagtccttatattaaataaattaattttcatgggaaaactcaggattacggcttatttttctcagttcgacatttgttttcatctgatgtgggaatttctacattagacgatgatttggtattcgataattctgaaccaattctctaatttatcatagtctttcagagaaaggctaacttatttctctgcacagacaggcaaatgattttccccctatccagagatattcatatggcatttattaccaggagtaaagggtaggtaagagttttattgatgttacatgttacatctttctgctactcgtcttttccagctcttcccacattaatatactgttatttaggtatattatgaaggaaacaaagaaaaaatgtatctttaaatctccatggttcaaagtaaatttttgtcaggttacatataaaaaacaccatggtttctgagccactgatactttattcataacaggagtatcaattaatgctgataattgttggcaccttaaattcttttcaaatataactgatagcaaaaataaaattttcaagataaagaaaggttatggaaaaagagttttactagtgtccatgaaggcgagacgccttatgcactaaactgctatgagatccatcgaagggcacgataggaaacttacttagtaattacaagttcgatcttcggtttaaaagttaaagaatctaaattcagtcctacagcggctaaggcaagagtgcctgacattcctaaaaattccactggggagaaaaaaaaaacaaatgaatcaaatgcaatgtattcatatctgcacactgagacactttatcttgaataaagaattggtgggaatcttaagagaagtagtagttcttagaaggttgcttcaagggattgacctaatccagtaaacctggggctggcaaactttttctataaagggccacatagtaaatatttagtgtttgtgatgcatacagcctctgttacaatggttcaactcagctgttgtagtataaaagcagccatagataatatgtaaatggatgtgtccagtaaaacttggtttatagacactgaagtctgaatttcacataattttcatatgccacaaaatattcttcttttgtgccattttaaaatgtaaaaaccatttttagctaacaggcagatttggcccaagagtcgcagtttgccaagtcctgctggagaccatcactgaggatagggctaatggaaaataagttcaacagccctcaaggtgtcctttaagcatctcagaaatactgcactgcatgtgctgagagttgtgagccaagctcagtgcttctgatgactccagttccttacacctgcttttcttttgcagctatagacctccctaattaaacttgtaatttgttgggctctaaacaaatgtgtaaatgtattaatagtctgaggcaggaaaaccaacctgaaggatatttgaataccataaatactctgcagtcttaggctgcagagtcttcaaatagcacattaaaaccgtcagacagaaaggaagacaaagaacatgaaagataggattggaagagctttgggggaaagcagagctggttgcttttggaatgtgacctcaccttcctccattagtggccccgtaactataaaataggtgtaaaatagttatgactcatacagttgtgaaaattaaattagaaaacatgaaaatgcttgccacacttttaaagcaatgaataagtgataatactatcatgctgttaattgtttttatctactttgttgcttagtaaattaatagtttattaatttaaagaggagtttactattcttttggtttatctaatcccttaagttcactttagacttctttttatctacttatttaactgaatttactttaaataaccaatgacaataaaaccaggagtgccgcaaactgtgatgacagggaaactatctttcaatttccaattctctataattggtattttataaagaagggacagtggaagtgataagccccagttacaggcaacaaggggatgcattgtttgtagacttttaaaacaattataaagatgacaaaaactccttctactttttattatctccattcccccaaaattctaaacactgtcacttgataaaatatccctccttgctaggatggaggagtccctcttggaatgcctgtagcctacacttttctagaacccatgttctttcatgaattatacatcaacactcaaagaggtgactctccaacctcaatcagatgctttttggacttaagccaattgatggtatgttcattagtcagggaaaagaacaaaattaaacaacatgaaagaaatgtaatattaaagaatgtataagtgagaattttatctgcattttcgctttccggctatggaacatctccttataacactgcctttttctgagtttgctttcaggaacttactaagtatgagtaaaggactgcctgaggttgttttttaattcctgaagcagaggaaagtgtaacaaaggagggaggtgtattggtttcctgggactgccataattgaatagcacaaactggggggcttaaaccacagaaatgtattgtctcacagttctggagctagaagtctaagatcagcagggttagttccttctgagggctgtgatggagattctgtcccaggcctctctcctagcttctggtagtttcaggcattccttggcttatagctggtattctctctgtgtcttcacataatcttccctctatgtgtatctgtcgctgtgtccaaatttcccctttttataaggatacagtcatactggattaggacccaccctaatgactgcatcttaacttggtcatctacaaaggtcctctttctaaataaagtcacctttacaggtactggaatgtaggacttcaacgtcttttggggggacacaattcaacctaaaacaggaggctacctagcaagctttcattctgagcagcggcacagcgctgccttgaagctacaaagaattgttggttgaaatcagtatatatagcacacacaagtgctgactctgggatgtatttaagcctgaggggttaatgctaaattcctaccttctatcattcatccacactctgcagtaagtcttacctgaacaaatgcaaccaaaatacagatatttcctctctgctggtgacagctacaatctcaaaggcataatttctagagaaaatcatcattctgtttaaggctggttcttagagacctggtacctgctcaggaaagttgttaattttttagtaactttgtgagcaggttgctaacgaaagccatccttgaaatcagccacagtagatgtatttatcccatgaaaattgacaagcactgcaaatcggggctttttctcttcccagagagccaatttaccatcccatcactgcctaactcagtctccccattttacaggtgaaggaactgagggtaaagcttaaactagaaccaaggtcctggctcagttctctgcgatctccacctcctaaaatctaaatcacaagtgtctcaattgtttaaggaccttttactccacagctatgcgacttatactccttcacagaaatcagcttcaaagtcttatgatgccgtttagttagcacaaaataatcagacttcataatgctcaaatatatttttggtaaacatttgatttgaattgaattgggattgagctgaattgatcagctttttggctatatacctgaatgagcataaggaattcatactgcttaaccaaacaaccctattccaacttgaaaagttgtatgtcagaaatgggagacttctaatgtggcaataatgctaaaagactctagggaaccccatcctacctgcctgccctcaattcatacacatctggttaagatgatgccacacattgactggaagcatctccattttttagaaggaaaagggaataggaactcatatttattgactgccctaccttgagcccagtgatgtgctggtaaatgtttaaagccggctcttttctgcaattatacaggcagtaagggaaaaaagctttttaaaacccagttcaaggttggggcggtagagggaaccctgagttgcagtgttgcagtgtcttccaatttctatggtgtaaagactcactgtggccaatttcgagctctcaacataatgtcacttgaacagagtttgaaagacaggaggataatcagctctggcaagccagcaagagctatcagcacaccagcaggagtgagtcacatgacagattatctcattaatgcctgcaatacccttaatacattaggtgatataacacttttttttttttttgaggcagagtctcactctgttgcccaggctgaagtgcaatggcatgatcttggctcactgcaacctctgcctcccgggtacaagggattcttgtgacttagcctccccagtggctggaattacaggcgtgcgccagcacacctggctaattttttgaacttttagtagagacagggtttcactatattggccaggctggtctcaaactcctggcctcaagtgatccgcctgcctcagcctcccaaagtgctgggattacaggcgtgagccactgcacccagcctatcataccacttttaaagataaggaaagtgaaccgtagagaggttaagtaattttccagggtcaccaagctaataaattgcagagctgagatttgaactcaagtctgcctaactccaaagctcttcgaggactagtagcagtttattcaaccaacatgtgttaaattactatcaggcatatggcaagctccaaacatagaaaagagaacaaataaaaagatgactaagagcctccacctcaaggaactcacagtctagtagaaaaatagactaaattaaatttttttcttcaaacatttaaggcatctataaaaagcagcacaggagaggggaaaaatgaagaaatttgaaggaaatgagcgttcaatgaatgctttctataattttactgattcagggcagtgagaaaccctcaggtggcaattaatctgcagaagaagcagcgcttttaggtaactggaggtgaaagagaagtaattaacctcttgatacctgaggtctttgaagaaccgaagttgcttcactgtctgagatgagagcaaaagtggaatttgacagtttggccacagttactacgtctcttagggaccgggcacctcagtcaggccagtaaacacttaaatctccatttcattggactaaactagctgaaggtcagccagtgctgagcactcttactcctgtgattatttcactctcctgcttctctttcaacaataaatatacctctcccttcctgactcttagcctaagtaagagctgccatttctacagtcttctcaatttggcatccattgaattaaaggctgttgatctagaaaagcctcaggagcatctctcctagccttctcagtttgcagatggtttgttctgagggttagagcagaaatgagctcaatgttgattcctctgcctggggaatgccagtgactatatacaaagtcaaatgaagagtccaaaaagaacaagagagtaaccacagagaacagtgcaaggaaattggacatggagttgaaataaaaaggatattaagaaagaccaggaaagagctagaggtaagtaaaataatatgacaggacacacagtggggccacaaaaaggaggagaagcaactggattcaagatcaggaaaaaataaacatgtataaaacttactttaaggacagtaatttttgtatttatttcagccttaccaatatagaaagtcatgtacaccattgaaaagcagagaatgatattagtcagcatattgctaaaaacgtcagccaatatacactgaatgatttttgcacaccaatatccaaatattatgcttcccaaaatgtcatagctgagttcaatgcctacatgtaaatctaaaaaaaagaaagaaaaaataagaaataaaaacttgagctataacttttgtctctttcactgatggcatttgggtctttgcactttggtttgcttgtgagattttgagtggacaccttatttgtcagcaaataggagtgtcttgtgaaagtctggtaaaaaaacctctctcagaataaccttcccttacagtccgcagcttaaggtttgcttatctagggatagaagattcaaatgtcctcaggagaaaggcaaggagaataaatgggaaaaacttgtgacaaatgggtttagagtgaatgtctaaacaaaaaaaatctaaattaaaaatttttagataaactatgtcaagaccaagctaactaggcccagggtcactgctaacctgcagttagtttatgacccctgcccccagcccaggagacattggaaaatgaagataagaaattttcattagtcacaataactgggggcactagtggcagtcagtgggtagctatcagggtagtcctaaatgacaaaaattgtcccaccccaatgcccggtagctccctcattgagaagcactgcaaacccctctttattcattaatatttatttctccttttagtatcttcctcctcttgtgactatcacaaaagtatatcagaaaaacacattttctccattcatactgtgattttttccccttttcatttctactagtaacacatctggaaacctagcaaggcaacagcttcatatcccagtgggctttagctgcaggaatctggctcttgtcacttctaggactggattctccagtcctgcatacaatgttctgctttcactctgagacccaaatccagaaccaagccaattcttagcactcagtcactgagatccagattgatccagtaaagaagtaattctgagcgagctgacactatatgtgtctattgtgacactatatgtgtgcacacatgcatttatgcatattgagaaaaactaaagcactttttaaatgttctttcccccttaatgtccaagaacacacatgcagtcctccttcgggtatccatggggcattggttccaggaacccctttggataccaaaatctgcagattctcaaaaccttggatataaaatagcatattatttgcatataacctacagcacatacttctgtgtactttaaatcatctctagattacttctaatacttaatacaatgcaaatactctatgtaaatagctatactgtattgcattttaatttgcatttttattgttgtattgttatttttattgagtttttctgaatatttttgatctgcagttggttgaatccgtggatgcagatggtcaactatgatttttttcttgttacttcatatatcattgtaatcagcccaaaagtaaagtatagagaaggcagcaaagttaaaacatttgaatgtattttaattttaatgagaatgattttagaaaatatacagacaaaaaatgctcctacctctaaaaatagaaaagtggattctgttgccccgaaaatttccaaaaaaaattgatgcgatgctacaaatgatcaatgattctcctctaatgagatcaatgtatattttagaaatgcctgaaaaaggaaatacaaaatgtaactcaatatgctacatgaaaataatgttcttgcacaggaagcagaaacagaagagaaagaacagaaaaagaaaaaagagaaagaacaaggcaactatgactgggatgggtctgtaagacaatcacaatcaccatttttaaatttctatattgtgcctcctgcatttgcaatggcaaagaaacatggcgatagcactgcttgtattgttcattgtctcaaccatacttgagtttcagaatgagacaaatacttctcaagataccacatttagtttgaataaacctgaatcagattccaaaataacctcattttagaaataagtacaaaataggacccagcaattctactcctaggtatatacccaaggtaattgaaaatgtatgtccacacaaagatttgtacgtaaacattcataatagtattattcataggagctaaaaggtggaaacaactcaatgtctatcagctgataaatgaataaatatatgtgatatatccctaaaatgaagtattattcctccacaaaaatgaatgaagtacttactgatactattaaaacctgaaccttgaaaacattatactaagtgaaagaagccagacacaaaagccacatattgtatgatttgatttacatgaaatgtccgtgatagacagatacatagaaaccaaaaatagattggttgtgatttccagaggcttgagtagataaaattccacagccaaatttccatctaacatcattttctttctgcctagaagacttttaacaattttgtagtgcaggcctgctgatgataaattctttcagtttttgtatgtttaagaaagtcttcattttaccttctctttcaaaagatattttcactgagtgtagaattctaagtctgttgtcattatttttgttcctctaaatacaatgtgacttttgtctctggctgcttttaaaattttctctttataattggttttaaggaatttgctttttatgtgcttttgtgtagtcttctttatatttcttgggttgcagtttattgaacttgttgaatctgtagctttcattattatcaaatttagaaactttttctcaggatttcttcaaattttttgttcctccctctcttttctttcggggactcatacattaggtcatttgaagttgtccacagctcacactgatgctcagttcatgttttctcgtcctcttctctctgtgtttcattttagacagtttctattgctacatcttcaagctctctccaccttctcttttggcttaatgtggacctaatttatattagtccacaatgaattatattcattgtaaaatttggaaaagaaaagaataaaacaaatcttctataattctatgatgacccagatataaccattttaaagttgaagtccttttctaagcatatggttctttttactcaattgagatcatactaacactctatattttatttctttacaagatcctcttccagatttgctttaaaataaaagttatttaagcgcttacactcttttaaaacaggtaatggatagacaatttccttttaacttacatatgaacgtctactacacttttgactgggccagtccactttagatttaggttgtacaggtttacaatgcagatgggcacctcatcaaaagaaacactattaacattatagaaattgtagttctgtatattataattttaggcatttggcaaaaaatagtttttgcttaaaaaaataatgtattatgactattttatttaatagtttcttttatttaagaaaactgttttgaagaaagaaccatttatctaattcacacaaagggacaatatgatggcccagccaacacccaaaacaagtgagagtgactttccccataaaaataagtcaaatttgtcttatcaggagacaatgctactggatccagaatctatctaacctcctgagtgttattgacataaaaaaatataaaaattaagagccaacccaataccttcactagtttcgtcttaaagcaatagaagactttcagccgggtgcagtggctcatgcctgtaatcccagcactttgggaggccaaggtgggtggatcatctgaggtcaggagttcgagatcagcctggccaacatggcaaaaccccctctctactaaaaaatacaaaaattatccaggcgtagcagcacatggctgtaatcccagctactcgggaggctgaggcaggagaatcgcttaaacccagggggtggaggttgccatgagccaagatcatgccattgcactccagcctggggtatagagcgaaactccgtctcaaaaaataaaaaaataaaaaaaaagaagactttctactgtactcctttttttgaaaaaaaattgaatgttgaaactgcaataaataacatttatagtttattataaccatttacagtcaagagagtgcagaaaggagagcaggaagcaaaatgaggtaatgaaacaagaggtaaatacaaatggttgaaagaataagacaggtaaggaaagacagaaaaaaattgtacttaagggagcaaagagaaaaaagagaacaggatcagagtctttgagaaatgtatctaccttgtaacaatttagaacagaacctccaaaagtgcctaaaactctatgttttcccagctaggagtatgaaaataagaatatcacaagctggaaaggttggaggtttttcactccactcataaggtagtatatttccactaaatacaattgatactttaaaattggttaggaaaatatttccgagtcaaaaacagaaaccatagcatctagccattcatgttgatactgctgtgttaataaaacctgaccgtttgacccagcaatcccattactgggtatatacccaaaggaatataaatcattctactataaagacacatacacatgtatgtttattacagcactatttacaatagcaaagacatggaaccaacccaaatgcccatccatgatagactggataaagaaaatgtggtacataaacaccatggaacactatgcagccataaaaaggaatgagatcatgtcctttgcagggacatggctgaagcttgaagccatcattctcagcaaactaacacaggaacagaaaaccaaacaccacatgttctcactcataagtgggagttgaacaatgagaacatatggacacagggagggaagcaacacacaccggggcctgttggggggtggaggtgaggggagtgagcttagagtacaggtcaataggtgcagcaaactaccatggcacacatatacctatgtaacaaatctgcacattctgcacgtgtatcccatttttgttgttgttgttgttgttgtttttagaaggaacaaagaaaaaaaaaacctgacaatagggggatatttcagagtgaaatcatcttccaccttaccaaataatatgggaaatagtgcaggactccaaatcctcttgggaataagcttttattgagtaatacatttgagtgccaaactatatccttaccccttttcttgaagataaactataaacccctccaccacctgccaaaccttagctattccaaatggaggcagttctaacaagaggtagcaaggccttggaatagtctctttagggatctttaatgtttccccttattggtaaacaaactcaccaacttagaatatctaccttgtggctaagaattcactggaacagaataataatgccaatttttatcaccttctagaaggttactttttctttgaaaaaaaatgaaaaacttccttggagattataattggcactacttatctcatctccttggtggctgtcttatttgcactgtctccttaaagtcaatcagtgctctacctctcaaggtgaaaaaaaaagcacagagtcttattcttctgggtgcacaattcatgcaagaaaaatataatcaaaagaaaataatgtacccttatattttcaagataagagagagaaataaatgtgacataccaatagtttttagtgaattcacagaacgaagaggatctataatgccaagggtgatgctaaagagtaggcaagattgcaaatcccatgaatctttattgaattttataacgacatatccaattatgatgcttgctgtagaaaagctaattaatccagttaacaagacctgtgaaccaattcataacacagtattagacttaacatctaaagatggcatgatggcatttacttatatcctaagagtcagatcttggttgtaaatgttatacaattaccctggaagataactttaaaaggtattctagtttaaccacctgccacaaagaaaccgcccctttcaaataagcaagattctaccttattattaaaaagactgactcaactatctttcttgttgttattctagttcaatggttctcaatatgaaaggttcttaaacagaatgcaaatttctcctgcttctatataaaacatatcctgattagtttggaaagtaaattgttagtgacgtattgtgtctggtacatgacacaaatttatataccaagactctaaaatagtcacagaaaatgcccccctttaccttttattagttgtaaaataagtagttctgcaatagagaaagggaaggccatgaaatgcttgagattaagtgatttacagagttttgtaatttctatgcacacattgtttatgcccaagtataagaaagtatttatttttcaaagtcatcctcaggaaaaaaaatagttgtgttattcaatccttttcttattttccatctctgtcttttgttttactttctgtgaggttttcacaatttgaccattaggtccttttatttctttatctattgtaacgtcatatggtttttcttcttaaatctcataagagcatgaattacattaagcaattttttaaatgttaaattaaccttgttctgaaataaacacaacttgatcatgtttttattatttatatgttactagatatatttgtgccaaaatttgtgtggaattgttctatgtttgtgggtgacattgacttatgatttttctttctcttaatattcctgtatagttttggtgttaagattaaacaaggcttataaaataagtaagggaggaggccaggtgcagtggctcatgcccataatcccagcactttaggaggcaaggcaggaggatatcttgagttcagtagtgtaagaccagcctgggaaacatagtgagactcccacctctacaaaaaaaaaaattaaaaattagctgagcatggtggtgcacacctgtagtaccagctactcaggaaactgaggtgggaggattgcttaagcacaggagtttgaggttgcaatgaaccatgatattaccactgcactccaacctggccaacagagaaagaccctgtctctaaaaataaaataagtgcgggaggatttcctcttttactcttgtctgtaagacataagattggagttatctttcatactggttcacataacttacatttaaaatagtttgggtctcattttttttggaacatttttatttgccaattcaatttttaatgattatgggactatttgggtctttttaaattctagagtaggccagccacggtggctcatgcctgtaatcccaacactttggaagattgaggcaggaggatcgcttgaggccagaagcctagaaagcagcctggacaagagagcgagaccttgcctttactaaaaataagaaaaaattagccaggcatggtggcatgtgcctgtagccccagctattccagaagctgagatgggaggatcacttgagcccaggaggtcgaggctggagtaaggggtaatcatgccactgtactctatcctgggtgacagagctagactctgtctcaaaaaaaaatagatatataaataaataaaaagaatttctagtgtaagttttggcaaattacatatttttaggaatttcccattttgtccgaatttttaaatatttttgctgaatcacaaagaaaataaggcatcaaaagtagagggatgcaatcaaagcagtgtttaaagggaaacttataacattaaatgcatatattggaaaagaataaaggttaaaaatgtttatgattcaattaagcctagcagtaggttacatattgttaaagtagtaaatgggaagctaaatttgaggaaattacatacaatacagcactgaaagataaaagacagagaatttaaaatcatggagaatatgatggaaaatctacaactaatgggaatttaagaatgaaataacaaggcctggcaccgtggctcactcctacaatcccagcactctggggggcccaggcgagcagatcttctgaggttaggagttccagaccagcctggccaacatggtgaaaccccgtctctactaaaaatgcaaaaattagccaggtgtggtggcggatgcctgtaatcctagctgctcaggaggctgaggcaggagaattgcttgaacccaggaagcggaggtcacagtgagctgagattgtgccatggcactccagcctgggcaacagagtgagactccatctcaaaaaaaaaaaaaaaagaaataacagagtatagaaaatatttaaaagataatagccgaaattgtggctagaactgatgaactatattaattctcagatttagtaaccataagaagtcttaatatgtataaataaaaagatactaacacccagaaacatcacagtgaaactaaaatagtcctcctttatctgcaagggatatgctccaagaccccagtggatgcctaaaaccacggatagtacccaaccctatatatactatggttttttaaaatacatatatatctatgataatgtttaatttataaattaggcacagtaaaagattaacaacaataactaataataaaatagaacaagtgtaaccatatgacagcatcactactcttgcactttggagctattataaagtaaaataagggttatatgaacacaagcactgtgatactgtatgttctatctgataacagagatggccactaagtgactaacgggcaggagataatgtatacacagtgggtatgctggccaaagggatgattcacttcctgggcaagacagagtaaaatggcacaagattttatcacactactcagaaaggcacacaatttaaaactcatgaatttttctggaatttttcatttaatattttcttttaaaaaaatacttttattttaggttctggggtacatgtgtagggttgttatacaggtaaacttgtgtcatgggggtttgttgtgcagattttttcatcacccaggtactaagcctagtatacaatagttattttttctgaaccctcaagtaggccccagtgtctgttgttcccctctttgtgtccatgagttctcaccatttagcttccacttgtaagtgagagcatgcagtatttggttttctgttactgccttagtttggtaaggataatagcctccagctccatccatgttcccgcaaaagacatgatctcattcttttttatggctgcacagtattccatggcaaatatgtacattttctttatacaatctggcattgatgggcgttaagttgattccatatctttgctattgtgactagtgctgcaatgaatattcatgtgcatgtatcttcacggcagaatgatttatagtcctttgggtatatatcccgtaatgggattgctgggttgaatggtagttctatttttagctctttgaggaattgccacactgctttccacagtggttgaactaatttacactcccaccaagattgtataagtattcccttttctctggaacctcgacagtatctattattttttgactttttaataacagccattctgactggtgtgagatagtatctcattgtggttttgatttgcatatctctattatcagtgatgttgagctttttttcatatgctcgttggctgcaagtatgtcttcttttgaagggtgtctgtttttatcctttgcccactttttaatggagttgttttcttgtaaatttgtctaaattccttatagatgctagatattagacctttgtcacatgcatagtttgcaaatattttatcctattctataggctgtttcctctgttgataatttcttttgctgtgcataagcccttaagtttaattaaatcctatttgttaatttttgcttttgttgcagttgcctttggcatctttcattatgaaatatttgcttgttcctatgtccagaatggtatttcctagcttatcttccatggtttttatagttttaggttttatgtttaaatctttaatccatcttgagttgatttttgtatatgatgtaagaaaggggtccaatttcaaccttctgcatatagctagccagctatccaagcacaattcattgactagggagtcctttacccattgtttgtttttatcagctttgttgaagatcagacggttttaggtgtgcagccttatttttgggctctgtattctgttccattggtctatgtgtctgtttttgtaccatgctgttttgattactgtagtcctgtagtacagtttgaagttggataatgtgatgcctccagctttgttctttttgcttaggattgctttagctatttggggtcttttttggttccacatgaattttaaaataatttttttctagttctgtgaagaacatcttcggcagtttgatagaaatagcactgaattggtaaattgctttgggtagccattttaatgatactgattctttctatccatgagcatggaatgtttttccatttgtttgtgtcttctctgattacttttagcagtgttttgtagttctcattgtagagatctttcacctccctggtaagctgtattctagatattttagtcttttatgtcaatcgtgaatgagattgcattcctaatttggctctcagcttggctgtttttggtgtattgcaatgctaatgatttcatacattgatttcctatcctgcaactttgctgaagttatttatcagctgaaggagatttggggctgagattatggggttttctagatatagaataatgttgtctgcaaagagggatagtttgacttcctctcttcctatttggatgcctcatctacaaaggaaacgccatcaggctaacagtggacctctcagcacaaaccctacaagacagtggagatcaggagcctgtgttcaacattcttaaagaaaaaaatcttcaaccaagaatttcctacccagccaaactaaacttcctaagcaaaggaaaaataagatccttttcagataagcaaatgctgagggagttcattaccaccagacccaccttacaagagatcttgaatgaagcactaaatatggaaaggaaagactgtcaccagcatatacaaaaacacactgaagtacacagatcagtgatactataaagcaacctcacaaacaagtcagcataataaacagctaacaacacaatgacaggatcaaatccacacatatcaataataaccttggcctggcgcggtggcttatgcctgtaatcccagcacttagggaggccgaggcaagtggatcatgaggtcaggagtttgagaccagcctggccaacatggtaaaaccccatctctactaaaaatacaaaaattagccaggtgtggtggtgtgctcctgtaatcccagctactaaggaggctgaggcaggagaatcacttgaacctgggaagtggagatttcagtgagacgagattgtgccactgcactctagcctgggcagtagagtgagactctgtctcaaaataataataacattcaatgtaaatggactaaatgccctatttaaaaggcacagagtgacaagctagattaaaaagcaagacccaatggtatgatgtcttcaagaaacctatctcacatggaatgacacccatagactcaaaataaaggagtggaggaaaatctaccaagcaaatggaaatcagaaaaatgcaggggctgttaccctaattttagacaaaacagactttaagccaacaaagatcaaaaaagacaaagaagggcattacataatggtaaagggttcaattcaacaagaagacctaactatcctaaatatatatgtacccaacacaggagcacctagattcataaagcaagttcttagagacctacatttaatattttcaaaccatagttgaccacaagtaactgaaaccttggataactgaaactgtggaaagtgaaatggtggataaaaggtaactactgtacagaacaccaaagaaaaagagacaatctgaaaagagagaaaagacaggtacttacagaagaatgacaattagattgatagcagttgtctcaaaagcaacaattaggctcaggtattattcaaattgagacaaaacagatacattttcagagaaacaaagaccactaaatgaaaaaagatgactactcatagacctttaatgaaaaggacacaaaatcacagctagataggagtaagttctagtgttctataacactgcaggatgactatagttaacagcaatatactatatagtttcacatagctagaaggaagacattgaatgttccctacatgaagaaataatgtttcagaagataaatatgctaattaccctgatctgatcattatacattatatatattgaaagatcactatgtattccataactatgtacaattattagtcaatttaaaattacaatttttaaaaagctgctagagcaaaaattcaggagaaaggaagctgaatccagaaagatggagttggatgcaagaaggagcagtgagcaaagaaatggaaattgataagcatgtagatgagtgtagagaagcactggtacctaaaacattacaatcacaataataatgataatgactaatttcagggatggtagtattatgtcaataatgtaataaaatataagatgagaaaggataattaaagcattctgaagttcctgccttatttggaggaaagtagagatatttagctttagacttgttaaatcaaatataattattaaaatttaagatttttaaaacgtatgaaaccagtaagaattgtatttaggaatatagaaattttgactgcatttaacagaaaagagcacttacagtgtcaataaatggagattttggttgttttgttttttgtttttgtttttgagacagagtctcgctctgttgcccaggctggagtgcaatggcacaatctttgctcactgcaacctctgtctcccaggttcaagtgatgctgctgcctcagcctcctgagtagctgggattacaggtgcatgccaccatgcctggctaattttttgtatttttagtagaaatggggtttctactaaacctgacctcgtaatctgcctgccttggcctcccaaagtgctgagattacaggcatgagccactgtacctcaagtaatcctaaatccagaataaactgccttatgttagtatgtcggctctcaatgctcttaaggacccaggctctttttttctctttatgttcaatcatatgtagtgcctgttctcatgttcaccacttcacaatctcaagatggatattcattctagcccactggagggctccaggcagaaagagaggtaaagcaaagagcaaaaagcacatgccagctgatttgacccccttattaagggctttctagaagcctattcagcaaacttttgtacactttttattggccaaactatcttcttagggtaccaaagttgttagggatgcttggaaatatgatattttacataagcctattgccataccaaacgaaaaattttaactttctgtaagtgagaaagagagggagactgcatattggataagcaaccagaaatgcctgccaccaaaaaatagaacataaaatttttaaattagtagaaggaacaaaggggataaagaaaactgaattcaattaattcagaaaaggaagaatgagaaaaagcatgtaaataaaatgatgaaataatatgtgagaaaaagtcaaaatatatttcttttaaaaactttattttcaatttataaacagtaaaatctactcttttggtgtacagttatatgagttttgataaatgcatacagttatgtaatcacaccacaactaagaaacaaaacagatacatcactcccaaaaatttcctcatgctatatctttgtggtcaattcttttccccaacaccattccctagcaaccaatgatgttctccagacctacagttttgccatttttagaaggtctatgaatgtaattttataatttgtatgtaccccttggaggctggcttatttctcttagcacaatgcattttaaattcttccttgttgtgcctatcgatactccattccttttttattgctgagtaatatttcattgaaagatgttccacgatttgtttattcattcaccaatggaagaatgtttgtttccagacatttgagattataaataaagctgctatacagattcatataaaggttttgtaaacataagttttcatgtctcttgggtaaatacacaggagtgagattggtgagtcatgtggcaagtatatatttaactttataagaaactcccaaactgtttcccaaagtggttgtaccattttgcattctcaccaacaatgtatgcaagtttcattgtcttcatatcttcaccagcacttggcattaacaggtttgttgttgctattccaataggtacacagtggtatctcattgtggttttagtgtgtatttctctaatgacttaggatgttgagcgtctttccaagtgcttttattccatccatatatcttccttggtgtcccaaatctgttcaaatcttttctcttctaaatctatttttaattacaataaatactaatggactaaactagtttttaaaaagaagcagaaattatcaacctgtataaaataaaaaaaatccaactgtatactattaaaaagataccaaaatgttgaaaacaaaaggatggaaaaattatagcaggcaaataccaaaataaagctgatgtaactatagtcaattttacacataaaattgatttaaggcaaaaagcattatttgggataaaaggtaactaaataataagaaaaaaattaactgagaaaaatagcaatacttgtagacacttaataacaacctctatttgtataaagtaaaaactgacataattgcaaggagaaattcataaatccacagtgatagtggaaacttgttaaactgaactgaaaaataatattgggaaaaacatagaagattgaacttcataataaaacaatctactgaacaaatttagacccctacactcaataattagagaacatatatttttatagcacaacatttaaaaaaaaacatgtacaagcctacaaagcaaatcttcacaaatcaaagaattgacatataaaacatgttctctgatcacagtgtgataagagaaataataataaaacatcatatttggaaaattcaaaacaatttgtaaataactaatgggtcaaaaagtataagaaaatgtagaactggatggtgatgagtacactaaaaaccaaaacatgtgggataccactaaaaagaaaatttaaaaccttaaatgcacacagaaaactaaaaaaagctaaaaatgaatcaaatattaattcaagatgttagaaagaacagaataaaaccaaaataaaatgttctctgaaaaaagaaataaaacagtacaacaggcatgattaagaaaaaaacatagaaggcacaagtaacaatctttgcagggaaaatgggcaaatctacagaaacagttgagattaagtcagatgtgggactagaatccagattctgacatttattatccttgtttgtgacctctaagcttcagtttgctcatatgcaaaatggaaatgttatttactctgatatttgcactgagaatgcctagtcacaatggtcactcagcaaatactaattcctttcctctcccttcaattctttttagttagtagttctatagaatgaagagggcaaaacaaataaaatatgacattttgtgaattattaatcatctatataggcagccatattctctatcaacgtgcataagcaagaattgatcgtactttgttttaaatgtgttcttacctgccaaaacattttcttgagtgtataaaattctacatccaaagcaaccataaatataattaaaggtgaaaagtaagaataaagtgaaaaacttgatgttcttagaagagggtagacaatttggtgcacctaaagtaacaaaggcaaacaagaaattagtttgctaccatttccaagtattagaaactaggttgatgctgtcaatcaatataaattttagaatctttcagtttacagctaacgagagagtatctacaagggcagtcctaagggtcctgtggtagatttcttgatctagccatccagataggttacctatatagacctctattcaccagataattgagtggttttgggctacacaaacactgcttgtggtgtgcaatcagtattttcaaaagtgatatccctactattggtgatatcagaaaatatttttggtgattcacaggtaagtattttttaatttgactgttagatgtttatttcaatttgctttagatgagggaaagaatcttaaacaggtacttgtttcacaaacattggcttaggatttttaaatctttaagtgagtcagtagagaaaaataattcatagaaaatagtagattgtatacataagacataaatcatgaaggttgtacacagattaatggaaaatacaacaataatgattgaagtgctataaatattccctcctaaaaagtttattttgtcccaatcaatagtttaactttcattacttcacctccctatacctcagtttgctcatctgtaaaatggaaatagagtatctgctttcaatgggttgctgtgagagtgaataaattaactcaagggttaataagctaataaattaataaatacaaagcacttaaaagagagcctggcacttagtaaacactctaaagatgtcagctagtagtagtgatggtatttcagaagattaggaagaagcgtttacaatcctagatgggtacaagcattatctccatttttcaaaaataaaggaatgagtggaggcaaattgttattgatcacactgctatgcagttgaaatcagaagttaatactaggttaatgaatgaatgaatgttttcttgtatctatggtatatattatatgaagctatgaagtgtgttttacattgaatctggcagtgaccatgcctcatgatgaacacaactgctgccttttataagcaggtcttttataagcaggcccttttttttttgagacggagtctcgctctgtcacccaggctggagtgcagtggcgagatctcagctcactgcaagctccgcttcccgggttcacgccattctcctgcctcagcctataagcaggccttttataaggcaacagcaaggaggaagccagtgtatgtgcaggggaaggaagccagagcaaggctccagaagcagatgatgaacccaagagcgcaaacacattttccttgattttttttttttttttttttttttttttttgagacggagtcttgctctgtcgcccaggccggagtgcagtggcgcaatctcggctcactgcaagctccgtctcctgggttcacgccattctcccgcctcagcctcctgagtagctgggactacaggcgcccgccacaacacctggctaattttttgtattttttagtagagaaagagtttcaccgtgttagccaggatggtctttccttgctttctttccttcttttttttttgacagtcttgctctgatgcccaggctggagtgtggcggtgtgatgtcggctcactgcaacctccatctcctccgttcaagagattctcatgcctcagcctcctaagtcactaggattacaggcatgggccacccctcctagctaatttttgtatttttagtagagatgggattttgccatgttggccaggctggtctcaaactcctggcctcaagtgatccacccacctcagcctcgcaaagtgctgggataacaaccgtcagccaccgcacctggccacattttcctcttattactgcttttttgaagtttccctaattgatgtgtcctttactgtgtggttattttccaaattttttaataccagataaaattttttgagtagctgttcccataagaaaaaacattccatgcattcagggatgagatgggagtggactttatttttggcattttttcctttattctctaatttattgtacatacagtacctcaacagaattgtaggccatgtgtcctatcacgaatcctgatagagaaagaatcgtcaaaacaatgacttcacaattctttaaacacatcttcaaaagccctaaatgtgaaaaacagaatagttgcatgagtactcgaagtacagtttctaccaaatgtgtatcacttttgcaccatcccaaagtaagtcaagaccttctgtattcaattaatatttaatgatgtggcttaactttgggatggtgcaaaagtgatacacatttggtagaaactgtactttgagtactcgtacaactattctgtttttcacgtttagtacaatatttacaaaattacatgagatagtcaacactttattataaaatagactttgtgttagatgattttccctgactgtaggcaaatgtgttatgaaagcttttaaggtaggctaggctcagttatgatgttcagtaggttagttgtattaaatgcatttcaacttacaatattttaaatttatgatgggtttattaggacacaacctgatagtcaaggagcatctgtacttcttacaggtaagaccagataaagatatgttttttacactctttctgcaatgctctttactactggagcgtttgtctctataaaggatatagagctagtccatggtcatcagcaacttgtgatatcaaaagtgaccaaggtcattagtgagtatattaaagattcccaaagaaagcaatttcactctttgatacaatgggtaaaattgaaggagtttatacatatttgcttctgtatagtattcctagttccagaaaggattttaaagcagctatttttcctttttcctaatccctagtgttgaattgtggactaaagcatctgtgtgttgaatatgttacttgatctgcatgaatatcattctctatacctgttgaattcttaatcattgtttaagaggtccttatttgtgaagcctttcctaatttccttcttggggttggggtgggttatttatcttccctgaagagagattacaccaaaagccataataaaatggacaaaatgaatgacatcaattatgtaaatcatgaattgtatgcctgggctctatttgtgtgtttgctcgcattgtcctcccctcatctcagatattttggtcaggttaggtctggccaggcaggcagtgtacagctcttcctcctccttgtgagcagagaatcttgacgacaactttatagttatacttaacacactgcatagtaattatgtgtttgccaatctctcccatgagagggcttcttgaagttaagttattcttcttacatgtctaccacactaccatgctcagcaaatgtcactgaatacaggaatatagaatagacactacttataattaaatgaagcgagattgacagtattcactcatgtcttatcgtttcaatgggccccttcttttgatgttatgtagttgtgatggctttctgcattgacaaaaggttcacagggcagaggaaagatgagtttcaaaaacaaccacctacctcccaaaacaacaatgaagcatacaagcgttgtgaaatgtttctcttcaacaaggtagtcagctggctgcccgcagagtaaatcaggtctgttactttcattttgtgcccagaagtaagaactcatttttgctgctgcttttccccagacctaacttgatggagtggtttggttattattgacactttcacttctgcatgctaacctgtatagcatgcaaaaagaacatgagacctaccaagatccaattcatccataccatttctacctaagattgtgccacactcagatctgaacatgtctcttcttgtcacagggcacacattaatacctcttgtcctaccccttgctccaagaacattttataggaacactaacagcagtgttagtgtttactccctgtactgttacatgtatatgggagagggggtgcattgataggtgcacttaccattgtaatgatatagtaatgtgcttgctttccccattggacagtgagtttctcaaaggccagggcccgaactttccttaaggctgtgcacatagcatgtggcacgagataggctgtccaaaaatatttgatgggctgaactatttgagggggaaggagcatggataaatgttatgctcccccttctctgttggtataaatcattctggaattccattttaccactccagccctaatatatctttttcttctctcagcacccttccaataaaagatggcaaatgggaaacaaagtcaaagttgagtcacaccagttaaggttgggggtgaggataagggtgaataacctgaaaataaaggaaaagaccaaggtttgatcatatgatgcctttgagtgaattagaaaaaggcccccttcctcagagcaatgaagcctgtcaacaaggcacatggcttggcatgtgactaccaggctggatttcagccccagtatctcacctcagctggtgctctgtgtaggatgtaacctgtgcaaatctatgcagtggtcctgagaaagatttgttctgttttatttttccttgcagctagccttaatctaaaaatcctagaggttcctcaagtatctccaataatatttaaggcttacctttggtcctttgttttgcaggtctacaggtcacaatgattctggtgtgaagcagaggatgggccagaaagagattcaaaatgctacatcttcaaatcacttcacctgtccctccagtagcccttcaggtccttggcatcttcaactcctgctatcctcacatgtaatgaccctcaaattaagttctacaaattacccagatcagagatatgttccttaaagattaagctgctttaaagttgaaattgagatgaaggctctcaaaatcccaaagaacaatgcacagttatgcgtctgtttgccagggacagtactaccaactgatatcacaccaaaatccatttccatgcctacttctcattggtttcttgccagcctgctttcgttctgattggctgcctacattatccccacccccaatccagaagaagccaagtgatctagttcttgggaagctttcattttttaacactcaagttacgtaagtacccacaactgttttaactgattttttttttttttgctgacattgtagaatgaattcatgaattttacaagtataatcaaagacaaccaaaaatttttacttttcccttcaaaagctaagtgtagtgtagctcccctgtagtctaagttagagaagaatactaacagcgtgtttttccttctgtgctcagcaagccttatctgtacttgctagtttcacattccttgaggctcagggagttcctgtttcacctccctagcgcagctgcaaagttacaaggttaatacagaaacatggtttcccagggatgtggaacacgtagcatagataaatgtaaaagactgatcaactgcctttgttctcgctcttgtaagtacgcttcctgcatcacgtagctcctggccactgactgcttaaaaggtggctgctttctttgtccagggctcagactttcctggacgctagtcctactgagccaggtgatcaccttttaataaagacctttcctgaactcactctgttcggtctctcccatctttgattgtcccaaaacaacataatagctgaaatagtcaaagatattaatgtagacagaatctccttctatatttttgatatatactctatatttcttatgccaacaccatctggctcagccctaaccctcttcaacacagtcttgtctcctctctaattctttttcagtcatactgtttcattttatttttctacctctccttccttttcaatgtttctcactcccattttcctaactcctatccatcattggtttccagtcctcaatttgaagaaacaatgttacccattcttcatgggaggacaaatgcatcccaaattccatgatgcctaacttatatacttcttgcctcaaatataattactaaaaacaaatacagtataaatattaaacaaatgaacaataatcatcaattggtgggttactttcaaggaagagttgttttgtgacaaattctactctctcattcctataccacattcaccaaggttgctgcacatcatcttcttgagggcaccaaggagaacatcacagcagtaagattacaccttcactatgtatcaagaaacctctggcaagtgagtctcaattcctacttcagactaaacacaattctaatcaacagctctatgactgtgacaagcaacattggtgcccacatactagctcctaaaatattctttatgacttccttttttgtacaaactgatgtggttcttttaagccactgagctcatccctactataatgccaaggactatgttaaaaagtaattggcttattcacaggccctctcctaagagacccattccttactcttccctcttctgcctttacttaactcacctcattaccaagttcactaccctcccgttcggatcttcaccttatctatactggctgtcaccttgattcctctcaaaattaagtttgactctctccttagtcaaactgatctcagcactactcagtttgagtaatgcccttccaggttctgcctagttcccatcctactgctgtcccctcaggctcactcggttcacctaagccctgcagctaagactcctgtaggttgaatttaagtttcgaagttcagattccccatggcctttagaaaaatcctcatacttcaggaaaagttggagaaaatccataaagtcagttagcttacacatagttctgaaagctaaagaaagcaataactaaaatatagaggtgatcaaattttttatcctttcccatggagctttttttttaaaaaaaagcaataataaagttatatttcaccattttttataaatccagctgaaggagattctggtcagtttggggagttgagcgctgagaggctgcccagtgttttctcccaactccatcttctgaaaagagacaatactatttaattgagatagacacaaaacacaggggggttagtcagtttcccatcctcctaacattataattggttcaggagtgggcatggactcagacaacaccaattagatggctccctaggttggtatattccattattgggagacagctgttctctctccacttaggtttagttgtgatgaagacccctcagagcagctggaggccaccttcccagctgcatggagaaagcccacctaaagtctgaaaggttctatgaggcaccaccttagatatttctgaattcttaacaaatgactttataattccaccatggattttatctttttcccagaaaccattccttaggtggagaactttttgccatctagaaaggataggattgaaaagcaattttattttcaaagccagtgagcactggctcttttcatatcttctaaatcctaaaatttatttgaaagctgaaatgctccttctcagtttctctctctcctctcatttagtagaagccatactcagtctggaaatatccttagcagggtcatcgaattcattccttagacaaaatgtggccaaacttacccaccaactcctaacaagggtttctccagcttccaataacatcttcctctctttactataaactcaccaatagcctcctagaaggccctagcgcttctgctaatattgtacttgaaagcctgtagctttcacccacaccctcctccaggcctttctgtcctctaccatctagtcccaaagacaatgccatgtattttaggttttgttatgtcaatttctcacttccaagttatacaatttgtgaattatatattgttaagtaacaaatacataactgagtagcttaaaacaataacaatcatttatttcgttcacaaatctgcaattttttgcatggctcagcacagaaggcttgtctccactccacacagcatcagctgggctggcttgactggaggatctgcttctaagatggcccactcatatggctggcaagttggggatgactgcaggctggagctcaaccaaggctgtgggctggggcctcagttcctccctgtggatctctctataggctggtcaagagtgagcatctcaagagaaagcatttcccctagttaggcagaggcctcatcaccttttatgatctagcctcagaaatcacatggaatcacttccactgtagtgacgagcctgcccagattcaagaggaaagaacagagacacatctctctacgtgaggaatgtcatgaccatattgtaagaagagcatgtgggaagggagatgtggccatcctggaaaatacaatctaccacatattagattgaacatgggggcaagtgtcagtcctttacaatctgggggcatcatgttaatctaaatagcaatctacttagtccagagcagtagttctcaaaggctggaccacaggccagttctgattcatgacaaaagttccatcatatatgacaaaataagaaaaataaatacaacataaaggtctataataaaacttaatttatttaacttaaagggtagagccctacactgagatctcttcccttttctggtgttaaaatgtcttttgttaaatgatagtgatagtagatagtagttgttttattaatgatgtcctatcaatctcctcccctttttttacattttttctgttcaattaaatacagaagtctaaagaactactgcctaaaagttatcataacattgaatttagcctttgattgactacttcccaaataatgtggaggcttcattgatttattagtatgcactttgaatagtaattactttgtggatgttcagaaaaagccatgcagctacctatgtaacagctcaaactcaaagcctacgggcatttaaagttgcctatgaatagatctataattcaatgtaacaatatgtaacaagagatactataactctcaaaatggactaaaattgtaaatctatagatataaataaatgttcagattctcacatcaaaggaatctttgacatgagatccaggaatctgttgtaatcacttggttcacatgccagaaagtaaaatgacattcaatgtgaaggcttagaaaatagaaggtcagaggagaaattaggcgtagagatgttggatgtatgtgtggcttatctgctagaggagtaggagttaaaatggggcaagatatggagataagtgttgggagtcatttttataaaggtgcacaagctctataaattaatgaagaggtaatgagttctatgtataaggtattactaaaagataattcattcagttatttactaacttactgttttatggactttttaggtataaaaaaagaacaaaacaaaatccctaccctcaaaaagcttacaattcacacagaaggacaaacctgtgaacaattaagtagaatacagtatgaggctattagcactatgggtgccctaaagagggaaagactcattcttcataatactggtgacagggaaggtcatggaatagagaattacagattgctttaccaaaggttaggattgaattttgagaaattctcacaactgggggcaagaggaagaagaggaactggtgaaggagttagaaaagcagttttaagagagtagaggaatcataattgacataaaagtaccaacacaaggagtttaaaaatagcatcagcaaatatatcaaaagctataaaaagtttgaggataaggattgaaagattaataaagagggaaaataggtttattttatactaaggggtctccagaaatgccttggtctaatttagaaatctttgaagtaagaatccaggaatccctccctaatctggaacacactcctggaaaataatgttgtattcaaaatccaagctcagaaaatgtagcgttagagtagaaaggacaaaaatggcacctggacttttcctaaattattgcagtccttaaggacaccggtcttcgcacaatatactgtattaagaaaatgggctaggcatagtggttcacagctgtaatcccaggactttgggaggccaagtcaggaggaatgctagaggccaggaactcaaagaccagcctgggaaacgtagcaagactctatctctgcaaatttttatttgtttttattattattttttgagatggagtctcactctgtcacccaggctggaatgcagtggtgcgatctcggctcactgcaacctccacctcccgggctcaggtgattctcctgcctcagcctcccaagtcactgggattacaggcacgtgccaccacatacagctaaatttttgtatttttagtagagacagggtttcaccatgttggccaggcttgtctcaaaccgctgacctcaggtgatccgcctgccttggcctcccaaagttcttggattacaggtgtgagccagcacccagcctgcaaatgtttattttttcaattacccaagcatggtgggaggatcacttgagtgcaggagttacaggttacagtgagctatgatcatgataactccactgcattccagcctgggcaggagaggcagaccctgtcaagaaggttgcgggggtggagagagagagagagataagagaggaagaagaaggagttggagagggaagaggaggaggagagagaagaggagggggaggggaggggagaggaagggaggggaggggagaggaagggaggggaggggagaggaagggagaggaagggaggggaagggaggggaagggaggggaagggagaggaagggagaggaaggagaaggggaagggaagggaaaagggagaagggagaaggagggtaaaaaaaaaaaaggagcaaacacaggtcttctttgtactgctccataaacacccactgggtcggccaaaaaggtggctgaaagttattgcagtgttcttttgctttaaaaaattgaaactgaattgctcatacattaaaaggataaaaaactaaaaactttgggagacatttaaaacagggttatctcaaaaccatggttaaataaatgtcaactgacaaagtattactgaattacccattccttttccttctccccataagggaaaactagctttcagaacaggacaaagaagagaaagccataagaacgaacaataagtgctttttaaaaaccatcttcttttctataaaacttttccataaagtcacaacgtaagagaaggttgaggcgcctgattaaataaattagaaaaaaggctttccaaaccaccaatatgaaaccaactatcgtacttaaaacctaggaaatataaaacagaatgggaggggaaatggtcttcagtccagttacaatatctgtattgccagccttacagaataggagaactcttctaagtataaaactatacagatttgtgtttattaatttacagatagaaggaggtcaaagataaagaggggttttactcagaggtataccccacctcacaggtgaaatttaattttggacataaaaagtgatagttgtacccagaggctcctaatccaagctggtcttaatatttccttgctccaagtgtcattccataagatttcctttttaggcagggagaacaaattttttctctggaaatagccaaatatgtccttttatatggaatgcctcaattacacagaaaattattagattctctgagtagttcttaaagcctccacatggtcttcacgaatgatttatacccaagtgctttcctgaaggagcacgtgaaactcacatggggctgtgcttggaggagcagaggcgaggccagagtccggacataagcatgctgaacaggtcaaacaaaacaagggcgatgtaatgttgtacttaaatacttaaagaaacccacatctgttttctcgatttcaaatggcatgaataggtttgcctttcagatactaaaagaaaatgtggccttttacagaacgtatgttcagttggaggtatcatcttgacttctcttctggtcatggcttgttacagatttggcacttttcacttgacctgaaaggaaacagattttaaaattacatttaattagtttgcaatatgaaacaaaatgaagccagtttttaagacaataagaatggaataaattagattgtcccaggctgaaccagctactaattcaaccctagtgttgttggtatgtcattcaaatagtctctcctgttcactatatttaaagctgtgaggtcacatttcccatataatcagtattattgtccctagttctgccattgatgagagtaactttgaataaaccgctaaacctctgttgtcttcactttcttcactgcaaagtcagggttcatttcagaggttccatcaagatctaacattctgtgatatgaaggtgcttagagaacatgtgatatagggggtcgggggagagaggcaaatcttcacaggtgagaagggaaggaggggggattgttgggccaggttaatggtactggtggagaggtgggaataaccgtatatccaatagtcccagctacttaggaggctgaggcaggaggactgtttgaacccaggaattcaagttcagcctgggtaacatagcaagaccctgtctctaaaaaaaaaattgtaattgaaaaacaaattaagatatcacaaaatcttaaaaaataaaaaataattcaggtcttaattatctcactcttaaactatactcactttctctagtctcctctccctccaatccattttgcaaacaagcccagattatcctccgtacttaatctctcttctctcccaccccaaagcctttaaatgacatcccactgcccaaaaaataaagccgaaacttctaagtttaaaatttagtagttttaataaaatgatcacatgttaactttgcaaaaactctattttctacatttctactgtaccttgacacagactcagctacaatcagccacatgggtactggccacttccttattccccacatttccacttttgatcataatactgtgctttcattctggaatctccttcatactccacactggctatccatcctctcaggaaactcttctttcttcatgatgctttatctttatacttaggcttctctgatcatatagagcacttagattatcttttcaggtatgttctactcacaaactaagtggtaggctcctaggagagtgctatgtgtgtgctcaacagatcatatgattcatgttagttctagatggcaagaaacattatgtcatactgtaatatctggactaggttaagtgtcttaacctttaaaaatccacaactcctttttgataaacataaaaatcttaggtactgattatccacatgcaaaagaattaaattggacccctatggcctaatacatacatacacacacacacacacacacacacacacacacacacacacacacaataaaaatatatatctcaaaatacatcacagaactaaacattagtgctaaaactacaaaactctcagaagaaaacatagaattaaatcttggtgaccttggattggcaatggtttcttaggtatgacacagaaagcagaagcaacaaaggaaaaacagataaattgaactcaatccaaataaagttttttgtgttccaaaacataattaagaaaatgacaagacaatccagagaatgggaggaaatagaatcatatttctgacgagagacttgtatcaagaatacataaagagctcatataactaaaaaataaaaagacaatccaatctacaggtggcaaggacaggtgtggtggctcacacctgtaattccagcactttgggaggccgaggcaagtagatcacttgagcccaggagtttgagaccagcctgggcaatatggcaaaaccctgtctctacaaaatgtagaaaaattagccaggtgtggtggcataccgctgtactcccagctacttcagaggctgaggtgggaggattgcttgggcccagggaggttgaggctgcagtgagctgtaactgtgccactgcactgcagcctgggcaacagagtgagagcctgtcttaaaatgaaagaaagaaaagaaagagagagagggaggaaggaaagaaggaaagaaggaaagaaggaaggaaggaaagaaggaaggaaggaaggaaggaaggaaggaaggaaggaaggaaaagtttcttccctttaatgaccaggaaaagaaaaaaataaaaatgggcaagcaattcaaatagatatttctccagagaaaatacagaaatggccagtaagcatgaaaagatgctcagaattgttcgtaatttgggaaatgcaaatcagaatacattaagataccacttcatacccactaggatggctaatttttttaaaaaagacaatgaccctctccctctccctctccccacggtctccctctccctctccttccacagtctccctctgatgctgagctgaagctggactgtactgctgccatctcggctcactgcagcctccctgcctgattcttctgcctcagcctgccgagtgcctgcaattgcaggcgcgcgccgccacgcctgactggttttcgtatttttttggtggagacggggtttcgctgtgttggccgggctggtctccagctcctaaccgcgagtgatccgccagcctcggcctcctgaggtgccgggattgcagacggagtctccttcactcagtgctcaatgttgcccaggctggagtgcagtggcatgatctcggctagctacaacctccacctcccagccgcctgccttggcctcccaaaatgccgagattgcagcctctgcccggccgccaccccgtctgggaagtgaggagcgtctctgcctggccgcccatcatctgggatgtgaggagcccctctgctcggctgcccagtc

SEQ ID NO: 466 - DNA, 142463 bp, Homo sapiens
ttgcaagtcagtggcacatagagatgcatgaaatagtccaaggactgcttgtagaacagagctttgaggcattccagcactcagtggccagagaggaaggtgagcctgcgaaggatgctgaggacgggcagcaacagaggtcagagggaaaccttaaacatgtggtttcagcaaagccacagatgaggctttgcttctttttttgttgttgttgttttttgaggtagagttttgctgttgtctcccaggctggagtgcaatggtgtgatccctgctcactgcaacctctgcctcccgggttcaagtgatccttctgcctcagcctcctgagtagctgggattagaggcacccaccaccatgcctggctatttttttttatttttagtagagatgtggtttcaccatgttggccaggctggtcttgaactcctgacctcaggtgatccacccgcctcagcctcccaaagtgctgggattacaggcgtgagctgctgcactcagccgaggctttgcttcattctacaaacagaagaaggcagacaacagagttgaatgctgatcagatatgataaaggctgcaaaagatgtgtttggtgtaccaaggaagatgccattggtaagcctaggaaagtttcagtggccctaaatggggggatggattggaccatgctgaggagggagtgggagtgaggaaatggagtcagcaggtcaactctttttattttctaattttaaaaattagtttattttttagagacagggtattgctctatggcccatgctggagggcagtggtgtgatcatagttcactgcagcctcaaactcctgggctcaagtgatcctcccatctcagcctcctgagtagctgagactgcaggtgcgctccaccatgcccagctaattttaaaaatatttttcgtagagacgaaaaatattcgtcgctgtgttgcccaggctcaagtgatgctcctgtctcagcctcccaaagtgctgggattacaggcctgagccacagtgcccgatccagctaatctcttttgagatgtggctttaaagaggagatagatagattagtaaatggaagagtaggatcaagggaatcgcattcttaggctttgctgaaatttgagaatttctacattaagacatgactcttcatttactcatgaactcaacatttgaggtcctgctatgtgccaagtactacgctccttgctgaggaaagaaagctgaatacaatggaggccccagatgacaggccactaactatgtagatggcagccccgtctatcaactcgagcagaacagacagttctgtttatggcattaagatacaagagtgttcttactggtaacatctttccgtagaaattgtgaattttgtcttaggctacataggtttcaaggttataaaataccagatctgggagggaactgagagatcatctcattcaaaggtaggaatttgagtcccagagaggcttagcagcttgcccaaggacgcacatctcctaagtggcagattcagggacagagcccttatcttctgcttcccagttcagggaattttccactactccatgccagatgatacacgtaagtgtcactttctgcatttctaaattcatatagcttaaccattcctttaagtggtaatgttaatgaattccatgagttagtgcttattttccacattctgccaattagttgtgggttgggggtgatccattccaaggccctggattattaagtgcagtgtcagctgttttttgaaggtaattcattccaaagcttggaccaattacacctagcagaattgagagtaggttgaatttgcctctaaatgtctttgaattgaaaatcaatagtcctgtctgctccccccatagcatggctacagggagcaactggggcatgcgggaggtggtgtctccacacactggggaggtgggtatcctgagggggtgcaggggtcaggctcaaagcagtccccctcttacctggtggataacaggctggagcagtctattttgggagttggcctttttctgctattccatctagaaacaatagtaagaagaatttatgattatttctaaccttccctccctccatcattctcccagccctgagcaatctggattggactcctaccatctgggaaataccaatttcacttggaaaccaggagcatctcctacctcatctagaactagttacctccccagccagcagcatgtcaaggagaaacagaaaaagtatagattatctatcgtgcaaaacagccgttttcatgcccacggcttctggtgatcagattaatctttggtggcctctgccatccaacctaatcatttgaggaggcaaaggcttgtcctgcaccgatctgtctagcagtgtggctctgggcaagtgatggcatcattaaatattacagctggaaactgtaggggaggaaaaaataatttcccctctctactcttctaagttcttggctggaacccctgtaacaaaagagagattagtaagagaaaaatgaagagaagtttattaacatacatatctcatatgggcatgggagaaaactcagggaaagagtaactctcaaagaggtaacttagaactcttgtttatatggcatctttaacaaagaataatacatttttagaaaagtgacaagggccaggtgtggtggctcacgcctgtaatcccaccattttgggaagctgaggcaggcagatcatctgagtcagaagttcgagaccagcctggccgacatggtgaatccccatctctactaaaaacacaaaatttagctgggtgtggtggtgcccgcctgtaatcccagctacttgggaggctgaggcaggaggatcacttgaacctgggatatggaggttgcagtgagccaagatcccaccattccactccagcctgggtgacagagcgaaacttcatctaaaaaaaaaagagaagtgacaagacaaaggagaaggatcctgagtctctaggggtggcaaattgtctcaagtcaaatatagatgcaggctagttaataaagtttgttatgtggattcctctcgtgtggtcttcaggctgttaagagtcaaaagtcatctccagggatcaacttagtccttcctggtggagcagggaggaggggcacctttgcaaatttgtgtcctgcttttaggcatagcggcgagggcacagagctttccttgtatttgcttcctctcaattgccttcagctcaaaataattcttatgtcaaagtgttatattttggagtgctgtattctgctaccctgtgagaggctttccaagctcacatatttagatattaccaacaaggaaaccaggcttagggaaatgaaatatctcatgttctatacatttgtggtggtgcctgcctgctctctctgctttcagtttcttcacccgcaaaaagggagattgagcacttctaatatcctttccacctctcgcattcaatgccctgaaagtccctttgagccttgctactcaacacatgggtgtggacagcagccttgcagcatcgctgagagcttattaggaatgcagaattttgtgccccaccccagaccagctgaatgaggatctgcatttcaacaatgtgcatataagatttagaagactcatataagcacaactcatataagtcggctttagaaatgcagttgctcttggccctaaacatcctgtattttttttcccctaaagcttacagttgtctttctctcatcagcctgcagaggtcaggagagagccgatggcggtcttaatgaagaggaaggaggaaaggacgcagctttttttaccccccggcttaatttactccgtattcggcttaacttactccctattctaccctccggtcttcaagttcccttaagctcgttggcctgttacccagtaaaactacaaggaaatggtctgtgtggtgaattttgaagctgtccacagtacagatactccagtgtctgcccttccagaaaagagctggacctaaggggtcctcctgtctcacgtgcagactcccagggcgggattaaaaatgcaaaaatcccatgtttccttgcaaatccatgtgaatctgtggctgatattattatgccactctatgtgatgtaatgaagcataatttattttggttctataatgtatttatttatcaaggcatttgtattctattttattgttgatcaatttcctgtaatttaaaattctaatgaccacctctccaataaaccaaaggccaatgtcttccatgttgttatacaaatgatattctttgtataatgctttagagtttataaaacactatttcactttttaaaaaatcttcataacacaagatacattgaatacctccatttatgatgatgatgatgctgcagcccaaggtttatccagtaggttgtagaactaagacttgaatccaggtctcctaattctatattccataaatctttctattttactaaatggcctccactaattataataaagtttccactcaatgaatgacatcaaggtgtagttacccactgctgagatgttttatttggggatttaacatttttatctgataatattttttccagcagtgcaatttaccagcaataactgattagatattataatttccaaagatttccctctgtctgtgattagaaagaggctactgggaaaaaatgaactttaaaagtaataatccaaaataccacaggatagggacatttccctagaatacaaagtcaacactcccttccctctgtccatccctgtaatgcctagcccccatcccaccatataaattctcttttctgtctctctagtacagaaaagagaggatgtttctttctccttttggatcttccttctttctcagacattaaatacctagtgtctcagttgttttgggctgccataacaagctaccagagactgggtggtttatcaacaatggaaatttatttctcacaggtctgggggctgggaagtacaagatcaaggtgctggcagattcattgtctggtgagggccacttcctgtctcataaatggtgcttgcttactgtgtcctcacatgacagaagaggggagggcaatctcctggatctcaagatttagatgttctatttattgaatgtatgctagagcttaccttttaaagcatctgatcctagtgttttctttgtgggaagatttttaattacagagtctatttccttatgtgttattgcactattcaagtttttttccttgattctgtcttgatatttaaaatatatttgtagtttaaattttcccaacaaatacattggcataaagttatatatatatatatatatatatatatatatatatatatatatatatatatatatatatatatggaaatgtccctatcctgtggtattttggattattacttttaaagttcattttttcccagtagcctctttctaatcacagacagagggaaatcttctttggaaattataatatattttatatatatatatatatatatatatatatatttttttttttttttttttttttttttttaagacagattttcactcttgtcccccaggctggagtgcagtggcgtgatctcagctcattgcaacctctgcctcctgggttcaagcaattctcctgcctcagcctcctgagtggctgggattacaggcatgcaccaccacgccccaactaatttttgtatttttagtagagacagggtttcaccatgttggccaggctggtcttgaactactgacctcaagtgatctgcccaccttggcctcccaaaaagttatttacaatactatcttaattttctttttcttctctgcagtgcctctactttgtcctcatttatattcctactgcttttaatttgtgtcttctgtgtttcttttttgatcagttttgcttcaggtctgtcaatatcattagtctttttaaagttccaacttttagctttgttcatccatgcttctgcctgttgtatggatatggcacaatttgtctgttcattcacctgctggtggatgtttacgttgtcccattcttgtttattacagctttatctgaacatttgtttgcaagtctttgcgtgaacacctgcttttatttctcttgggtaaatacctagtattgcaatggccgagctgtatggtaggtatatgtttaactctttaagaaaattgccaaattgttttccaaagtagttgtatcattttacattcccaccaggcatgtatgaaagttccagttgctccacatcttttccaacacaagacattgttattactttggcttgggccaatttattatttttcgaagggatttaaatgccaaaaaaaattggttctatttacccatgtagtgaccatttctagtgctgttgatcttgttgtagttccatattcccatctagtatcattatgcttctgcatgaaggatttcctttaacattttttgtagtgcatctgagctttgtcagtgacaagttaaacaaacaacacatttattgtagtgactgcaggtctgctgataatgaattctttcagctcttatatgtctgagaaaactatatttcacctttgtgtttgaaagatatatttactaggttaagaattctaggttgacagtttttttttttctctcagtgctttaaagatgtcacaactgtcttttagcttgcatttttttcccaaagagacatctgttgttattgttatctttgcacccctctacgtaatgttttccccatctctggttgtttttaagacttttttttatcagtggttttaagcaatttagttataatgtaacttagtgtagaatttcatcatttttcttgggctcagggtttgttgagttctgtggatctgtgggtctccagatttcaccaaatttaagaaaagttcagccattactcaaaatatttttttctgacctcctctctttcatgggctccaattatacatatacttgccacttgaggttattccacaattcactgatgttctactaagttttttccatgtgtttcattttgaactgttgtttcttcaggctcactaatcctttcttctgtggcctcgaatctgctgttaataccaaccagtatatttttcaacccagacataatagtttcacattgagatgtttgatataggtctttttacacctttcaaacacttttaacattgtttttatttgatgaaaaacaagacttctgttttcccaaatgaaaagaccagaagagatatcatgggatatcacacctttcatatgtctatttaacatcttttctctagtgtccttggatacatttcacatacctgtttccatgtccaggccattcccttatgattctcttcaaccaggaaatacccacagggaagacttcagcttttgaccatgaaagggtactcattaccagaattgccctccttctgtcataaccagaaaacaacatgaaatacttgcaactgatcaattcagacatgggataatgggtggcacagggaggggagcccagagccaggcaatcttgctgaggtgagggggcaagactggtgacaggaggccatggcagctagaatttgcagggcacagtccctgagagaaggaaactacacagagaaaattccagaaaagtgcatacatttctcgagtctttggctgaaaccagtccgaacatgtggaaaccccaggggcacgacgacaacttctgagggaagaaccatgaccagagctcacacaacccctctccagggagccactcaagttccctcagccagagtggaaaaattacccaggggacagaaagtccttcttcctgagagctgagagctctttagcctgttgtagtcgggggagatggtggagagaaataaataacaaagctgcggtcagtcaggaccgccccccacccccagctccaaaaagctacaggtcgggggaaggagaggcaaggggttaaggcaaggtgtgctctccagagggctaaagaagagctattctaagaagacaagtgacttacacctttgacattttatagaaatgttagaataaccgttgggccaggcacagtggctcactcctgtaatcccagcactttggaaggccgaggtgggcaggtcacttgaggtcaggagttcaagaccagtgtggccaacatggcaaaacactggctccactaacaatacaaaaattagctgggcatggtggctcatgcctataatcccaactacctgagaggctgaggcacatgaattacttgaacccaggaggcagaggttgcagtgagccaagtcatgccactgcactctagcctgggcgacagagggagaccctgtctcaaaaaaacaaaaaaaaaaggccaggcacagtggctcacacctgtcatcccagcagtttgggaggctgaggcgggcagatcacctgatgccaggagttcgagactagccttgccaacatggtgaaaccccatctctactaaaaatacaaaaattagctgggtgtggtggtgtgtgcctgtaatctcaactgctcgggaggctaaggcatgtgaatcgcttgaatccaggaggtagaggttgcagtgagctgagattcagccactgcactccagcctggacgacagggcaagactctgtctcaaaaaaaaaaaaaaaaaaaaaaagactatcatcacacaatgtcgctgaagaaactctagggttcctatgggtgagaaagtggtatctcattagagacgtgtccagggcacaagagtgggtgcatttaactatgacacatgtaagccccaaatcaggcactcaagataaagtcagtcatcgtgtcttttagatattaaagagggcagaaaaagatatctgccctttagatattaaagagggcagaaaaaggtatttccatggctcttctccatggaacctgtttacagaatgggaaccacaaagatttgggagggtgggggcaccaccaggacttttagaagagaaagaaaagggtgcttcctttgtggatttccaggaagtaaacttttctctgttgacttagcaaattatcatgtagcaatctcagcacattattcccagaggtgccactttaagcatgtgaccaggaccgtgcagtgacctgggccatccccacatactgttcaggtcctgtgcctggaattcctgcctgtccttagatgatggggccagtgacttcacagacccgctacctaactctggacgatcttcttacattgaacggaactccggagggaagcacatccccaagtgaggactctggagatgtgaggaggaaatagacaggtgttcttttctctattgaatgcaaaagcagttttcttgtaagatgggccttggtgattgttctgttgcttgggacccacttcctttggttaccaaataaggcttgagccatcacattccttcatgttcttggtcaagacagtgttatcatccagaaatattagggtggcttttcctataagctgcccacactaccaatccccactgaaaaatgatcacatcatccaaattcaccagccctccccacactcaccaggttttcaggagaaggaatgtgtgtaatggaaagcttgtgacatgttttttgctttattgaaattctttcttacaaaaggtctgatgtattttaggccaggcctaatttgctttggtccctgaaatgcaggcccatggtcatttccatgtcctctgaagtaggtatgtaaactagtagacttccatttttaaggttcacacactttttaacattgtttttatttgatgtaaaacaagacttatgttgtccctaatggaaagaccaagtaagagagttatgtgcgtcttcatggaagggataactggattctttgccagaaccgggttgggaatttagtttgttcaatgtggcatctttcacctttagtttttttttttttttttttttaacttaaatgcaaaccttgcaatgtgctgagctatgtagtaaaaagtgctatgtttatatatgcatacatatatgggctctggcaagggatgcatgagtacatgcgtgttatgtaaacatagcaattggtcagaaagagagtttctcatcattaggacatttaaggagtggcaagcatattggaagcaagaatgacctagggccatattggcttagttgtcagccaggagtgttgctgttcctacacctggaggggcccaggtctctccccaagcaggccagtgctcacctgatatgacaggtgatcgtgtatctgaggcctatgagtttgagattcccccaaggtgaggtgggtctgcactcacttgctaccaggtagctcccctagttcttgaacatgtgtatggcccagttctgctcctcatgtaaaaagcagaacacgatctccctgtctctaggaggagggtgcagattgcagatttatggaggcccaaggccccttattcctactccccacccccagaggttatagggaatcttcatttccttcccccctaagggttccattaggacttgtgttttcctgaccacagattcacacctgaagaggcttggaagatgcaaaatcatcacctccaaacagctgagacacacatgacttggctttaaccgtgactgcccaatgccagagcactggactcaggtttaacatgggcagcccccatgtcaccctccacatcagctctcctcctacattgatggtcggcctggaagccagtcatgtttgaccttgcactcacgccctggaggttctgaagtaggcaactttctagttacacaggtcctgcacccaagcttttagctcaggccaagtaaagacaataagttcaggtgggcacacggtctcagtcattttgtcttcttacttgcagtctaggtgaatggaccagttaagtgctacctggaggtaaggctgtatccagactgacatgccctggaccaatgcagctaagtggatacatgaatttggcacccaagatactatttagcgtgccatggtagtcattcaatgttagtttcattcccttctccaaatctagctggattcctgcaggtgacttgcatttccctcttgcccctacagctggcttctcctctatgtcacttcctcaaactagcaaatggggagcagaggcagagtaaaggggggaaattcatcacttgacgttgcctcttgctggggaggaagatgtagaaactcttggactaatggaggtttgggaattgtctgaagagtaaatgatctatactaccaaccatcgctgctgctgcacttgtctctgacacattctcagcattcacctgtaactaaaaggccaaagggaactgggatattgaggcctggtgcatggtgttcagaggctgggcaaagtggtgatccagttgatcagggctcctcatgcaggaacctggtggaagagagagacgggcagtaggtcccagagttatacttcggagcacatgttcaagagggaaatgacgaccggcccccacggtcctgggatgcaggtgtgaggactgagaatgctggacggggtgtggtcgaggcatggtcagggtggccccgagctgtgccccaccccagggatgcaggaagggtgctctgtgcaggaccccgaacttgggctctgcccactttcagtgtctgttgcatgtcacgctggcatcttcggcatgtccacagtttgtcaccccccatttggagaagctgcagcggaagatggtttcctctgtgcccttgcaggcaacgtcatccatccagatcctcccagtgcctgtggagacagggaaacacagctataagcggatacacaggagggcgagaaggagaagagagagcataactgtgcctgcccttgacttggctctgctgtacactcaaacctaggggcttccagctgccctctccacgccccccgaagacctcatacttattttctgggattagtttcttgagggcagaatcacaataattgttggtgatgatggtagtagctacaaatatcagctatgtgtcagaagccggacaacctctcctttttagtggcagcgtcaggactggctattaaagtcttaaactctgtcattcactcttgaagtacgtgggtaaaatccctttacaaagaatgtcaagggaacatttaaaccacttccctgctgtttggctctaacagatgaactaagtggcttgaacatatttttgttacgtagacattttcagcccctgttgtcacgggattgccatgcagtgaatccggggatggaggagggaggagaggccccttccgccacctccttggatgttgtttcttctccagagcctcttcctggcctggatagctgtagctcttacacaataagccctttgaggcagagaatgatttgcagattaaacgtctcctggaagacacatcggtttacaaattacccaggaaaaggctgcaagccccagggctctgtgggattagtcacacccaaagcaaataaagaagactaacaaataaagaacagttccaaggtgacccagcccaaatacgtatataggatcttgaaactctagctggtgtttcaccagggggttcttgttcacatccagtcacgggaggaccaatacaatgggaacacggtcatcaagggaggagcagtgcatatctgcagtgacgtcaacactgcggtggcgggggatcattcccggaggaatttgccagcaaactctctctgctccttgcaccaccaggcagaggctagaaccctgtcagctctaggtaccaatcattgttttagctttagaactgatagctgattactcaaggtgtgcagtttgaagaccagggctgtcagcatcaccagagagcttgttagaaaagcagacacacaaaatcttccttcagcttaatctctcccactctaggttcccacgccgcccctaatcccgctcgaagcagccctgagaaacatcacccattatctctccataccatcccgccaaaacttttgctgccccaacacttcaacactattttatgttatttttcttactaatataagaagacaggaatgtcaggtctctgaccccaagctaagccatcatatcccctgtgacctgcaaacatgtatgtccagctggcctgaagtaactgaagaatcacaaaagaagtaaaaatggccggttcctgccttaactgatgacattaccttgtgaaattccttctcctggctcaaaagctcccccactgagcaccttatgtccccacccctccccaccagagaacaaccccctttaactgtaattttccactacctacccaaatcctataaaacggccccacccctaaatccctgcgctgactctcttttctgactcaacccgcctgcacccaggtgaaataaatagccttgttgctcacccaaaaaaagaaaaaaaagaaagaaaggcagactcttggccaggtgccatggctcacgcctgtaatctcagcactttgggaggctgaggagggcagatcgttgagatcaggagttcaagaccagcctggtcaacatggcaaaaccccgtctctactaaaaaccccgtctctaccccgtctctaccaaaaacacaaaaattggctgggcgtggtggtgcacgcctgtaatctcagctacgcaggaggctgaggcaggagaatcgcttgaacccgtgaggcggaggttacagcgagccgagatcatgccagcttgggtgacagagcaagactcagtctcaaaaacaaaacaaaacagcaaaaaaccaaattattgaggcctctgtgtgctcagtaccattctgatgaacagaaagacaaaacaacagatgcaaaagatttctgccttatagagctaacgtttgagcttctatgtgtttatttagagtaacattcatagtaggaaaaagttacactgaatcctacaggcttccatctgtgcctcacacatagaaagcaggacgactatttaacaggtatttaagagagggaaactgaggccccagaaagattgagtgacatctctaggaaagtaattattgaggtgaagaggccctgccctggcctctcatgttcggccagtacagtcttttctcctcacacagccacagtccacagcatgtaacactcagccagaggacggcaaaccgtgagccaggtctggccaatgcctgcttttataaataaagttgtattggaacacagccccacccatttgattgcatattggcttcagttgttttcctactccaactgcagaactgagtagctgtgacagagaccacctggcccacaaagcttaaagtatttgctatccagcactttatggaaaatgttggctgacccttgcactaaagctgtctcccaatatttgaatcttatcttagataaaaggacaagaggaggtaataatgcaataattagacgtgaacgctcctaattttgtctgcctgttcccacctacaaatctgtctgatgtgcagcaatccttacctccttttccatctgtctgtctccctgggagatgctcccagctgcgctaggtcacactcccttccgtggcctaccaagcctccctccagtcatcacccttccacctcgccatttgcatcactccagcacctcctggaccaatttaaaatttagaacatcttcaaggccctcccatttgggtctttcttggcttcccccatgcaaacagaaaatctgattactatgccctgtccaggagaaatgttatggtgccagacccctgggagagctgtcagggcttggagacagggaggactcaggtttggcaggcactggaattccttccttccttctattcttccttcctcgctcccttctttcttccttcctctctccctctgttcctccctccctccctccctcccttcactcctccctccctccctctcttcactcctccctccttttcttcctactttccctccctccttcctttcttcccttctacatttatccagctcctattatgccccaggtagttttgggttttggaactacaaaggtgaagccctcaagatgtttccatgtatcgcagggatcaggagagtataagaagtgctgtgatagagaagaatgtgacgggatcatagaggagggttatttccatcttaggggtgagggagcatggaaggagccagaaaagcttccctcaggaaagatcattgagctgcctttaaaagctgagtaggaattccctagctgaagagggagggaaaagccttccagcaggaggagcagcacaggagaagaggtgggacatgaaacacaccatctgtgccccgagaaccaccagcaggtgcagtgtggagaggtgtggggtgggcaggaggccaactaagaagatccttgggtgctgagctaaggaaatccagcttgattctgagagcgataaaaatcctctgaggacccaggcagggagtgaggtgaccaggcactcgttttagaaagatccctaacagtttgagaccagcctgggcaacatagcaagaccctatttctccaaaataataaaatgaaataattagcttggcatagtagcatgtgcctgtggtcccagctactcaggaggctgaggcaggaggattgcttgagcctgggaggtcgaggctgcagcaagctatgattgcaccactgcactccatgggtgacagagggagacctcatctcttaaaaagagaaaaaaagaaagatccccagcagccatgagaaggaaggccacaggagctagcctgcaggtgtggtggccgtgaggagtgactcctggaggattagagcctctactgtccccacctccaccccacacttgtagataagcgtgcacaacagagcctgtgcatgctaactgcttgacacccaagatctcctttagcatttatagtaattcttcaatagcggaagaactgaagcttagagagggtagggaatctagtcaaggtctccagctgcaagtggcagatccgggattctgacatgggtggtttgactccagggctggggcactaaccactgctctacctgctaatctcctaaggggaggacagcaagaacgacgaggtggggacaggttcaaggaatgccagaggagtgaacactggtgggatctgcaggactcggggaccaacctgatgtggggagggggagtggtgacagggaagaggtggcccagggttctggctgggatggggtctgactggtaggacggttctggtgatggcaatgagagaggcacaggatctggtgggaaggatatgtgtgcaattgtgacagctgccattggagaagcccatggggcatccgagtgcacctgtcaggaaggtcaccggacacttgggtctggagctccactgagcactgtgacagagggaagagctgggggtgactgaagccccaggtgtggaggcagcctccagagagagtgtgcagaacacaaggacagcagaggcggggtgttgggggtgctagggagaggaaactgtcaggaaggaagagggtgagaagaaggctaggaggcagagcgagagggacctgggaggctccttcaggctcaacagcagacgagctgggagtggggttggggcaccagtgggtaggatgctggcagggtggctctgcctgccgccaggaatgacagctttccctcctctcggccccatgactacaacagcattaaaacccttggcacatggtttagaatcctcctctacattgcccatgctgtggccagggctgggcttggtcagctctgccccccagccctgcagctagcctggcccatgctaggtgcctggaaactgcttgtagagaggaggagaacatgggtgcagcctgggctggcagaaagcctcagttatgccagcccttccctgcccaggcccctacagccctctgtatactgctagtgacacctggcctgcaaccagccaaggtcttgaatagcacctgagacctgttagggcaccatgatagggaaataatggggcaaaaaaatagggcattcgtgaaagcaagtccagcttcctatcgaccagtttaaagaatcaagtgacaagcttagagcttccctgtgtcaagaggaacagatcaggggagtgaaagaagccacagtctacaggatcgctggcctggcactcgaagcccacccactgccttttcaccaactggcagagtcaggctaacatgacctgtgatcttcaaactacctattctggcttcttgaaaataatttataattttttttctcaaaaggttttactgccacttattaggaagaagccttcttcggagctagaaatgggaatttgaggactgttcctattctaatcaacaacaacggtggttttccttagtcaaaaccagctggaatccagccccaagccttaggtgggagaacagtattctttcctggtaggctgcccttcatggtgccggatcccttcgaactcgcccctcaaactctggcccttaagacggcactccctgccagctggctcgacagatttcaccaagggtcactttcagtcaattaccaatgagatctatgggatgagattcagaccaagaactgcagcagccccttatggggatgaagaggaaggcggctgggaggagtggaggcttccacctccagtctggatgtgacctggctccgagtccccatctggaagggacatgccactttctcccctcaccctgtagccatttagcacagtgggttggacagcaatgacctcaggcaagacagcaggtacgcccggctccactccatgatgtggggaaccctgccgtcagtgggctgccatccacaggtcaccagggggcctggtaactgggtgtgagaggatcagccccaatccctccccacacccacctggtcttctccacaggtgagcagtggcatcttaaatcccagggggcccaggctgggagacccattatgcagcctgcaggccctttagttacagacaggacaccaagacccagaatgcagaagcaacagggccaggacatgccatcaagggaaagctcactactgaatgggtgtggggagtaccaggtttgtgcatgtgggaccattgttttagttgtgagtcaacacaagagtctgattctttccatcaggaaacaaatgcagggtttgaatcagccatctacctaagaagggtctgtgccccttcctcagagtctcttgtgctatctgtaggaggtcagtgtgcttcagtgtgtcaaaaggaaagcaaccaaaatgatgaagactctccaaatcttgtcatatgagggcaagatgaatatctggggattaatctggagaagaaaagactcagagaggcagagacagcccagcagagtggttcaaatacagactcctaagacacctgcttgggcctaaacatcgggtctgacatttgctagctgtgtgaccttgggcaagttactcaacctctctgcacttttatttcctcatttgaaaaacagggatggctgggcatggtggctcacgcctgtaatcccagcactttgggaggccaaggtgggtggagtacttgagcccaggagttcgagaccagtctgggcaacatagtgagacctcatctctattaaaaataagaagaaaagttagctggagattgctagtaggcccagctagtcaggaggctgaagtgggaggatcgcttgagcccgagtgatcaaggctgcagtgagccatgattgcaccattgccctccaaactagatgacagaacaagatcctgtttccctccttgaaaaaagaaaaacagcgatgatacctgtatacttcatagtgctgtaaagatgaaatgggtaaatatttgttacatgttgagaacataggctggcacactgagtatcatataagtgttaacaataaaaacataatagagacatgagagcacgttataaaggtctaaagagctagccagggagagagagaccacagcagctgtgcctgggacacaggactgggaagggctggtatgggacaccaccaggacaggacttagatccacgaaaggaagaatgttctaatcatcagaactgtctgatgaccaccggagatggttgcctggggcggggcagtgagttcttattgcagcaagcatttggggagaggctggggacctcgcggaattgcagtggaagggactcgggctttggaggtgagcccagtcctaggatgtgcaggccctctcctcatgttttttgccctcagagcgccttaccttgcccgaatcgagctgtgcggtacacctcctccacaccgcggaagccgagcatgcggcacaccacgtctccgtccttcttgtcccagccgtcgtcacacacggtgccccaacgccggtcgtggtacacttccacgcggccctcgtgcggacctgagccattcaccaggcggatcatcatcggggcctccacgccacctgccggagcagccaactgtcactacccagctctagatacaccaggacccgcccccaggggccttctttgactccgcctacccctgggtaggaggaagagagggctggggcccagctgtatcaagacttcagcccccaaatcaccctgtgcctcttctgccctttgccagccttctccccaccttaaaaaaatagcctttttcacagcgcggtgctggtacaaaaacagacacagagaccaatggaacaaaatagagagcccagaaacaaagctacacacctacagccatctgatcttcgaccaagtcaaaagaataagcagtggggaaaggactccctattcaataaatggcgctgggatagttggctagccgtatgcagaagaatgaaactggaggacccctacctttcaccttatacaaaattatagaactcaagatggattaaagatttaaatttaagacctcaaactgtaagaatcctggaagaaaacctgggaaacattattctggacattggccttgaaaaagaatttatgactaagtgctcaaaagcaattgcaacaaaaaccaaaattgacaagtggacgagtgggaactaattaaactaaagagcttctgtacaggaaaaaaaaaaaaaaacctatcaacaaagtgaacagacaacctacagaatgggagaaaatactaatatttgcaaactatgcattcaccaaaggtctaatatctggaatctataaggaacataattcaacaaacaaaaaacaaataaccccatcagaaagtgggcaaaagagcggctgggcttggtggcttatgcttataatcccagcactttgggagaccaaggcaggaagatcacttgaggctagggcttcaagaccagcctcagcctgggcagcatggggaaaccctgtctctacaaaataataataataaatgagccaggcatagtagcccatgcctgtggtgctagctactcgggaggctgaggtgggaggatcacttaagcctgggaggttaaggctgcagtgagccacgtttgtgccactgcactccagcatgcatgacaaagcaagaccctgtctaaggaaaaaaaaaaaaaaaaaaagtgggcaggagacatgaacagatatttctcaaaagaagatatacaaacagccagcaaacatgaaaaaatgctcatcgttactaatcatcagagaaatgcaaatcaaaaccacgatgagatactatctcacgccagtcagaatggctattattaaaaagtcaaaaaacaacagatgctgataagcccgtggagaaaagggaatgcttatactgttggtgggaatgtaaattagttcagccactgtggaaagcagtttggagatttctcaaagaacttaaaacagaactatcatttgacacagcaatcccattgctgggtgtacatctgaaggaaaataaatcattctaccaaaaagacacatacactcatatgttcattgcagaactattcacaatagcaaagacatggaaatcaacctacgtgcctatcagcagcggattgaataaagaaaatgtggtacatatacatatacaccatggaatactatgcagccataaaaaagaacaaagtcatgtcctatgcagcaacatggatgcagctggaggccattatcctaagtgaattaatgcaggaacagaacaccaatacctcatattctcacttttaagtgggagctaaacacaggggtgggggtgggaatacaagatgggggaggggagaagaggggtaagggttgaaaacctaactactgggcactacgcttactacctggatgacaggatcatctatactccaagcttcagcatcacgcaatatacccaggtaataaacctgcacatgtaccccctgaatctaaaataaaagttgaaataataaacaataaaataaaatagccttttttaaagagcagttttaggttcgcagaaaaattgattgaaaggtacagaaaattcccatatacaacacccctccctctacacacagcctcccccattatcaacatcccctgagagtggtgcatttgttacactcaatgaacctacactgatgcctcgtcatcacccagagtccacaatttacatttgggttcacttttggtgctgcacatgcgatgggtttggacaaatgtataataatgtgtattcgccattacgatatcatacagaatcttttcactgccctaaaaatcttctgtgctccacttattcagtgagactattcatctctccctcctccctacccctggcaaccactgatcttttcactttctccgtagttttgccttttccaggatgtcatagttggaatcatacagtatgcagccttttcagattggcatctttcacttagtaataagtaagtgaaccttcatgtaaggttgcttcatgtcttttcatggcttcatagctcctttctttttaggactgaatggtattccattttctatgtgcaccatagtttattcatccattcacctactgaaaaacatcttggttgcttcaaagtttttgcctggatgaataaagctgctataaatatccatgtgcaggttttcatgtggatgtcagtttcagctcatttgggtaaatatcaaggagtgtgattaccagatttctctccactgtttgagacccggtgaccagcagccttgcctgctagggaggagggtgtaggagaaataggaagccaaggatggttaagactttgtgggcaggtagcatggctgtgtcccgggaagtgtctcagccctgatttggtcattcatgttcactttcccactaggctgtgagtgtgaaagtgctttaagccagagagagccagttgggaattctggttctgccacttactatctgcaactgtgagacacattggttcatcaaatctgagatgccacctgttgtaatgggcgcctgttttatatgccactaagaaggaaaaatctctgctgggtaggtggcaaattatatcaagtgccaggtgcttcctgatttcacagacatataaatgtgtgtcacagaatcaatgaaacatggtaatagatgtgaagaactcagaatagcacctggcacataataggccctttcgacctgaatgaccttaaggtagcctcacaacctctctaaaggcatttccccaactgcgacatgggaacaacatctacactgcaggactgtcatgcaaacaaaatgcaacaaagctaaaagggctctggggcacaatcctggcccatggaaacatcagcaatgtgggtctgttcccccttctctgagggctgagcccctgtcacattgatctctaaactcagtgcttggcacacagcctggctggaggaaatgaaaaatcaatgtttgcagaatgtagtagagagccattcctgagcattacaatgcattggttctccaaggggaaatgttggggacccaaagaacaccagagcaactgaaagaagcctttggatcatcacaaagccagggtttggctgggaagtcatagtctcagggtgaaacacatggtcagtgccagagctgggatcacagcttgcgtttccttatgtgtcttcccacatccttttcaccatcctgcccgccccactactcttgggggctatttcccctgctgggacctgagcatcctcacttgataagatactggagtggtcagtgggtcttatcaaaatcattaggaacaccagattccacggccaatccagacctactgaaagagaatcttggtggcaagagtgagggatctctatttttccaagtgtcccaaataattcagaacaattggtttgtgggctgtggactggcatttagattagagggtcaatcagcaaggttccttctagctccaaccctcagtaatccaaggccagagaagaaatcagggtcatctctttttaaagccagaatccactggtgtcatgtggggtaggggtggacattgtactggaacccagtgacaagtgggtgacacaatgcaggaaaatgcccatgtgaactgccagagaaaataacaaacctactcaagccctgctactaataagcgcggcactcctggacttttgtttttcctttatcttgtatttggccaagtgggctggaaggagcctccttttaatgactgtgacttggcaaagactttcataggtcccgaaggagatggcagaattgacatctgtgccccatgagaaaggagagaactcagaactggccacatgcctgggccaagaaaaccccagaaaattctgcagaggaaccgaggaagccaccaggaagcgaccccaaccccaggaatgatgctaaagactacagcgagagcaccagggatgcctcctctcgatattggatgtatttgctgcggatccttcatccctggccaggtgaccgttctccccacacagactgcaaatacaaactcattcaggctgtccccaaacaggctgaggctatgcaagacaacagagagatcctggagaagaaaaacatggagaagagctggaattcagaggctgggtctgacaccaagaaactccccgggagcagtaaggacaggctaacctgcagccagcagcaccaagagggacccggccgctgcgcggggccttggccctgggttggctgaggccaggctgtcagccctggtttctcacagacctgcctcacctctggctgcaccaggaggcctgcaacagaagccacagtgtggggtcagcaagtagggcaagaagtggcaggagggtgctgtgagtcacagagcaggccaggcagaagtcaggtgtggggtcaaaacaacaggaagagtgtgactgggtgtgactaggcagccaaggtagacggtcggagactccctgacttagcctctctgttctggccagcctgaactcactttgtgcacctactcgtttagccaagtaagtgactgagagtctatcagacagctgtggatacacccacaaacagagtccctgccctcatggagctgacattctagggagagtctagcaatacagctagtcaacaaaaacaaaaccataattatagccaagcggtgataagagcatagatgggaacagaagcacagggagtacagagtgaggcaggcactattgtgggcaagtgaacaaaggagtggagagtgagggcaggcgccatcttggacaagtggaggagggaggaaatgagagacagggcaggcaccatcttggccgggtggacaaggaaggaaatgagagagagggcagacaccatcttggccgagtggacaaggaaggaaatgagagagagggcaggcaccatcttggacaggtggacaagggagggaatgagagggcaggtactgtcttggacaagtgaacaaggaagagggtggggagtgagagcaggtgccattttggacgagtagagaaggaaggccttgagtggagacctgaatgagctgaggaaggacgtggactcccccacctcagaaaactcctttctgtactctggcctaagctttccttgtcttttagatctcagcttagatgcctcttctccttccctggtccccacacccaacagggccccttctaggtacatgcttatagctttgtgtcataattgctattgctatttactctcttaggacactgtgagccttctgaggatcacgtgacctggtacagggcccggtgcactgagatacccagcctgtgcaaagggaaggcatgcatgaatggagggactcattaatatggacccagatgggcaggtgctggctggagggcatggctccccagagtccagggctttggtggcaacctgaatggagaatccaacatcagggccccaaatctccagcatcctctttattacatcacaacacttctaatcacatacttgctgccttctctacttgagatgactctggattctggacccagagctcaggctgttacaatgaccgtacatctcaagtgagagaatggggacatggctgtcagatgatcatggtgggtgcaatgggaagtctggaaaatgtcatttggatgctgaaatactgaaattcccaagaggtttcaatgtatatagaagtgatagaagaatatttggaaacaagacaccttcaaaaaattgaaaacatatgataaccataatcacgggatgcaaagcatcaatttcaaggatgtctctggcccatggcccatgcttaccatgcattgagcaaagtcatggcctgcagggctcctatggtctccccagtagggaccacattgatctcaggaactgaaaagtgccctcaagggagaaaaagaactagagagcacctgggcgaggctgcacaaggcaccactccacccagaccccagtgtcggttcattaagcatggaggcctgttcctcaccacctgtccccagatcccctagactcagggcttccccccatggtggagggccgcctgcccacagggtcaacagatgctgcctgccccagcagggtcaacacaaatctgaaagccacaccttctcccctggactcacccaaatcagaggccacattttgttgtagctccacttcacagagcatggccctaagctgtggattttgcatccttttctccccacccaacaaaatctcagctctgttaccacctctctgggaaaccacaggctgaggtctgacttgcttatgatgtaggctgccctgattcaggaactcagagtctaaattcagaaacttgtgtctctggcctcctttacccctgaagaggtataggggaggcaggcaggcaggagcctttcccagagctgagcaatgaggccacctccagcaacacacttggggaatcaccaacgccctccaacagtgactaccctctagcctgagaaggacgtcatcatttaagaggtttgggtttctgtgggcagagggtttaaatgctgctttttcccggcagtttctgccccaggtcaaagctttcccaccaagccaccaaccaccactgggaaatgctcttgccccacaatgtgtcagccccgacttaatcagaagtggtgactgagaggcagcctcagcctggtccgtgacttccccaagactcttcctgtcagtccagggagttttttcctcagatgccccccaggagggtccctgcagggggaacggggctactggagtcagggagatgcctctctctgcacgtggcagtggaggaaaatgggagacagggattcttgattgtgtgaaattcagagactcctaggctccaaagcaagagcagatgctccaggtagagggcaaagggcaagagagctggtgatgagcaatgggaccccaggctttcgaggttgcagccacgtcccctagtaactgcccttcaatgactgcgaggcaccttcacctcctccttggcatcataccacattgagccctggaaaacccttcctgagcaaatgaggatcagcaacccggaagaaaaccctgccccataccactcccgtgtgggtatctgatttgcacccctcaggtgagggcgttaggtgcagagactatcacacttttcctcttgttctggatccctaacctgcagactggggtctacctgtccatgccttcatggtttgcaagttaagaggatggtactggctacaaggctggtccctaccagctctgtgcaggaatggcaccggcacatagcatcacttggctggaaaacccaagctgaagggaaacaccaagagctattccttactaaaaacaaggagaggctgttcttgacagcttattccaatccccatcccacaaggctttggcagagctttttcttgtaatgcccacccctgccccccatagcagagacacccagatatccacagggctcatctctgttcatcttttccctgcttccccagaactggggaccacaagcccgagatggagcagggacttaggggctgctaggcccccaaacatggaaataaaagaaaatcttgagtatcttcaagggaaattctaggctagccccaagaagtaaatgagcaacttggtaagaaagaaagaaatagtagcttaaagcaatagtcaaagaagttagagtcaacctctgatgactctctatagaaactaaagagaacatcttaacatatgtccctgaggtgtttttcagaaacccagctggatgtttttcagaaacccagaaccaaatggatttgctggcatatagacctcaaatgaggggaaactgaggcctgaactctgattgacggacttttttttttgagacaaggtctggctctgtcacccaggctggagtgcagtggcatgatctcggctcactacaacctctgtcccccaggctcaagccattctctcccgcctcagcctcccaagtagctgggactacagggtgcatgctgccatgcccagctaatgattgtgtttattctttattctccagtgccacagaataaaggaaaattccaggcacctagctagctctgaggacctggaagaagtcacatccacaggccagaccttaatattcctttctgctgaacccaagtttttagacaaagtttcccttccttaaccaattgcaaatcagaaagtctttgaagccatgtatgacctgtaagcccttgcttccagatttcccacctttttaggccaaaccaatgtataacatccatgtcttgatttagaaatttgcctgtaacttctgctctcctgaaatttaccattgcctttaaacagccttgcttgtaagccatccaggaggttgagtcttaagtgtgagctaccagattttctttgcttggtgccttgcaaataaacaccatgcttcctcccactgcacaacttcagtatggatgtttggctttaccatgccaggcaagaagatcccacttcggtttggttacaagccccatcaacaccctgtgaccaaggttcttccctttgatacagagaagcagaaagagaaaagtgctgtcacctcaaagcccagaccagagcatccctgcctggtttcactgtgtaaccctaggagaggaaagtggtttgagggaacacagggcaggagactggctcctggctgggtagcctccttgctgtctcccagatcaaggggctcattgtttcaccccacaacttttctggagtgtcaattccagcctcggcttggagctctctgcctcactgcagccccagaccacagcacctgcctccccattcctcaacctgttgtactgagcctgcccttcacccaggccccaccgggaccaaccccatggtcctcagccaccctccttctacaggccccaaatctctcaaagcttgagcttgttccccagtaaagagggtacagctgaggcacagatgaggccaggtcatggagaagatcaaggcatgggtctggacaaggaatcttagcattttctcaggatatcactaggaacaacttccattagcttagttgtcggcaacagatgtcccattacttagtgcttggagtgatttttcggtaattatgacatcatctttgggcttttccaataatcacaaatgatggtgaagcatagcatttgccagctggtagagacttgaagatgacacagtccacactctttgcatgacacgtgtgggagcagaggcccagagaggtgacgtgccttacccaagtcatcccgtagctagcagaagagctggggcctgaacttgagacttagccctcgggccagttctccatctacaccctcctttctttcccagaatcctttcttcagaagatccctgagcatggtccaccaatttgcatcacgactttgatgcaagatgccttttgatggagcagttacatgaaaaacaattactttaaccctggaactgcaatgcttctaactaaaattcatagaaacagcttggtttctcctgagtcttatgggagaaccaagaagacagggttgcctttgtgaagcacagccattgctgagtttgcatttgaaaatgaacatgtcaacgattgcacgcaggggaaggataaaccagccttggcttttgaggaaagtgataatatttgttgaagtccggggtgattctacttcccgtgcacagatatgcagcactaaaaatgcattatctgtattaattctttatgtatattttatcaatgtctgtgtttattttttcaattgcatatttatttatccatcaatttgcaggtatggaattactaccacattccaggattgtgctaggcactaaggatgcaaggataaataagtattgtctttgccctggactcactcaaatgaactaagagtttaaaatagataagaaagaccacagaatgtcaaagctggcagagaactcaggggctccaaaaccctcagttagaaatgaggaaactgaagttgacagagaagtcaccagccattactgggatgccagatccttctcttttgagaccacttctctttctgatgctggctactttcagtaacaaaccataatacagagagaagacagtttgaggttaaaccagcagggcccagggtggggcaggctggcactcctagaaccaggtggcactgctctccatctgtgaaggttacaagcacatatactattttcccttggaaatagagaccatgtcttgtttgtccatggccccttaacacttaacatgacacgtggctggctgagggccctaaatgctgaatagatggcgtggagggcaatgggtagatgtgtgcgtgactttatgagcaagcatgattggaatccccttctgaatgcctccggatccctggttccagtctcaacctccagtgcctgcatattcagaatgggtgctgttctcacccacagatcccacctgctcagggtgggaggggtgggaaaggtgctgccccagcacggaggccacagctcgctgtgcacacagtgacttggggcctgaccctggatttcatcgatttgtgctgcccttctgaaggtcattctatatccccgccttgctaattgatgtctaaacatgtatcgatctagccttggggacacagaggtatttcaccctgtctcttctttggatgcaaaatgctgcgaggcagttccaggttgtcccggcaggtgtgggtctgaagcaagcagcgtggtgggtgaggggagcccagggcagagactggatgggcagggccagtccaggcaagctacaagtgctctcgcaagtctgagaggcatttcagacttcctcatttcttcactgtcccatgggcctctcagggttgttgaggggatcagtgacaaagactctgtagccaggtgctctcctgaacctcaaccttccctctataaagacacaagacatgtctgtatagatgtgaacagaactacaataggtttgttttttttttgtttttttttttaaatggaggagtctcgctctgtcatccaggctggagtgcagtggcacaatctcggctcactgcaaccttcacctccagagttcaagtgattctcctgcctcagcctcctgagtagctgggactatgggtgtgcaccaccatgcccggctactttttgtatttttagtagagacagggtctcaccatgttggccaggatggtctcgatctcttgacctcgtgatctgcccgcttcggcctcccaaagtgctgggattacaggcgtgagacactgcgcccagcctactaatatagtttctaatagctcaagattccgctcctaggatgatctggacccccttaaagtgcctgcctgagaaaatgcaagactaccaaaagaatttcctgtatgttccagccaacacctgaagacagggcccctgtcccccgtgggatgcagaagcctcactgtgataagcaccagttatcaaacccagatgggttttacatgaactagctcctttctgctttttgtaatttttcacctccctgactctactgagtccccactcttccctctccctaatccctcattttcccttaaaatacccgtcacctctgtacacatcgaggtggcattcagttcatgctggactcctccctgctgcaatagttatcgctgattacaatctgttcttatcactgtaactagggtccagctttgtctgtcttagacgtcagatgtggttagagcgtggctctcaacaggctggttgggtgtgtgccatgctcacagcccatgggcattgccttccacgtgggaaagaccgtgaatcattggcctgactcagaagttctgtcccagcctctctgatgaagattagcagggccacctctcccagcagttcacactggggaatacggagagagctgagcagacacaaagagactgagaggcagggatggtggaatcaataagccatgttggagaagaggcctcccagtgaaaagctgagccaaagggcagtggcccccagaacggccttggattccgagtgaccttctcatgccaggatccacaaggcccacctgaactatgggtcctggttatcccaaatctccttgcatatcctcattacttgaaatgacccggatgagtctctggttcttgggactggaaaagcctgaagagggcacctgtgaatcccatgcacccatctgagaactgatcagctacttgcctctgtgggtcctggggaaattaggaatttgcaaggcatcacacactgtcatggtgattcctgtggggagataactcaggagggtggaaggaggcagctggactcaggagcaggattggaatctgactccaccataggccagaagtgacctctccatacctcaccctttttttttttttttttttttgagacggagtcaagctctgttgcccaggctggagtgcagtggtgcgatcttggctcactcaagccccgcctccggggttcacgctattctgcctcagcctcccgagtagctgggaccacaggcgcccgccaccacgaccggctaattttttgtattttttagtagagatggggtttcaccgtgttagacaggatggtctcgatctcctgacctcgtgatccgcctgcctgggcctcccaaagtgctgggattacaggcgtgagccaccgcacccagcctctcacctcttcttaaagtggacatcatggtggcggctgggagcaacagggcatgtcaaggacttggcacctaacgtgaggtctcatcattgtgagctcccacccctggtcaggtggcagtcctcccagcagcgtgtgggtcagctccaagggtccccatgcttgggatggcttggacaccagtggccaagcagggatgtatccttgaaagcctttttgcactcgtaggaagcaggaacaaaaaggctcatcccctgaattgaatgagtctcctcctaacttctgttctccccagggcttggttcctggctccttagcatattaggaccagggcatccgtgaggcagaagaccggctcctgctgtcagcaactttctgtacattgatgcaaactggatgttatttgttaagcaaggcagctctggaatggcccaggaatgcaatgctagggctgcgaccacgcttgagctcctagtgcagaccttagaaatctactatgtggggattctcctctcaaaacaaacatttctttgctctctttgttttgtaaatatatatgtcagacaagcaaggtcccaggcaaagcaggctgagtcttaccccagatgcccctgaaccctggagctggaaggggtctcggacattggccttgaacccctcccctctacttcaaacacacagatcctctcctctctgtagcacaccagacagctgctcatcctgcctctgggaatggaagggaacccgacagcatctctggggaatgcattacaggattttaaagccaggatctggtttcacttactcgccctggcatctctggacatcccagggttttgcatctgattattccctaccttattttacactgtgtgcttggggattcatggctatcactggggtgtgagatgaggaacagccttttccttctttcagcgcaactgagcaagtggttttattactccgcccccagcgggtttaggaggactgtgtagtggccagtggctgccatctctcagaactggcttccaaggctggggtaacctcagagctatctactgccagcagggcttggccacacctggctcagggccatccccaaacccagcgacaacacagccaagttctgggtactacccaggacagagctcaagtcaggcataaaaagaggagagaatgattatctactgaggtcccgtcgtgcacaggctgggcactgtgcaaagtgctttgtgcgtgcatttgctcatttcttcttcagaggagctccatgagttagttattacagctcatttaacagaagagaaaacaggctcagaaaagtcaagtaaaaatttgctcagggtcacacagctgccacatggaagagtcagagagaagggcaaaggcttgttattttcaatccacagaggcgactctcaggctgaatgcttaagacaaatatttaataacagccctctccaaacataaagtgcttttcatccatctcacaacagccctatggggtctgccggatccactcttctcaggcttaagggaatgagtcttagactgaaagcagtagctccagtcttgactgtatctgggaagcacctgggaagctctgaaacccaccagtgtgaggggccagttttaaacaattcgtaggtgattttggtgcacagccaaggctgagaagctctgtgggagaatgtggatctgggatcaagccccggctacacaactccctagttgtggggccttgtgagtaaggcagagagatgtcacctcctctgggaaggcttccctgattgtggccccagcatgtgctctccactaatgagaaatcctgcaccatgattccctcttccgtgtctctctgcactccccatgggaagctgcgtgaagggggccaccattctgcatccttgtggttccaaatcacatccctgcagcaaacagagagcctgcacgttccagtgctcaacagatggtgtggaatgaatgagtggggcaatgaatggatgaatgggactcacagcatttgaggggctctgagaacggagctggtcactaaataccccaaaacctgcttggctgtgcaccagaagggacctaaagtccagggaactttgcctctacagaaaagcagagggaaagcccaccctaagcctggaagattgcagctcctttatgtttgttttccctgccttccagtccccctgaaagagcaaaacaagaggaaagaaaggaggttgtggagaatagaaataaacacatggggctgggaatataggctctgattttctgcagctgcagagtagagccctagggataattcggaccatctgcccattaaggaagttgaactttcattctcttgtaaagaaagaactccccgtgcccccagccggcctgaggcacaggggctctgctgaggctgaggtgacactgctcggcaggaaatgtgatccatatgggaaggacaggggccatcccaaaagcaaaagaactttctgatcaggctgtcctggagggcatcgctttcaaaatgttgtctggcctgtgggtgtgctttgtaaaatgctatttcctaatgccaatctgctcttaatacgttcctttacaactcttcaaagcacttttattagcagttctcatggggtctttgctgtcctcccctgaggtaggtggtgttagccccattttacaggtgagaaagctgagactcagagaaggggagtgagtgactctctccaggtcacatgataaggcggccacgccaggaccacacctgggtttccaaagtgctgtgtctccacttaggggtcagacggggtacttgggactttgctgggtagaaggagcaacagaactatctcccgcattgtcactgccctgaggatcgtactggacttttaaaaactgtgacttcccctctttgtctccccagccgtgcttcatattctctggaaactggaagtttgctctgatcttgctattcctggctacccggtgttcaataaaaagtgtgtctgatcaaataataaacgaagcgctttccttgcccagtcctgaaccaggagctcaccccatcacagtgggaggatgctgttaaggcccagaagctctgcttagagctggatttgtaggaatttcctgggtggcctgggtggacaagtgaatcctgttctttcttaagctcctgaacctctcagagggcagtgagaggtcagagtcaacaagcatttaaaaccagaaagaaatgctggagagccaggagaagacagtgatgctatgtgcctgtttcatcaggcctgcagccctccttgctgtacaccctgtggggaggtgctgacatccgtaaggcacccttcttgaaggctcaggttcatgtgcccagggctagtggaccttcctgggagggttctgccatcccctccttgccctagttcctatcccagttctcctcctcctctatgttctaggtctgagtcccctttccgtgatgcttctccacctctgcaccataaatcctcaaaggtcaggactgtcttgagaaccaggtttacccctctctaactctaggaccttgggtgaggagtgtaaactctcagcatggttccctcctcagttagatgggatgacgacataccccagagttattctgaaacatgcaggagctcagtgaccggggtggttgcctctcaatagtgttgaactcaatacaacccctgaggatcatggtgggggacccaggcaccatgacaagtgacttttcaaacctctgagtcagcgagaaagacagccatataccccctcctgccaccatggccccaagacctcccagggaggtttactatggcttcgtctgtctctttcttccatctgaattcaacaaacggctccctaaagaaaagaggctgaggctgggcgcagtggctcacgccggtaatccaaacactttgggaggctgaggcgggtggatcttgaggtcaggagttcgagaccagcctgaccaacatggtgaaaccctgcctctactaaaagtacaaaaattagctgggtgtggtggtgtgcacctgtaatcccagctacttaggaggctgaagcaggagaatcgcttgaacccaggagcaggaggttgcagtgagcagagattgtgccactgcactccaggctgggcgacagagtgagactcggtctcaaaaaaaaaagaaaaagaagaggctgaaatccagccccaggggaagtaagtccaactagatagctggccccaaacaccctccaagggtggcttccatgtcaaaggacagagggtacttagggctgtgaagttcatgtagtggcagtgagagttgatccagtgacatcaaaggctcccggggacctcccggactcaatccgcagagcccacagctgcatccactcccagcataacgggagctcggggtcacggagattaaggacgattcccaagtttgtttgaaatgttttctaaataaacagtcaaaccactcttggttttcatgtacatctcaacgtaaaaacttttctttgttcaaaacccacatcaaagatcccagcgtcatttctttcactggttttcatagatgattccgtgttcaccttcgtctgatgtgggtattactaagacagttttcttgcagggcaaacccccaaagccactgcatgtctgccagagaattggggatgccagtccctggtggggagggaagggcggcaccgcaggctcggctgcctgtgtacgcagagaagtggagacacagcaggcaacacacataagaacagggattaggcagcagtcaaactggccacctcaacttacgtgtgaaatgcccccactagataaggcgtcacagcagccacgcctcccaagtcccacacactcacctggctgctaactctgaacataaactccacagtgccttgtttattttcttccaactagcagttcttcccaggctttggccctggttcctgccttcagttagcatatatccagaatacaaatattagtggccctgttaatgacctcttaggattcccaagaggggcttcatttctccttgcctaagcattttttccctgccagggcacgggcccagctctggtctctctccctctggccagggatgctgaaaatatcttttaaagagatgaaagtaatacaacgagctcagctgtccctgactcgcaggcgcctctgcacatccttattttaccacttgacttcttaaaggggccaggcctttaatttttccaggtcctcttgaatgtatgtgaagccatcaaaccactcacagcatggattaatcggaattgaactgttttctgcacacagcagtgtagaagctcccatggaaggggtcactgggagctttcaggaagagtcactggatttgtttttggaaggcttaagatgggatcttggcaaaccagaatgtctggaaggccagatcccatcctctgcacagaaccggggaaaaaagaggaaattgtggccggagaggctaagcgactagcttcagggccacacagccagtgaggtgaaaacaggacttggatttaagatttgttactgtgatacagatataataagaagtatttggtcttcatctccagctcccagccagagctcctagaactcttgtaacttcttaagcgataagagtgacaggagcatctcttgtgagaaactttgctttttgtccctactcctgaaatagctctggagcatctttttaaaattcatagtaagccccttccaaccatacctgagtttgggtgggatcgaaggatgaggtgctgattgtcagggaaatcaaccacgtgattaggaagttggaccattcagccccacttggaagtggagaggggctgcaaagattgaattcaagtaacaatggccagtgatttaatcagtcatgctaatgtaatgaaagccccataaaaacccaaaaggacagggttcagagaggtgcagtgctgaacacagaacacatcgaggtacctggcgggcggcgtgcccagagagggcagggaagctctgcaccccatccccatacctggccctctgcatctctcccatccctctgttcccgagttgtgtcctttataataaactgatgaacctaacttttcctgagttctgtgagttgggttctagcaaataatcaaacccacggagggggtctaaagggaatctctgactttcagccagttgcttatatgttctggaagcttggatttgagatttcatctgaagtcaggggcagcctgtgggactgagcccttaccctgtggggtcttcactaactccaggttgattatgtcagaatggaattgaatagtgggacacccagctggggttggggcattggtcaatgtgcaaaacacctgcacagttggggtcaccagtgtgggagtgagcaggggaaatgaatcttcattttcattgctccacaccagctctgctcctacagaactgcatagagttggggtcgcatcttctcaggaaatgtttctgaaaaacaggattttctcaaagtggaagtgcagacaagagaaggagcaggagcagaagagaaacttggatttggaacgtggcctttcccgagaggaagggtctgtctaccacgcacgaggcattggtcatgtgcaaagggccaccagggacagccaaggctccgccattacaatcctatggatggcttcctagtgcccagaggctcaagcctaaactcctgaccactgcaatgcccttggttatccccaccttcctttccaggcttattttttgtctcttacatcccaaacccttgccatgctgtactatttgggaggatcagacaacattatgctgtttcaagcatggttctctttacctgggacacattcaacttccacatccacctggtggacatgaacttactctttaagacttgggtcagctggcacggtggctcatgcctgtaatcccagtactttgagaggccgaggcaggcagatcacctgaggtcaggagttcaagaccagcttggccaacatggtaaaaacccatttctactaaaaatacacaaattagctgggcatgatggcatgcacctgtaatcccagctactctggaggctgaggcaggagagtcacttgaacccaggaggcggaggttgcagtgagccgagatcgtgccactgcactccagcctgggtgacagagcaagactccatctaaaaaaaaaaaaccaaaaaaacaaaaaacaaacaaaaaaaggtgcagtcgctgtgtctctccatgcctgagataaggctaacttttggtgctccattatcctaaacagattctcccgggcacctggtacagcaaagtctaggcacagggatgggagaagggagtccgaggactccaaaggattctgcctccttgactgtaaaacagagacagaaacatctcagcagctgcagggaaaactgtttagaaacttcctcctctgattatttattctgagtttacactgcatgctggggtgcccacagctcccctcgtccccagacttacttccctaaatactgaaaacatgtacgaagtgttaaacatttttcaagtgctctaagccatgaatgataaccatcaacaaactctggtttagaattcaccctggtgtcatctgcatattttttttccatatgaaaccaaattgagaaagattttttaaacaatctgaacttatatcctgctttaaattcatgctgtgggacttaaaaaaaacctgaattcttcacccaccccttagttgcaaaaacactatttatttttcctgcaaatggaccatctactagggtaaaacaaatgtatttctctcttgagatatgtatacgtagcgggttttttttttttttttttcctggccaaactcccaaaagccaaacatgtcacggaatgactgatattgcccttgactgaaaaaaacctttatctctcagcaagcagaaatcgggacatctggattctagacccaatttggccgtgacctaggctgggtgattttggggattcctctcatctctctgttgttggtctctgttctgaaaactggtggggtggggttgggcgagagagaggaatgggtctgaaacccatccaaccctaaaatcctatgacttcagatcaaaacatgggtaaacaatggcaagatttttgttctgaaaaatattttaatgtggactcagatgggtcctgagaagccttctgtggcatgccctcctccagggaaaacccccaacttccacgtccctagtgaggggtgtcggtcatgttttctcaccagtcccttttgcacagttacatccccatctgctggaacttcaggtctttgctgctaacggcacgggcttcagaggtgtttgggaaggttgaaaggcctcggggttagcagaggccaccctggttagcggctcttcccgcacgatgttggcttgtggaggagggtagctctccggtgctgcaaacgcttttttcccaccccgtagatcctacggtggggcttcccagggcgcagggaatgactaagaaaccctcagacatgggcaccatgtctgtcagaatttccacacttttctgaaagctgagccttggctctcccccacagagcccgggtctcagggatatggttaatgcttctgggactggaattccctggaaacataagcaggaggctgaatacagcttgatgttgttgtggtcagagcaagctggtgggcagaggctgtgggaagacaccccgcaatgggacaggcacagacctcagccctgaatcgtgacaactattcccctccagccccaaggtccttacatctgcatctggagctaccagtgaaagaggggattacttggggttttaaggagcccggccctactacccaagaccaggggccgaagcccccatcccagggtcaggaagtcagcggctggggattttgttcagcctcagccctggcctaaggacgtgaggaagtccgtcctcccctatgggcctctgaaaatggggagatggaggctggcctcccagtttctttgttctacgattcctctgggtctcccagagtcctcctcatgttgtgtagagcttcctgttcatggagctgtctctgctcagccccttcacctcccaatttcactgcctctggagactactgggggtgggggtcttgtcagagggcaggaaagaaaagttcagcgctttgtgcaagcttaggctctgggttctgtctgagttctgggctgcaatgagggtgtagctcttcgaggcaggaaagaaagcctcagtccctgaggggaggctgtccagagctgatgtcacctcttgctgtacagtcaagaggctccagggccaagtggagggggtggcctccccccacgcctccccacccatccccagggagccccgcacccctgtggctctggctctcacctccctgcaccgtagctctggcctcagggcccaaccccagtacagagcccaccagcctggcccacaggagcaaggtgaatagagaccacgcatcctccacagcatggggaacgccctgctggctcgacctcctcacttgctctctcaagtctgctgaaagaagagccaccagagaattcccaacaagagcccctctggcatgcgggcagtgtttctgatctcaaagccatctttccacatagttcctcccttcctgcccacccccatcaggagttgtttatttctcagaactaaatgccacgatccttctcagctaccttggcagcattctgtcagaaaccagtcaacaaacagagcagggaaaaacagcaccccgaagacagcattcaggacccagccctttagacaaaagggatcagatcaggtctactagatggcctcattcagtcagacacacccagttaagcagccctggaaagggactctagagaatgctagaagtactgtgaagctcgcagatggccttgtggactttagcacttcaggtgaggtgagtgtggggggtccaggatcagcctgggcatttccttgtttttctacgggcaagtccatcactttcaaggacaaggtgctgtcacctgccttgctcctatttgatcctgaatcatgcctcagggaggggagggcagggcagagagaaagcaggggcaagtttaagtgtcagggggccttggggaggcctctttttgggagtgaggtctccttctggtcctgcacagctgggactaaagtgtgatgtgaagggcctactgcaccataccatcctgagtgtgcttgatctcatctgaaggacctagtgagaccaaggaagcatgaaaatagcagaccattcagctgtagtttacatctcagctgatatgagcaactgaagagaaggcagttgaagtgtctgatgtgtactgcatggccaagagtaatcgtgtaatgatctggaggattaggcaggcaccaagaagtgagccaaagtttcatcatatagaaatgttagatggtgtgggaagatcaatgaatgagtaattaataatttttattagcgggtgtgttttgcaggtcttggccattagtgttcttctagttgaagcacaacaataatttttcatgtcattagtcatggttatcgcccatgtgggaataatggcatatgctctatttgttttaagtgtccttttggttgtaggatttgtaggtttctcttcgaaaccttctcctatttatggaggcctatggctaattattagtggtgctgtaggttgtggtattgcgttgaattttggtggggctgatagtctttgatttatttgggtgtcatgagacccctttctgtgtccagcttgtgactctgcagtggcccctgtccctgagtgtccggggggaagctattaacacagggactctttccccaggccccatcctcccagagccaagaccggagcctagatgccagaggcagtgatattctgcttgcgccctcacgtgggacagagccaactaacaccacatgctgggtttggtgttttttcttttgctcctttttaaacttggctaggagactctgttcattcttctctggcaagtctccaagattctacatgtagccctctctaggggaaaagtaaaccttagaagagtggcacaactaaataagctgatccccttgtcaacattctagcaaggaccgcatcagaaagatgcccattactaacagggtggtctgccggatcgcaagctctccagcgtcactcctccatcagtggcaaatggggaaaacaaaggcgatgccactttgtctctgcacctttccctgtgtaacacccagggaggggaggcctttaacaaggtcagtagctgaatttgtgcaagcacctctgatgattttaggaagcgtgtctgagtgggtgtattacacagaataataatcacaaacaggtactgagtcctcaccaggtgtccagcatgatcataagcactttacacagattaactcattcaattttcacaatgaccttataaggtaaagactcctgttatccctattttatagatgagaacactgaggcacagagattataccagctgggctagcgagtgaccgggggaagcctccagatccatgcacacaaccgccaggtttatgacacctctagaaatgtggccagtgcccctggggtctatcagcatctcttgctagaccagcagagccctaaaaaaggtagggagcctcctttgacacttgagccccagccatggctccagcctctgaacctccaaacttatggggctgcttgggggacagctagccctgtgccaacaccatatcccacggccccagcagaatgtccttactggcatccccagctctgtctcctttctctcctttctctccttttgggcctcggtcacctaaaacagaggaggaaactggcattagaaatggaaagaaatcctaattgtgaataaaatattacctgcaggagattgatgaactcgagaccagagaaaccctcaggcaggagccagcagcaactggagagcccagcaggcaggagaagagggcagccaattctgccatctgccctgggtaccccaagaaggaggaggcatgagtgagaaaatcccacccgtttgtaaagaaccaaagagcacatggaattttgcaggaagaagacaagtcaaagatagtcctattaaacactcaaggttttagaggtccacatccaagtttgttctaatgagcccaggggaaaacaaaggagagggggctttagttaaatagggggagaggcgggttctatgttgagcaggttttcttgtgggagagaccataaaacataagtgtgagataccagggaattgtggcatttccttcccaggatatggctaaagaagacctgtttggccagctggcatctccctctacaaagaagtagaaaatcctggcaccactcactggacattaaaatgacaagggacttctattccaaggacccccagaaagacatctgccaatcaaaagcccatgggcatgctgtctggtgaaaaaatcaagccagcaaattccaggggagaatgcccaggatgatccaagatttgggggggggaaaaaaaaaaggcagccatatacatatataggaatatgctcagaaaaagatctggcagggtgtgctccaaagcattgacagtagttattctaaagaataagagctgggggaactgaggggtggagactttttgctttatgcacttctgtgttgtctaattttcttttcttttctttttttttttttttttgagacagggtctcactctgtcacccaggcccaggcgggagtgcagtggtgcaatcttagctcactgcaacttccactccccgggttcaagtgattctcctgcctcagcttcccaagtagctgggatcacaggtgtgccccaacatgcctggctaagttttgtatttttggtagagatggggttttgccatattggccaggctggtcttgaactcctggcctcaagtgatctgcctgccttggcctcccaaagcgctaggattacaggcatgagccaccttgcccagtctctaattttattttcaacaagcatgtgctgcttttacaatctgttttaaaatcaactttttaaaatgggatcataaaaggaaggaaaacctcagcctgtttcatcactgaccagaaagtaaaataaaatttctcagtgatctaagatcaagagatcaccctagacatggagtgggaatgattagcagtacttttttcttagttttcattttaacaagtgaggagtagaaagcctggggaaagagcatcagatgtccttgtcttccgcagtgatgctacgaggcttagacaatcttgaagcgagcatgaaaagacagactgactgtaaaagtaggttcccctaacgtaaacaaggggactgcctacaggaagaagagcaaatcagaaggaacatttttggcactgtaaatctgagaattgaattaaaattgtaaatcctgggggaataaaagagtatatagaaggtcaggagtctggcaggactagggaggagggctgtcctgggcctgcagccctggtgtctgccctgcaggccccttgttggctttctctggttacatctctgggctgcaacctaccataacactcccttgcatttctacagggactttagcatttgcacacatacgtgcttgctcactcctcctgacagccctgtgagatatagtatcatgaggatttctagatttttgtgtgtgtgttttattttgttttagagatgagctcttgctctgtcacccagggtggtggcacaatcatagctcactatagcctccaactcctggactcaggagatccttcccactcatcctcccaagtagctgggactacagataagtgccaccacacttggctaattattttatattttgtagagatggggctcttgggctcaagcaatccacctgcctggtcctctcaaaatgctggaactacagacatgagtcaccacacctggctgagggtttctagtttttggaggaaaaactaaatgctttaacaagatgaagagacttgtacaaggttgccccgctggtccgtggcacagtgaagataagagtcctggtcccccatgccaatgcccatgtgctgcctgggactggtggtgaggctcagggagaactgagattgttattacctttgaacccacgcatgcccattggtcctgtggcccccagcttcccatcatcgcccttgggcccgggcaatcctggggtacctctctccccgggcagacctggggagaaaacagacaaatggcagagcctcagatgcagaacaggaaggaccctcagaggtcatcgtcgggttcaaggctcagcctcccccatgcatcctctcttagcctctgtgtctggcttttttctgttaatctaaagatgccaccacagcagagtcaaagaggtccacatggaccctcccatgcacaccttgtatccatcaggcttgggatcctcctgctagaaaggtccagtgctgttgtgagtgacggtgggggtgcctattcctttgggggtgtccctttgcccttcagcatgctggagacttagaatcagcaaacacttttttttttttttttttttgagacaaagtctcgctctgtcacccaggctggagtggcacgatctcggctcactacaacctccgcctcctaggttcaggcaatcctcccacctcaccctcccgagtaactgggattacaggcacacgccgccacgcccagctaatatttgtatttttaatagagacatggtttcaccatgttggccaggctggtctcaaactcctgtcctcaagtgatctgcctgcctcggcttcccaaaatgttggaattacaggcgtgagccaccgcgtccagcctagaatcagcaaacacttttttgagtgctttctacgtgccaggccctgctctggatgcttttcataaagtatctcatttaatcatcacaagacattgggagggattattctgcctgtgttagacaaatgagccaatcggagctcagagagattaagtaactgcccaaggtcacacagcagtgttggaggcaggatctgagccctgctgttgctgaaatgagagttcatggtcggtcagcatcgcttcatgctgatcaacagggcttactggtacttagggagcggggtgggaagaagaaaaagtagcttctcgttttatttaaggaaaaaaaacacaaaaagatcccttcccttgcatacacacagggaggtatagcaaaagggattggaggcgaggtcagtaaatggatggcctgctgccaatcaagccccagggctcttggccatgaggccccttggccacctcctgcggtgacggtgccggcgccatgcagagccagcataaacaagtccttgaccgagtgagagccctggccccatgaggcctggcctaagcgtgtagttatctctgcaaagcagagcacccttaattaactgactaattgttctttcctgcttggaatatgagttggtttgctttgggctttttctgggactcagagaaatctgtctcccagtaatgaattactcctctagtccgaaggtccaatggctggaagaagacaggtttctcggagagagctgattgggtttcctccttttccctcctaatacaacatatctgttcccagagtccaacagctccactgccacagaattattgatctagcacaagctgtgccccaggctccccatcttatgattcgctagggcagaaaatgcagttccagagccccatgagcccctgagcagcctcagtgctgactttagggaggttccctgagaggggagggccaggagtagagactgggctgggagctttccttcctccaggcactgtctcctctactgtgtttgcaacatcctagagatttaggaagcagatggtttggaggtataattcctaaaataaataaccagacacctttttccctctatttccttttcttccatcacttagaagacaacagtctcccagcaaaatgttgcaagcagcacaggctcaggaatggacagactggcaggcaaggtacaatgaaggaactcaacgggagcttgggagacagtgagtctaagaagaaccttgtctttctagaaggcccaaagtaccctacccaccagccactggctcttcagggctgtcactatgtgcagcaggatggggaggggacgggtcaaaagaggaagggataggtattcatgacccattcgtagacctgggcagggtcagcaggagtcatggtggggcgggagggtggcaggtagctagtgatcaggaaacactgatgggacagcatcttcaaagggttggtctggatctcaaaacatctccaactccttctgcatgctctgctcacacagaccctggctcctgggctgggaaggggcttcagggagctgcaggcctgtcctgtaccttttccttcagactgtggcacttgctaaggaaaagtatgcgctgcatcccaccgtgacaccagcaacctcttagtctcttgttggaacagagcgtttgaggcggagttgattgggcactcccctggggagccctggcatttataccatcaagaaagtagcgggtagagatggattggggatctctcccaggtaccacccaggggcacgctcattacctcgaagtccaggcaatccagggatgccaggcctgccttcctttccttcatccccctgatcacctttgggtcccggtggccctggaaaggcaaaaacagcactgaggttagggggctcccttctgaaacaggaccaggtcatctgtagaggaaacaaaacgccctctctgaggagaggaaggggcagcattagctttggaaactcacaggaaacccccagcccagtctcggggggcatcaggaaagtcttcctggaagaagtaatatccaaagtgaaatctcaaagagaaacaggagttagctaagtaaacagaggggtgggagagggacacacacacactgaatatgtatgtcccctcccaaaaccatatgtggaatccctaatccccaatgtgacagttttaagaggtggggtctttgggaggtgatgaggttttgatgaagtcacgggggtcagcccacatggggttagtggttttataagtaaagacaccagggagttctctctctctctcaaacagacacagcaagaaggcagcagtctgcacaccaggaggagagtcctcaccacaactcagccctgccacaccctgatcctggactttcagcctccagagctgtgagaaataaatgcctgctgtttcagcagctcagtctatggtattttgttgtggcagcctgggctaagagtgaaaagggacagttccaggcagagggaacaatccctacaaaggctgaaaatgaagacagagatagtaagccacagcgggataaaagatgagggacacactgggatgagaaagtggggctcttagagacccggcctgagtgttggactcagcccctcctgagggcaccagaggccacagaggtgcctgagagaagagctcaaccagatctgcacatgaggaagacggctcaggctgcagtgtggaaactgggtgagaacaggagggaggccgaggcagagccttcagtccagccaggtgggaggtgagacccctggatgaggagtgcggccatcagagggatgtcagggacacatacaaaagctgcttaggaagtagaagagactgactttggtgaaagttggggaggaagaggccagcgtcatgctcagatgtctggcttttgcacttggatggaagaggggtttctaatctctcccgagtggggctgccctccaggctgggtctcccatgtggcagggattctgtcatacatgattggatacagtccccatgacaatggcgtgtgctgcagttactcatctgagaccacacaggcggcgagtgagtgaggcagctgttgtttcaacccacatgtgacctgcccacgtccactctgcaacacccacagggctagacatctcatcagttgcagaatcttcttgccagccattgtcgcacctgctgttcccaagctagtgagcccatgagccctccctgccaacctcctcgtcactaccagctctaaggtggctcactgcccactccttgcaaaaacctctctgacccagtgtgctgaaagttagtgtgagctgcttgaatgcatgtgcttggtgccatttgacaagtaatctcacctgccttgtcctcttgtcatagtgactgtgtcccatctttcctaagaaaattgccagcttcctgagacaggaccataccctttatatccctatacctgctgtgaagactcagactccaagctctcacctcctgctgcttttcaagagaaaacaaggaccatggggccaggtgtagtggctcatgcccgtaatccagcactttgggaggccgaggagggtggatcacctgaggtcaggagttcgaggccggcctggccaacatggtgaaatcccgtctctactaaaaatacaaaaattagccaggcatggtggtgggcgcctgtaatcccagctactctggaggctgagcaggagaatcgcctgaatccgggaggcagaggctgccgtgagccgagattgcgccattacactccaacatgggtgacaagagtggaactctgtctccaaaaaaaaagaaagaagaaagaaaagaaaaggaggaccatgaaaagtggcctttatagtgtccctacccccttaaattcacgtctaccaggaacctcagaatatgactttatttggaaatagtgtctttgcagacataattagttaagatgaggttatattggggtagggcaggcctcagtgcaatggctggtgtccttataagaagggaaaacagagacacagagatatgagagcacatgtggcaacagagacagagattggagtgatgcattcccaagccaagaaacaccaagaattgccagcaagcaccagcagctgggaagggccaaggaagggtcctcccactgagctttcagagggaacgtggccctgtggataccttgatttcagacttcgagtctccagaactgtgagaaaataagcttctgttaaaccaccaagtttatgatgctttgttatggcagccccaggaaatcgaaacacacagacccacagtccagcagtaacgtcttgcacaataaatatttgatgaatgaatgagtatataagatcagagggtgttaataatacatacaaaacaatcagccagccaagattgagatgtactgataactccctcacactggcactgtcctcagacctaaccaaacttgacagacatttaataattccatggcacgcacgcagggaaaaaagtagtcaacaattcttcaattcacaagtaatacagatgatttaagaaggactagattttgtgatcccagttttcagaccacatgattgagttagagaacctgttggaaacagaccaaagatggcacagaaacgaagggcggagtcaggaagcaaatgcgttccactaccccttcccagcgatctccccttaaggccaaggccaaggctgcagcaaagggaactgggagagggtacctagatctctgctgctgggctggatgcccacccctttctctcctctctgcctccaccaccccgggtgctccaggaactgagctggtcacagatgcaagggactgcaccctccaatttcacctgcccctcagatgcaggtgcaacctgcaggggggtcttcccaggagtcactctcgccaagggaggatgctgcccaaagaccctgatgtagggcctctgggtggtagacatcatctggaaggtgggcattgagtatggatattgagtcttgggttcaagttctgattctattaaatgtgcagttgtagtgaggactgagtggattcagtggcatgatgactagagaagggcttcaaagccttgagtgaggggggccatcccgatcacctcactctgcataacgcctcctcactttgcataacacctcctcagaaccattataggatgacaacttccgggtattccaagcgcacctgaaatcaccctgtggagtttggctgggtcatccaaggagaggcagggctcaagaacatgctacagatggattttgttttaaacataactatgtggttatgaaggtctttactggagattaactgggaagaaggtggggtgggcagtaaaggtgggcaccaattcccaagccttcatcacatcctcaggtggtacaggcctggctgactcagaagggctgatgatttggccagagcctcgaggggccgagctgccaggggctccgaggaccaagtgatctttaaatcactgatgctgcctgtaggtgaagcaatctcaggatttgactttttagtgtgtttactgacactatcctttcttcagaaacccaagctggaaatcttgagcctgctctgattcttctttcctgtcccccttttgcatccctttccagctacatgcatctgtgattcgaggcttctcataaaggaaggtccttctcatgtctccacctccttcctcactgcctccaccctcgtcaggtccttatggcctggctctggcctttataagaacctccctgtctccgtctctctccagcccatgtgtgccttgctgtctgatccatctctctgaaacaacaaagcaaccaaagggactcagagcacgggaaggcccctcactgcaccacaggtgcagcttcccctgtcaaggcccctgcagatcactcacgatctgaccccttctgctgcaaacttacagctcggtgctcatggtcaccaactttcctccacctctgcacaaacgctctcctcatagtgtccctgaacattagccaaatcctaagagtccagtccctcttagtcctgagactgccttcatgcccactgatttggtttggctgtgtccccacccaaatctcatcttgaactgtagctcccataattcccatgtgttgtgggagggactcagtgggaggtaactgaatcatgggggtgggtctttcccttgctgttctcgtgatagtgaataagtctcatgaggtctgatggttttataaaggggagttctgcacacactctcttgcctgctgccatgtaagatgtgcctttgctcctccttcacctcctgccatgattgtgaggcctcctcagccatgtggactgtgagtccattaaacctctttttctttataaattacccaatctcaggtatgtctttattagcagtgtgagaacagacgaatacacccacccttctggtctcttagtgtaccatgggcagagcccccaaatctcagagctagaaggaggtggggagatcctcgtgcacaatgcccctgtgggagcacccggagcctggtcaggtgacctctgcccactccctgggcactatcccccacctcgaactgtggttcccaaggaggacagaaccttctgtagggcactgtctgtggcctgtgccttgcacacacccagcaaacaatcaggatctgaagaatgactaacgtgtagtagcagaagtgccatgacatctgttgttccaagaggtacccaggttagctttttcacttctcaactttctacaccatctcatttctcatcttttctgtcaccaaggcaggccagggcatggaggtggctgggacaaggaggagcagggtcctggggtccctgctcaggctttgtccactcatctagcccactcccctcatgctcccctcagtgcagttgctcccaccagaagcatcttcccagtgggacgaagggtctgggaccaggcattcaggagaagcaccggggttttcctggggatcagccaatgaggggaaacccatgccttctcccttccctgatcccagaacacatgacggggtaggggacctgtgtgggctggaatccaggaactgatgtgccaagagcaaattatgaggacagctgatgagcctggcctggagccagcagtacagtcaaaaccacccccagaaccatgctaaccacaggccggctgacagggtagagtggctcagcaaacagctccacttccagtaccctcaagtcaccagggcctggattctgagcccctatcacctttacaattgtgaggtctctttttttcatcatttaaggcatctctctgtgaccctgagaagtggacaaggcaggcactgtcagccccatttcacagccgaggagactcaggcccagaaaggtgctgggactgcccttgctaccgtcctccgagcccccaatggagggtggtgggcggggctgggggcaactccacccacttcccagcagagtccgtgtggaaggagatatgagagcttggctcaccatacaacgtcccagggacctcagcccaggccatgctcctcagccctcagtagaacagaaaggccactttacctgtcactccactcagagatgttccccactttcagcaggtccctactacccagaaaccagagtcccagcattagcctggaatccaaagccccactctgtgacgtcatccctttataaatatttgctgaactggactctctaatagattgtgttttttctcacgaaatcagcccacagacaaatctgctttgcgaacttgttttcatgaatccagagatgtattttttttgtcccagccaggtcactggatggttttgtgacttcagccaatcatctcccctctctggcctcaggatcctcaactacaaaacaaaaagagtggactggatgatttcagatgtattgccactccatccaaatgctgtgattccagaaaacctgcatccttgccaaagagagccatctgaatgtgactttgttcaggtttccccttctgggctgcctcccctctctggttacctttcccctcctgggctgcctcccctctctggttacctttcccctcctgggctccttctcctctgtgatgatctaagttctctgcttctttcaaacccacaggcagatttcaacagacctgattaatgctaaaaatccaaaacagaaaatagaacccccactgcagatattcacaagagaaaaactggagacaaagctcatcaaaaactgtataacaaagtaagagaataaaaaccatttgggtcaagctcaggaataatgtaaataagctcatatttgaaaaaatacacatagttgagtatttgtgacttctcagccaggaaagagcaaagcgtgagagtgtggtgagtgtatgtgtatatgtatgtgcatatatgtgtatgtgtatatgtgttcatatgtatgtatatacatgtgcatgtgtgtgtacatgcacatttgtatgtgcatatgtatacgtatatgtgcaaacgtgtacacatgggtatgtgtgtttatgtctgtatatgtgcaggtatgcgtatatgtgtgtgtgtgtatatttgtgtatgtatgcaggtgtggatgtgtgtgtgtttaaaaaccttaatagaggaactagataaagctagggcagaaaggccactgcagacagcagtatgggaatgcctggaagcttttctagtgacctagcccttgttcaaaagccagggtagagtttggtcctgttaaggctgcatggtaaatacgttcagatataccagcaggaatctttttaataataattaccaggcacctggcaacagagacagggaggcaggaaagaccctagatgcagtggtgataatgagagctggaggcccaagcactgtcgaactgtgaagagccaggagccccagtgcagtgatctgagtgtttgcatcccccccgatttcatatgttgcaacctaatcaccaaggcaatggtatccggaggcagggcctttgagaagtgatgagtcaggagggtgaggcccttgtgaatgggatcagcatccttacaaagaggactccagggagctgccccatccctcccaccaagtgaggacacagcaagaagtcaccaactatcaaccagaaagctggtcccgaacagggcccaactctgctggcccctggattttggactgcccagtcctagaactgtgagcaataaacctctgctgcttataaatgtcccagtctatggcattttgttatggcagcctgaacagatggatacacccatcaagaatccaaagcttaaagacaagaaagcaggactaagatgaaactttcagttcaacagaactgagtgtaaaacttagtttgaggaccaaagaaagactacatggaggatcccaccagaagaaccatggcaaatgagtgacccagggcagtttcagtttgagccaaggagattggacttagaaatgaaagaacccggatgtgaagtgtctggggaggtctgagagggtacattagcaggaggcatggtgacgtctctagcttggaagaggaagggcctggaaagtgcctcaaatacagggaacacgctttcctctcttcactgcttacagctcggaagcaaaatgcttccatcccaacaaccagggtttctggaccaggcagacccaatttagatcttggctttacggcctgccagttgtctaagaaacagtgggaaggctattcagtcttctcatctataaagtgggcaataagacctttttgcaggatgtgaggattcgtggtcttgaatgtctatttgagaattcatgtctacaaaatgcctgcctcattataggtcataattcactgtaattgttatttaatactattagttagttcctgaacactaatccctgctaggggcaagggaggtcaaggaaaagagaagacaggaaaagctaagatcccaggggcatgtgtttggaagaagaaattctacctccttccctcctttgatttctgggatgtgaaggcccaaagtgacccaggaccaggaacccaaactgggtaggggaagcctctgatcgtccagtgtcaagatttaacagttgcttttacgaatattgagtctcagttatgtgcactgcactcttaatgctgggggacacagagacatacagatccaggtggactgtgggtaacagaatgagaaccaggcattgggcttaaaggtcctgatcattgaactgtacacctgaaaagggggtatttcatggcatgtaaattacaccttattaaacctggatcattaccagccatgaggccttgagtaaggcagggacttcctccctgagcctcagttgttttcctgccaaaatcctaccctgccctctacaacatctgccttaaaccacctcatagattctcctcaggtcccattttaaaacaaaacagggtaacaaaagggctgtgtaaactggaaaggatgcagagggccccatcattatactttcactctgataaatgcagaaactcagaagagggagacttcagggagctagaaaggttggggggggttcagtaggatttgggtgggcgaggaggaggaaaaagaggaaaaggaggaaaaggaggaaaaggcagaggaggaagaggaaaaggaggagaaaaagaaggaagacaaagaggagaaggaagaagaggaggagaaggaggaggaagaggagggggagcaggaggaggaagatgaggaggaggaaaaggaagatgaggaggaaaaggaagatgaggaggaaaaggaagatgaggaggaaaaggaggaagatgaggaggataaagaggagcagggaaaggaagaggagaaggaagaaagggtggaggagaaggaggaagaggagaaagaggaggaggaggaggggaaggaaaaggataaggaagaaagggaagaggagagagaagaagaggagaaggaggaggggaagaaggagaaggaggaggggaagaaagaggaggaggaagggaaggaggaggaggaagatgagaaggaggggaaggaggaggaggagaaggaggaggaggaagaggaggaggaggggagaagggaggaggaggagagaagggaggaggaggagagaagggaggaggaggagagaagggaggaggaggagagaagggaggaggaggagagaagggtggaggaggagaaggaagaggaggaggaggagaaggaagaaaaggaggagaaggaagaaggggatgggaagaggaagaaggggatgggaagaggaagaggggaaagaggaggaggagggaatagagaaagaagagaaggaggaggaggaagagacggaggaggaagagaaagaggagaaggaagagaagaggtgaaggaggaggatgaggagggccctgcaggtgcaggagcctctggagcacagctgtcagtggggaaggtgagctgtgcttccagggcagtgacgagatgtgccccactagactggatgcatcacccacagcaagaccatgtatggcccttgagttaaacaattaaatatctcgagaacatcacatgtttctggtttcgtttgaaacagaggcagaccttgtcaacctgggtccaccttccagcctggcaaaaatgggctagacctgccataacccttaacactcccctgacattgcagtctctactccttgacattgctcactggcctctgcagcagttctctctgtgccccctagcatgagaggcagtggatgagaaggcaggcaggacaggataggaaagcaatgggaagcacactagctctgggatcagaaaggccagcatgtaaatgctggtccatcacctcctggccctgcggctgtgggcaagctatggaagcttcccaaatctcagtgtgcttgtcaataaaatagggaaaacatcactcccttggagagccattgttttcaaaagatgcccacatgagatacaactggcacagtaggtaacacatactagatgctcgcaatggtattatttgtgctgatggcagactaaggaatttctaacgaatccagtgggccatggggagccacagtgggctttgagcagggggatgacgtgggagaagtgcatttcatgaaaggtgtttctgatggtgagtgcagcaggaaggaattgggggagggaaggggaccagtttgtcaggagtgaagaaagggagttgggtctcttggttctatcatttgtgggcccacagcacgagtacaatggaggcccatacatttttgcatttttgccattatagttaagattacaaatggactggcattccatagtcccagcactttgggaaaccaaggtgggaggatcacttgaggccagaagttcaagaccagcctaggcaacatagcaagaccttatctctaaaacagtaataatttttaaaaactggccaggtgtagtggctcaagcctgtaatcccagtactttgggaggctgaggcaggaggatcacctgaggtcaggagttcgagaccagcctggccaacatggtgaaactctgtcttctactaaaaatacaaaaattagccaggagtggtggcacacacctgtaatcctagctactcagaagtctgaggcaggagaatcgcttgaacctgggaggtggaggttgcagtgagggagatcatgccactgaactccagcctgagcgacagagcgagactccatctcaaaaaaaaaaaaaccaaaacaaaacaaaacaaaaaaacaaacaaaaaaatgtagtggggcatggcagtgtgcacctgtagtcctaactacttggaaggctaaggcaggaggatcacttaagcccaggagttcaaggctgccatgatcacatcactgccccccagcctgggcaacagagccagaccccaacttgaaaacagaaaacaaaacgacaacaacaaaaacagttacagggcgcctgtagtcccagctacttgggaggctgaggcaggagaatggcgtgaacccgggaggtggagcttgcagtgagctgagatcaagccactacactccagcctgggctacagagcgagactccgtctcaaaaaaacagaaaacaaaaaaacaaaatacaaaacaaacaaacaaacaaaaaacagttacaaatgaaaccagctgatcgttcaatgaaatacgttcttttgcctaaatgagtaagtcttcctaagagcctagaaggccaggttcaagtttggaattctctaactccagatctccaccctgggaatgacactagaggagcccctctctactcccggcctgagccagttgttctgcccccagcctcaagctcttggaggctccagcacacccacgcaagctgaccaccaggctcccattagccacaactggagcaaactctcacatctagaagagtggccactgaatctgctctctacccgagggaggtttacctgggaagagacctgtgcaagccctggatgtgggtacatgccatttgggcagaaaattccagagtcctgtagggcaagacttagagagtatggggctgggaatggcaagtgcacttggggatggggtggggctggggtactcctgggtccttggggaggggcgtgcaggaggaagaccccatcagaaggggccgtgggtggaggcagcaagggcctggcggtacctttcgcgagggagatgttccgcagtgcgatggagtgctcccagtccttgaggcgcaggtcctcggtgaccgcgttgagcatggccagctcctgcttcagctgcagctccatgcctacgtgcgccaggcgcaggcggcgcgtgtcctcgctggcgttgctcaccagcacccgcaggtcctgcagccgcgtgcggtggagggccacgtcgtaggacaggctgtggttgaggccgcgcagcacgccgcccacgtcggccagctcctcgcccaggatgcccaccctgcgcgccagcccgtccagcaggcccgcgtggcgcctcagcagcagctggctactgttgctctccacctgcagctggtagagctccagctgcgccgtgtcgctctgctggcccgtgcggtcccgcagcagggccaccgcctgctcggtctgcaccgcctgcgcctgcagcccccacagcgcgccctccagccgctgcactgcgcccgccagcgccagcaacgagtctgactggttctgcagcgcgtcctgcaccttccacacctgctccgtcaggtccgcttgcagcggagcctgcagcagccgcagctgcaagtcccggaagctctcattcagccggttcacattgcgagtcagggccttcaggtcgtcaggggagctgcgcggcctggacactgcggaggaggaagaggggagacttgagcaccgctggggaggaaggccccgggtgacaagaggcgaacccagtcagagcctggcatgcagtaggtgctcaataaatgatagacgaataaaatcacaggtggtgtgctgagcgctttactagatcccaggtattgtgctaaaccagtggtccccaaacctgcctgcacattagattacctggctaggtgtctcacctgcagaaattgtgattgaattggtatgcggtgttacctgggctttggaatttttagaagatccagaagtaattctaaggtgcagacaagtttgtgagctgctgttctagtgtaactatcataggttaattcagtggacccctaggaaactgccagttgcgaatgttgaaaagcagttgcatatcagcagtttcatgtaggtcagcttaagatgttgggtggtgttatcctctcaactttagagggtgggtacctgctgcaatctgaataagccccccaaaattcgaatgtggaaacttaatcaccaaagtcatagtaaggggggtctttaggaggtgattgagtcacgagggcagagccctcgcgtattagattagcaactttttaaaagaggtttgagggagctgtttgcccttcttgccacctgaggacacatagaaggcaccatccatgagaaacaggccctcaccagacatgaatctgctggcacctttatcttggacttcccagcctccagaaccatgagcaatacatttgttgcttataaattacccagtctacagtattttgttatagcagcctgaacagactaagacagtaccattcttatcccctttcagagctattagcattgcccagggtaaaaatttacagcaagtaaaccttaactaagaatgcttgctccagagcctgggggcttcccctcaagtcagctccaggactgcctaaaggaagagcaccccggcagcagactcagccaggctcaaggccaccgtgtctattttctggcctcctgagttcggggccctttcccttctgctcacgtgctgtgccaacagcctgtctgggtgttctcagagtgttctcacgacttctgataagccacagtgtctcctggagctccaggggcaacatgagaagaaactgacgtgaaattatcaagctttccattctccaacagccctgtctcaatacttgtcacccaatcagagtccatgattggacagacacaatccaatgaagactgcttttatattgatatgctccttctctgcatcttctacttctttgtgttgtttgtttgttgtgttttctgtttttgttttgttttgttttttgagacagagtctcactctgttgctgtcgccaggttggagtgcagtggtgcaatcttggctcactgcaacctctgcctcccaggttcaagtgattctcctgcctcggcctcccaagtagctgggactacaggtgcatgccaccactcccagctaatttttgtattttaatagagatggggtttcaccatgttggccaggatggtctcgatctcttgacctcatgatctgcccgccttggcctcccaaagtgttgggattacaggtgtgagccactgcacccggccctacttcttcttctagatcctctatttcctcttcagcaaaaaacccatcccagtgatcccccaccccttcctcttggagggttcccttttcttggttataagcagctattgcataatactaagaacagtgatgtgtgtcttcatcgttagaatctagcatccttgtatctcctgggaggtcgtggactgttctgactcaggtatgctacaaatcctgagtggggatgtctagggatgctcattgtctgttagttgtgtcctgtccacggctgttccccactctgctctgcataccacagaaagggaaataaggcctggtggtgggataggtaggaggtgggggcagatgaggcacagaacaaattccaccttgaaaatcttggaggtaactggggaacttggtacacagcttgttcaaacaatgagaaaaatcagatggaataagttctcatccagaacttcacattgagaaggagggatataggttgtgagggctctctagccatggaaagatcagctgttacaatctttcagtgatgcttctggaagcacacggcatttgtggtggccaccctggaggagataagtcattccagcttaggctcagaggctcacagggctgaaggggtcttggagccttgcctcgacttctcccccacccagcactttaatctaagaaggtcacattgcaaaagggtcctggcacccctgcttacaccagtctctccatcttcagttagtgctgactgtcagaattttctgtattctgttcagacttagaatttgcctccttgtattcaattaggaaaagaggaagtcaaattgtccctgtttgcagatgacatgattgtatatttagaaaaccccatcatctcagcccaaaatctccttaagctgataagcaacttcagcaaactctcaggatacaaaatcaatgcgcaaaaatcacaagcattcctatacaccaataacagacaaatagaaagccaaatcatgagtatactcccattcacaattgctacaaagagaataaaatacctaggaatccaacttacaagggatgtgaaggacctcttcaaggagaactgcaaaccactgctcaacaaaataaaagaggacacaaacaaatggaagaacattccatgctcgtgaataggaagaatcaatattgtgaaaatggccatactgcccaaggtaatttatagattcaatgccatccccatcaagctaccaatgactttcttcacacaactggaaaaaactactttaaagttcacatggaaccaaaaaagagcccgttttgccaagacaatcctaagcaaaaagaacaaagctggaggcatcatgctacctgacttcaaactacactacaaggctacagtaaccaaaacagcatggtactggtaccaaaacagagatatagaccaatggaacagagcagacgcctcagaaataacaccacacatctacaatcatctgatctttgacaaacctgacaaaaacaagaaatggggaaaggatttcctatttaataaatggtgctgggaaaactggctagccatatgtagaaggctgaaacgggatcccttccttacaccttatacaaaaattaattcaagacagattaaagacttaaatgttacctaaaaccataaaaaccctagaagaaaacctaggcaataccattcaggacataggcatgggcaaggacttcatgactaaaacaccaaaagcaatggcaacaaaagccaaaatagacaaatgggatctgctcagggtgagcacgcaacctacagaatgggagaacatttttgcaatctactcatctgacaaagggctaatatccagaatctacaaagaactcaaacaaatttataagaaaaaaaacaaaccaccccatcaaaaagtgggcaaaggatatgaacagacacttctcaaaagaagacatctatgcagccaacagacaggtgaaaaaatgctcatcatcactggccatcagagaaatgcaaatgagaaccacaatgagatatgatctcatgccagttagaatggcaatcattaaaaagtcaggaaacaacagatgctggagaggatgtggagaaataagaatgcttttacactgttggtgggagtgtaaattagttcaaccatcgtggaagacagtgtggctatccctcaaggatctagaactagaaataccatttgacccagcagtgccattactgggtatacacccaaagattataaatcatgctactataaagaacatgcacatgtatgtttattgcagcaccactcacaatagcaaagacttggaaccaagccaaatgtccatcaatgatagactggattaagaaaatgtggcacatatacaccatggaatactatgcagccataaaaaaggatgagttcatgtcctttgcagggacatggataaagctggaaaccatcattctcagcaaactatcacaaggacagaaaaccaaacactgcatgttctcactcataggtgggaattgaacaaggagatcacttggacacagtgcagggaacatcacacaccggggcctgtcagggggtgggggactgggggagggatagcattaggagatatacctaatgtaaatgatgagttgatgtgtgcagcaaaccaacatggcacatgttgtatcaaacctgcacgttgtgcacatgtaccctagaacttcaagtataataaaaaattaataaataaaataaattaatagaagatgctctcagaggatcacaaacactgccgtataatctagaccttaactatttcctatgggatttatttagtgcagtttgatctcaagtgtgagatggtgagaatcctgagaggtttctttcaggtaagaaaacctgagaggtaagaatctgagaggttctgagaggtttgtgccagatatgcatttagatctcttgggatgtaggctggagctggccacgtattgagacagggctgttggagaataaaaagcctgataatttcatgtcagtctcttctcatgatgtccctggagctccaagaggcaccacagcttatcagaagttgtgagaacagttccagttttggttctcaaactgggatcttgagttctggttttcaaactgggaccttgagtgactaagagtaacagggcaacctcccagactgaagccccagggccgattcaaggacacatctgccgagggccaagaccctgaagtggacaattttcttccttacctctgtcttccccagctctcctagcccctccttccctctgtgggggtccctaagcccagctagtcctctgcaccctgggaggtcccaaggcctgctcatcggctgcctcctcacttaccagctctgggccctgctccctgagcaggaaactggactgaaacttggtccatatggggacggctgacaatcatccaccccttcccagagagttcatttgggtcttttattgctgttcattgcacaacaaatagtcacataaacctaaacaagggaaaattcttccagtgtcccacaacagagcacactggtttcattttgtttttctaactctgttcatatgcatattcaatctttataatttgatttctgggttttttcccacctaatattattattatattgtaatcattttataagcattttttatcctctgttttataattatgattttgatgactgcctataagtccctcaagaggacacatttaatttacccattctcttactgttgaatcctttttttcaatcatggtaaataaacgcagaaaggttcctccccttccctttgaaatttttcctaataataaatttccagaagctggattagtaggtcaaaaggcatggacatttttatgactcttaaaaattccagccgaactacttctcaaaaaaagttatactaatttacatttacattacagattttaaaatgtgccgagttcagtgcaatctcactgcactgagtattacaattttcatgttgtgaatttcacagatataaaatggtaacattatttttatgtgagtctatttgcattttagaagcggccttttcaaggtgatgcatcagctcataggaataagatacttcaggtaccggggctaatcagaacaaaaattatttggggataaatattctttgggcatcaacttgcgtagggcagcctccttttttgggatcatttgcacatcccagaagagaattatgtccttccaacagtcagagcgtgttctctgcttacacaccaccaccacccagcctctttcctcatttaattccttccagatgtttgctgtcctcaacagggaataattcttagttgagtgtgactctcttaattcatgtttatgcaaacagctcatttatctctctgcctggcctactttaaatgtgttttaattattcttcaacttttatactttcacaaatgggaaagcagatcatagaacagtgtaataccaagtggctttccctgagtatgtgccaagcactgttctaagtgcttcccatattaatacacttaatcctattataaccctataagtattgttaggatcctcatagttcaaatgaggaaactgaggcacacagaggttcagtaactcacaaggtctcatggacagtataccgtggtgactgatcatgggctctgcagtttggttccagagtccccagctcttgccccactttgccaaactgctgaaagggtggacacggagaacacacttgtctgtctttctttctctttttcttttctttttttttctttctttctttattgagacagagttttgctttgttgctcaggctggagtggagtggcatgatctcggctcactgcaacctccacctcctgggttcaagcaattctcctacctcagcctcctgagtagttaggactacaggcacccaccaccacacccggctagtttttgtatttttagtagggatggggtttcgccacgttggccaggctgttctcaaactcctgacccacctaggcctcccaaagtgctgggattacaggcgtgagccaccaggcctggccaagaacacactttttaatggtcagagacactcctataaaataagctttgaagggagtgagttcctcatgataaacctaggctggggtcaggctgtgtggcagaaaccatgtagagattcaaattaagactctgactcaatattgattactgaatactaatgaatgttattagcatagtagtgtaataatctatgattaatgtattcatgtctgctgcaggccccggcctgagctaggtggcttgcccctgcacatccactgcgaccttctcatctgcacagcactgcctccccacccacagcccaccccaagcctgctccctcttctctaattgtcctttatgtccatgaaaaaaatggcataaggtcaggatggtccatatgtgatccaaccagataggctgccttcccccaatacatcaggtgtccctacagtgccagctgggtaggtacatgtgtatgggagggaagaaggaagctaagggtcctatttgagatttagtgacctaaaccttgggcactggtgtgaatcataaccctttatctttgcaaagaattctgcatccattgcctcacttaattttcaagctgactaacctgggaggtaggggagcaagtatgctgaatctcatttaaggatgagaaaagagaggctcaggaagtcaggagattgcctgaagaatgaaattggggtgaatttgtgccatctgtcccttaccctgtcctccaaacctactgctgggatggtcagtcacaaggcaaactccaagcaggcggagcaggaaaggagatgacatttattaatcacctactgtatgccaaacttggctatagtctcttattagaagttgcttcctttactcttcccagcacacttacaatgtagaattgttatgcccattttcagatggagaaactcaagaaggtggcagagctcaggcaggctcagaatgctcaatctccaaaagccctgctgcctaccactctcctccctcacacaaaacagcatggagaatctcccctctttctttctaggaagcaatggcagagtgcaaattgccaaatgccctacaatcccatggtatggtcccccccagtcctgcaggcagatagtatcaccgcttcacaggtgaaataacccaaaccacagcaattcagtaactagcttgatatggttttcctgtgtccccacccaaatctcatcttgaattgtatctcccacaatttccatgtgttgtgggaggcacacggtgcaaggtaattgaatcatggggaacggtctttctcgtgcttttctcatgacagtgaataagtctcacgagatctgatggttttataaaggggagtttccctgcacaacttctcttgtctgctgccatgtgagacgtgcctttcaccttctgccatgattgtgaagcctccccagccatgtggaactgtgagtctattaaacttctttttttttttttgagacggagtttcattcttgttgcccaggctggagtgcaatggcgcgatctcggctcacagcaacctccgcctcctgggttcaagccattatcctgcctcagcctccggagtagctgggattacaggcatgcgccaccatgcccggctaattttgtatttttagtagagacagggtttctccatgttggtcaggctggtctcgaactccggacctcaggtgatccgcccccctcggccacccaaagtgctgggattacaggcgtgagccaccgcgcccagcctaaacttctttcttttgtaaattgcccagtcttgggtatgtctttacgtgcagcgtgaaaatggactaatacatagctcaaggccaccctgctagtaggaagcagctccaagcccatgtctcttctcttgccctgtgttcaagtcctgccttctctttaggctaatgacacggaaagaaggaaggaaggtgagtatcagacttcacagagcatcacatctagggcagagtgtcagaagggatgggacggaacgccactgcacagcaagcatatcaatacaagtgccgagaaaaagggaggggccttccttcaggtggcaggcaaaactgggttgcatttactgaggtctggattcatgtgactttaatggaaaattcatttaaaagcagaacataatattcattcagaatctgcaagaaagaagttatcagtagagctctagcacttcaagtgctgtgcacaggaaacaattagggtttccctgaccctgggatgcaggagaaaaccagggcctgcactcagggtgtgtgaccagtgcagtcacacggggccccatgctgggggtttaattctctgctgtcgctcttctgaaactggtgatgaatttatctctgaatttgtgttttctcagggaagtcctaaggcacaatgaagcctgtgctggggatgtggacccctggcttaggtgcagtcccacctcccaccaccccctcgccaccccagaatggggtccagccacccagtgcctcacccctcctctctatccccagtggcaatggtcagggtcaggcctggtatgtgtgatgagtcataggatagggctctaggcacctataagtatcttgactctgactcatgagtgtccctgtacctgagaaagaacaacagtgactggttgaaagagaccatggcagcaaggaaacagcttttttcctgctttttggacaaagaaccttgcatttttatttatttatttattttacacagagtctcgctctgtcacccaggcagtgcaggggtgcgatctcagctcactgcaacctctgcctcccaggttcaagcaattctactgcctccagagtagctgggactacatgcacacgccaccacgcctggctaatttttgtattttcagtagagacgcgttccaccatgttggctaggctggtcttgaacttctaaccttaagtgatccactcgcctcggcctcccaaagtgctgggattacaggtgtgagccaccgcacccggccaaagaaccgtgcatttttaattcttttatttttattttattttacgatggactctcactctgtcacccaggctggagtgcagtggcgtcatctcggctcactgcaacctcaacttttctgggctcaagagatcctcctacctcagactgcttagtagctgggactacaggcgtgcaccaccacacccagctaaattttgcattttgtgtagagatggggtttcaccatattgctcaggcttgtcttgaactcctagactcaagcaatctgcccaccttgtcctcccaaagtcctgagattacaggtatgagccaccatgcccagcctgagaaccttgcatttttgctgtgcatggagccctgcaaattacgaagctggtcctgataaaaaactaactactgtcgatcttctgtgactcagatagcaactctgaataagcaaataagcaattccagggggaccctgtattagtcctctccggctgctgtaataggataccacagaccgggtggcttaaacaacaaacgtttatggttttgcagttacagaggctagaagtctgagatcaaggtgccaccaggctggtgtctcctgaggcctctcctcctggctcgcaggacaccttcttgctgtatcctcccataacctttcctcttggtgtcccttctgattctttcattttctttttttaagacatggagtttcgctcttgttgcccaggctggagggcaatggcgcaatctcggctcactgcaacctccgcctcctgggttcaagtgattctcctgcctcagcctccccagtagctgggattacaggcacctgccaccatagccggctaatttttttgtatttttagtagagacagggtttcatcatattggccagggtgggctcgaactcctgacctcagatgatccgcccatctcggcctcccaaaatgctgggattacaggcgtcagccacggcgcttggccgtcccttctgattcttataaggacagcagtcctatgggatcagggccctcccttatgacctactttaaccttagaaacctccttaaaggccctgcctccaaatacagtcacattgggggttagggattcaacatgtgaattttagtgggatacagttcagcccatagcagggtcctttaacatccctggttagcaggatgggttcctgctgccctcttgggctgcaggcgttgatttttaggactagcagatgtaatctactctttcaaaatattagacagtgacaagtggttagaacagggcagattcagctgggcacagtggctcacgcctgtaatcctagcactttaggaggctgaggcgggtgaaccacctaaggtcaggagttcgagaccagcctgactaacattgtgaagccccgcctctacaaaaaatacaaaagttagccagctgtggtggcgcacacctgtggtcccagctactcaggaggctgaggcaggagaattgcttgaacttgggaggtagaggttgcagtgagccaagatcatgccactgcacagcagcctgggtgacagagtgagactccatcttaaaaaaaaaaaaaaaagagacaacagggcagattcatgagattcatgtggtgagtgcactgtggggcccattttaaaatctataacataaatataaacttatataacttttttggaaagtaatttggctgaaatatttaagtcataaaatgtccatgttttttgacctaattcaggttctggaaatttattattaggaaaattttcaaaacaggggaaacctttctctgtttatttatcatgattgaaaaaagactgaggagcaagagaatgggtaaattaaatgtgtccccttgagggactcttaggcagtcatcaaaatcataattataaaagacagggagaagttgggaaaatgcttatgaaatagtaagtaggggaaaaaacccagaaattgaattgtaagaattgggtatgcatacggatggagctagcaaaagaaaatgaaaaaggaagctagtatgctctgttgtgggatggtggaagaattttctcatttcatttggatttatgtgaatattggttgtgtaataaacagcaataaaatgaactctctgggaaagggcagctgattgtcagctgtccccatatggaaccaaatttcggtccagtttcctgcacaggaagcagggcttagagctggtaggtgctgagaaggcagctgatgggcaggcctggggacctcccagggtgcagaggaccagctggggatagggatgcctgcagaagaaaggaagggctaggagagctaggaagacagaggcaaggaagaaaattgcccacttcagggtcttgttcccaggcaaatgcggccttgaatcagccctgggatttcgacctgggaggtcgcactgtttcacttaagctcccagtttgaaaaccagaacttataaaactcagagtgttctcacaacttctgataagctgtggtgtctcttggagctccaggggcatcatgagaagagattacaggaaattatcaggctttccattctccagcagccctgtctcaatacttgtcacccaatcggggtccatgattggacagacacactggttctagaatcagatcctggctgatgatgatttctccagtgggcaattcctgtggttacctgggctgtgactgggtcatggattcatctcccccagagctcttccttgcattaaccactcttcagttaatcttccagagtggagcagtggcatgaacccctggagcagggggcaggaggcatggcattaggaaggtcacttatactcctctggcctcagtcttttcatctccaaaatgggagagatattcagtttaccaaagactgcataggcccaagccaatggctaaagtctgcaaagtcctgatgaagctgcccagggcccagtttgggccatcttactagaagtctcacggccagcatgaaggaggtgacccttccatcatactttgtccagtctgttcacaccttggaaaacttcattttgatcaagtaccacctcttaagggaatgttgacaactggagtctgtactgacagattgtcagcagcctccagaagctagctaggatgcaggaaatcgattctccctgaacctccagaagcaaccaaggctgctgatatccaagttctgatttctagcattctgacccgggagacagtacaattctattgttttaagctgtctcattggtggtaatttgttaggcagcctcgggaaactaaaacaggtatccaaagcttggcagtttctcttgactcaaggaacaggcctgggcaggagaccagtgtcattaaagaagaggtcacagcatcgcaacccaggctgcttagtggagatggagaaatggccaacaggggggttagcaagacaagagaatggggtctcaatgggtggttggagcacaagagtcttgagccaggtaggtgtcacccataaagaccatctgtggagtgagaacatccagcctctagtctggagtctgggagcaggtctctagggtctaggctcccagagaagagctgctaagagcaagcagggtgacagcaccaaagcagaaaagtcaatcctggggccagaggcacaaaggaatgggaaggctgagacccagggagcgggagagggctcaggatctcagcactgcccagccaggccagaggacccgggagcactcccagatccctgggccaacaatgacacgtctggattctaggaccaggctgttggccccacccattcccagcagatagggggagagcagggtaagtgggtcattcaaacaaatactgcctgctctgggctgcgtggagccatggggaagggccaaggcaggagaagtgaagaccgaggaaggggaggtcctggggacattcattagtacccagggaggagggcagcacattggtaatttttcgataagccctttttatttttcctttttaaagaaccacatgccctggttcctagctcagcaggaaacataagataaatatttacaggctgcaggctgacttctcccagatgcctatgccccgccagcccctgcccagaattaggaggagcccagagctttcagctgtagcttggagcggcaggagacccctttgagaaagaaccagagagactttccttctctgcacaggtgacccatgatgttcaatgcaagtgccatctggagactcatccgctgggggctctagggcaacatggttgcctacataggtatggtatcctgaatgcctccctgagctggccctggtcacttcagagaccagtaggacaaggagagtggccaattctaggtcttacaggcagggtccaacaaacaaagcaaaggatgaagcaggcagatcacttgaggtcaggagtttgagaccagcctggtcaatatggcgaaaacccatctctactaaaaatacaaaaattagccaggcgtggtggcacatgcctgtaattccagctattcgggaggctgaggcaggagaatcgcttgaacccgggaggcagaggttgcagtgagccgagatcacaccactgcactccagcctgggtgagagagaaagactgtgtctccattaaaaaaaaaaaaaaaaaaaggtggggatgcttcacccactggaatggtggattggctgcaacccagatgcccatcatctgcaaataaaccctgtctctggcacactggtgagcactaactgaatccgcggaagcatggaacacacaccgtgcagtggccagctgatggtcacggatttccatattaggatggcctgtcagaacttaaaaggaagaaaaaacccaccaatgtatttattactgtgcccagaggcggggctggctactttgtgccctggccctagcattccctattggtggtctaggcagagtctgtgacaccttactgctgtttactgtgcaaatgggatccaagatgaattctaaatcaaaagcctcctattgagaatattcccggattcccattttggaggctagagtgtctgaaatcattaccagcactgccagaaaaccaagagttttaatgaaactcagtctttgcaaatttataagtagcattcgagacttgctcttttgagtaacatagcagctaacacagaaccttgcacctggtaggtgatcagtagatagtagtgaaatactgtagtagtataaagtgaatggttgcaaaggaaaaaccaagttccaggaggtgtaacccggcagggctcaccccagctatacctccaacctcctgcttcctgcccctagcacgtgtgggacttctcagaatcctgggaccaacctgggactcacctatgcatgaccttcaccctctgggaagtcccgatccccggggacaggagtgggcaggtaagcgctctccccagacaactcaggcccctgctgcacagctcctgggtcctgggggcatgaggccccagttgccacagtggggaccaactccaggacacatgctggcatttgcttttcctccttcctgatttcactctctctaagtccctgactcctgctgctcaggaccccttctcaccaagaacttccaaggccctggctccggctctgatttccatagaaatcccaggccgccatcacaaaataccacagactgggtggcttccgctacagacttttatgttctcacagttctggaggctggcagtctgagctccaggggttggcagggctggcttctcctgaggcctctctccttggctcgtagatggctgccttctctcttgccctcccacagtgcttcctctgtgcaaacacatccctggcattttcctgtgtgtccttatctcctcttcctataaggacactggtcatatcggatcagggctcaccctaatggcctcattttcacttagtcacctctttaaagttcctatctccaaatacagtcacatgctgaggcacggggtggggatagggcttccacgtgtggatttggaggagacacaattcagtccataactagcggttagggagggctcttcctaaagatgaactggaaagaagttggggtgggcagtaacggcgggtgcccatttccaagctgtggtcttgtcattaggcgatactgtcccagcccactcagaagagcctacaatgagcccaggccatggggtgcttctagaaccaagcgcttcctcaaatcactgatgccacccttggctaacacacgtgcagggtctgatgattcagtttagaaacttaaaatgtcctgtggggcacagcaatgtgaatatacttatcacttctgaactgtgtacttaaaaatgtttgaaggtgaatttattggtgtgggattgtaactataataaaaaaaaatcttgtggggaatcttctccatactttcatggggtttgttggtgttttcttgcagttatttctagaaaggggccctcaaagactcactaatcaaatatgtctgtgaagaaataaaaccctatctgacaaatttagactgtgttctcaaacctcacatgcctgtttagagataaatgacttgccctgtagtcgatgttcactgactttcccagacccctttctttgcatttaagggaaaatcctcatcgacaggcaatgcaggaaagcctctgcctacaatgaatcagtacacggagagagatgggcgtgaggctgctcttctacagcccagagttgaccttatctccagcagtttttaatctatgtgaaaattaaagaggaaaaaaatccagcttgctggatttcactttgtacacacccttttatataaatgtagcacccacccatcgtaaactagtaactcctttctggaacctcatttcatcactgagccagcaaactgaccatttatatatatatatttcttaaacacgaataagtggtctaaactttatgaagaaaaaacatgagatcatttcaatacttcttgcagagatattctctgtttatggaataagtgggtcctgcctgattaacggtggagggggctttcattcattcagcacctactgattgtcaggcactatgttggccactttataccatacacagaatatctgacacatgtatgaatttttaaagttttatagtagtcttcagagacagatgttgtggagaaacttagggttttggatctgcaggcaagatacttgcatcaacttgaacattaaatgtatatgacagggactttttgcactccaccaccccaaacaccatgccccttctccctgctcatgaatggctgggccccgtggtcagggatattgggacattaacttgcaggctctaaagagatgaccagtgcaagtggctgggtcagagctgggggctgtgttcacgtggtgtggacaacctggctgtcagtccagcatcattgtttcaacctccaggtcaatgagtgagctctgacttttgcatgtcccccaccatggactcttgtccttgctcttccaggccacagatgtgtactgccagtctcagcaggaattagaccagagagtagcaatgtcaggcctgtaagagaccctggcaaccactgtgatgcccctccatattttataggtaaggaaacaagaagcctcttgtcctgggtcacgcagctagacagagatacagatgagatgactaacccaatggcccatccacctaactggatggaagaagaaaggaagctaatattcgtgggagtctactcagtgccaggcaatgggctggggactgcatgtattatgtttcatgggatcctctgaggttgctattcatatgtccagttttacagatgaagcttagagagatcaggtggcttactcaagataacactgctagtgaatgttaaatccagaattggagccccagactatctgcctctttctactccaccacaatctgtccctcttgccctagcaagagactccctaggttgcgttagaggcccctcctgtatttttctccagtctgcctcctggccacagtcccatgaggctgtaatctgaaatcagtgagggcggcaagcatgtttctctgcttctatctttctggacaatttgttccataagtgcttgttttcaaacagctcaccatcattcccccaggggctccacatagctttcggttggagcagcataagctctccccactggtgattttctcaaattcgtctttcttcacttgttgagccggtcataaagtattttaaggaggctggaaattattctcacgagtaagcatgtgagaaatctgagtcccacttgccaggaatctaggcctttattgggtttcctctctcagaacataaggtttggagcccaagtgtcaaatttctcacgtcactgttctttaaaaggtggactcacagtgcagtaagatcgtggacactttgagccaaaagtgaccttaataataatttacttaccattttcatgtgaggaaacaaaggctggaaaatgtgatgtgaaatgtctcagatcacctagattattggtgatgaaatcagggcttgtatgcatatttctcaaaacccagttcacatctttttctactatatctactctgctgtataggaagtcagaattaggtacccactcacccacccatccattcatccatccacccacccacccacccatccatttgtccatccatccatttgtccacccatctgtccatctatccacccacccaaccatctgcccatccacccacccacccatctgcccatccacccacccaaccatctgtccatccatccatccatccatccatccatccatccatccatccaaatcatcactgaccataatgcaaaaggcatttcacccaaacagggagggttttcccaattaaaaacactaacactgagagcaagagttactttgaaagattaattgggcctagagtattttgcattattagattggttggatatcttcaggattgcaaaaatatttaatcttacaaaacactcctatgaaattttgctagtgacaatcatcaatcacaatatgattttatggggattcagagtcttttctacaaaagagaaaaattctgatgataacttttaacatcatatagttaaaaaaaaaacccacaatacgtcttatatttaccatgtttcaaaagctggcagctttgtgtgaagtgtagatgatatagaggaagcagattttataattcagaatagattctaaatagaatggaatcaatttagatttagaatagactctgagaattggttgggtccttagacacagttagttagattagaaagaaaggaatgttgaccttggagtccagaggcctgggtttgagtcctgaccactacccgctatgctgatacatactcttggacatgggaatttgtctttctgagtctctcacttttgaccttaaaatggaattaataacgtctacctcatggggttgtgtgaggactcaagaaaagaatgaactctaattgagcacttactacaggcccagcactgtgctttgtgttatgcagatattatctcatttgagaaaatcaaatagatgggaagaaaaccccacatatactgcaaagtcctattcaaattcaaactctcggtgttgttattaacatcctttccatgcacaccctgcacctccccttcctacactcattctcagatttgtaggcattaatatttatagaggaactccaaacagatgtatagagctttacatttcacaaagcactgctgtggacatcatctcattttgtactcttgaccaacatttaatccccatttacatcatcattattattattattattattattattattattattattattttgaggcagaatcttactctgtcacccaggctggagggcagtgatgtgatctcggctcactgcaacctctgcctcccggattcaagtgattctcctgcctcagcctcctgagtagctgggattacaggcgtgcaccttcacactctgctaatttttttgtatttttagaagagacagggttttgccatgttgcccaggctggtcttgaactcctgaccccaggtgatctacccacctcggcctcccatagtgccaggattacaggtgtgagccactgcgcccagcccccattcacatgagatgaagagctgaggccagcaagaaatagcttttccaccattagccagtgacagccaggcctcgagactgagtcttgcagccccaagtcagagtatgttccacgtgcctttatcccacctcctccctatgattgtgactttctggctgctggaacgcacagcttttcaccctcttcacgatggtggcccccactactgctctccctagaactaggtagttgcttgatactttccaaagagatccagaacgctgttctctcactttccaaccaccaccaccaagcctgccagctctctcactgttaggaaagctgcccattgcttcaactggcaggttgatcccagccccttgaccttctccacctgccctcctctggccatgcccggatcactgccatgcctggatccagagctgccttccgatgccccggcctctgggagagtttatcaacttttgtatacatcagtggtgaactctgagcacctgcgtccacttccttccccactttaactctcgggctgcacggtactgcagaagtgttacgctgacttggccctttcttgtgctgcttgaacatcctggagttgggctgccttgagtgggttggagggctggaaaaaaaaatgccctttgctgctatctcaaagcatcttcatgcttcttaatgctgaagcctgctttgcctctctcattcttggaagtaactatatccactttaccaagaacatgaaagccatttagcaagaacaccatctcctctgcatcatttagcatgaatgccacctcctctgcacctcaccatagttctgcaaacacactgcttcttctcagatgagagtaagaagcatccctcttcctgctcaaggtgacctgcaccctctgtgttccattctgttccctgctggctccttgataggaagccagtggtgggagaggtgcagtcctgtgatgccttgaaggagccatccaacatagaagcaccaagaggttggaagggtggggtgtgttaggaggttgcatcctaactaatgagggtaccccacaagatagccctctaaatatttgaagatggatcccctttccttaaggtttcctttgccaacatggcaaaaccctgtctctactaaaaatacaaaaagcttgtgtttttacaaaccaggcatggtggtgtgagcctgtagtcctagctattccggaggctgaggtgggaggatcacctgagcctgggaaatggaggctgcagtgagcactgcactccagcctgggtgacgggagtgagactctgactaaaaataattataaagtccctttattgccaaagtcattctttcctgaatgtgttttagcttaaatgcatccagcggtatgctgataaatgtttaacaactggttctccaaggggttggggagaagcctaagctgtggtgcttgccaatgtttgaggtgtaaatatcccactatgaccgacttcaagctaccaacatgacatcattgactacggagttaggaaaagacgcacgtaatcagagctgaccagcacaccactgtctgcagccaccttacattgcagcggtcagagaggaaaacagcaatgaagagggttagaaaagccacatttgatgaccacctttgtaataactgactcgggcaagaattgtaagtggatgctaaaatcatggagtgaaggattgctggcaatcagtgtatttacacagcctcagagtgtctccccacagatcacttcttaatcagagggaataaaagatagctttacagtagattattctgaccaaatttaccttaaccaaatttaccattaccagtacaggaacaaattgacacaatccacctcctcaaatgacttagaaagtgttactgccaagaaggtttaacctacgtcaatcatgggaaaacaattaaacaaacccaagttaaaggacaggatagcaagcaactggcctgcattctttaaaatgtccatgtcatgaaatacagtgaaaggcaaggaacccatctagaaaagactatggagccatgaaaaccacatgtatattctggattggatcctgcatcaggagttttaaaaatggttataaaggacattcttggagcaacggaagaaaattaaatatggatatactgtatttataatcagcattagatttcttgaattcagtaattgtatagtggtgatataagacaatgtccttgttcttgtaaatacacactaacatatttaggggtgaagtttgcaactcactgtcaaatggttccacaaaaattaaaaatggtaataacaaacgtggggcgagaagagagagcaggtacacgcaaatggcataaaatgttaacaatattaaaatgaagggtatatagcactctttatagcttccaacttctctgtaggtttaacattttttaaaaaataaaaaattaagaccaggcatggtggctcatgcctgtaatcctagcactttgggaggccaaggtggatggatcacctgaggtcaggagtttgagaccagcctggccaacatggtgaaactccattttgtaaaaatagaaaaaaaaaaaaaaagtagctgggcatggtggcagttgcctgcaatcccagatacttgggaggctgaggtgggagaatcatttgaacctgggaggcagaggttgcagtgagccgagatcacgccactgcactcgtctgggcgacagagcgagagcctgtctcaaaaaaaaataattgaggtcaggcgctgtgactcatgcttgtaatcccagtactctgggaaactgaggcaggtggatgacttgaacccaggagctcaagaccagcctgggcaacatggcaaaaccatctctactaaaaatacaaaaaattagccaggtgtggtggtataggcctgtagtgccagctactcaggaggctgaggtaggaggatcatctgagttcaggaagaagaggctgcagtgagctgtgattgtgcccactgcactccagcctgggtgatgggaatgagactgtaaaaaaataataataaattgaaaaaaaaaaaaggaaacactgaggagttgtctaacctgcatggagccaaataatactggtgcctcccttattctctatgaacgtaactttgatcacgatagcttttggtggcaggcatgtcacacactgactcatagactgcatcctgccaaactcaaaccctcaaccttgctttaaaaactgatgtcaagccgtggcttccccatttgtggggcactacttcatgtgtgtccatattaattgaccaggtctaagctatctctctgggtttcagccttattttgggttctgattccgcattcctttaaattgagtgctgatctctgtgaaccacaaagacaacaaacatgtcatccgggatttaactacataaagatttatgaagcatacaggttgtgcaaagcagcaggttgggtacaaagaaatcaacaacaagtaaataagatgtgagtgtcaatcatagccttctggaagataagaaccaggtcttatacttccttggtccccctatagcaccccatggtagtgagtatgtattagacactttataaatgcctgatttgacctcacatagtaaccaggcaaaaggcttaaacagccagtctccttaagagatgacacaatgaataatcaaatgtatggaaagcttgatgagattattagctatcaaagaaatgcaaattttaaaaaaggaaatctctaaaagtaatggaacagtgctacatcatgctggcaagaccgtggtgaacgctagtgtgtttaaacattgctgatgactgtgcaaatatttttggaaggcaatttggcaaaaagtatcaatagccataaaaatgttcacatcctttgcaaaatagtctctctcctgggaatttaagaagtaacccaaaagaagggaaatgctacagcagtgagaaatttatcactctcttatttgtagcagtgaaaacctagagaagtcgtggatgagcaattaggaacaattaaatcatggtacattaaccagatgaactttaatgaagctctaaaaatgacaaccatgaagtctgccatgtaacaatgtgggacatgcatacgctatcacaggaagcaagcacatacacacaaaggattaaaagaaaaccaggattcgtgaaaacaactgactttagaggagtggaattatgagtgcagccttcttctctgaagggattggctccaggatcccccacagaaaatcctcagatgctcaggtcccttcattggacctcctgtatttgctggtttcacattctcaaattcaatcaaccacggatagagagaggactcaaaggaaaccagccctgttagcaccttgatcttggacttgcagccttcctgagagaaagtaactacatctattgtttaagccatgcaggctgcggtattttgttatggcagcctcagcaaactaatacagactgtaagagacaacccagccagccagggctaatttggctctatctaagggtaggaccaggagccccaggcacagtggattatgggtcattgtaggcaccaccaagtgtgcccagggccagagagaatctgacgaggcctcctttgccctcttcatcccagtgagtggaatgcccccctttctgatttaggaaggggtgggccttgggcatctgcatttcaaataacaacccacccctccctgatttctgttttagcaaactcgttgaactgagatcctgcagaatgactgaattcatgatccccttagcttttgttttttttcactgttctccttcagtttcttctgtctctcctagcgaacagagatcccaggtggtcagaatatcctgttgggctttttttttttttttgagagggagtctcgctctgtcacccaggctggagtgcagtagtgtggctttggatcactgcaacctctgcctcccaagttcaagtgattctcctacttcagtctcccgaggagctgggactataggtatgcactaccacgtccggctaccttttgtatttttagtagagacagggtttcgccgtgttggccaggctggtctcgaactcctgacctcaggtgatccacctgccttgggctcccaaagtgctgggattacaggcatgagcgactgcacccagcctctgttggacttccaagggcaaattggcttaaaaatccaaagggcaagagattctgcttctgggtacaagcccaaaagaattgaaagcaagggcttgaacagatacctgaacacccatgttcatagcagtattattcacagcagccgaaagatgggagcaacccaaatgtccactgacagatggatggataagcagaatgtggtctagccaagcaatgaaatagtatttagccttacaaaggaaggaaattctgacccctgcttcaacctggatgaactttgagaacattacgctaagtgaaataaaccagtcataaaggctcacgcctgtaatcccagcactttgggaggcccaagtccgagaccagcctgaacatggcgaaaccgtgtctctactaaaaaaaaaaaaaaaaaaaagtcaggcatggtggcacatgcctgtgatcccagctacttgggagactgaggcaggagaattgcttgaacccgggaggcagaggttgcagtgagctgagatcacgccactgtactccagtctaggtgacagagtgaaaagataaaataaaaacatgatagacaaacactgtctgattccactgatatgaggtccccaagagaagacaaatccatagagacagaaagtagaatgggggttgccaggggctgggggaatgaggagttcaggtctagtggatgcagtttcagcttggagatatgaagagttctgctagtgggtggtggcgatggttgcacggcaatgtaaacatgcttaatgtcactgacccttacacttaaaaatggttaaaatgataaatattatgttctgtgtatttcaccagaataaagaaaattctaaaaggtaactgaggaggggagctgggtggggtcgggggtggaggacagatttggcctcgggctgggttgcaggcctcctccccagggtgagggcggtgacttaggggagggtctggctgctccaggcaagcaattactcagactcagccttggccacacccaaggccacaagatatatgggccctctgggagggaggcagggaggccccagctcagctttcacaactgaagtctcaggacctggctgggagccacgagctggagccttccttccccttcccctatcttctcttccatcaaatacaaaggcggcagggcctggggctgggccgttccaccggcaggtcaggaccgccaggccagcctttctgtccactgggccgaagggtgtggcccggttccatgtgtttgggatttgagcagctaggggcctggagagctcttcaaactggccagtcccacggggcttggtgggtaacattccccagtccctctccaaggaagaaaaacaaacagctgagcgcaggaagcctagctgtgggactcgctccaagactgaaaggggaggaaaaaacgattccagccccaaacgcctagttaaattgaaagcaatggactacagacgggaatgggcacttttccataagccccagccttatcaaggaaatttaaaaatccatccttgagagttcatgcgttttgctttgtaatttgcaatgtggtgttatggccgtttgtgtatatcgatgtgcatagtttatattgcaaaagcagatattataaaaacccacatggccaggctgaatgaacgaagcacaagcgggtggagcccacaattggcttggtgctagtattctttgtgggaagccaccctccttgtccctcacttcggggtgcctcagtttccctatctacttcttgctcagaggctggtggtgtggtggacagaacagtgagcttcaggggacctgaggcccaggcctgtcttgatcacacatgagcagagcccacgtggctcagagcttggctttccagctaatctgtatttcctcagtagaagccaggtggcaatcacaggggaacagcagggattagtgagacggagctcttgaccaggaaaccagagtcagcccagctttgaccttaaccaccagtgccctttaaatttaatcagcaactatttattttctcctatgagaactatcaacctcgttggacctcagtcttctcatctgtgaatggggataatagtgtctccctcagagcagtgggtgaggctcaagtaacctattggatgggaaatatgattattactgtaaccgtaagggtggagttgggtgaggttggcagctaccatgtgggagcatgggggtctttgggacactatggattgagtagctcaggaatcaggccactgttgccgcataactcagcctggaagcagggcaggcagatcggagagcagcagcagtgcctgactcacctcctgtcctccttccaccccaaccgcatcccatcaagagggcttttccccgtggaaactcacgcccacggtacccggagctggatgggaaaagcccctgcctggcagtgtctcaggtctgagtcctcccctacagcctgcccgggtgcagaaggggccagggacatgggtctggctcctgaagaggccctgcaggttgcagtggggtgggacctgaggggagccactgcccatccacagaaagaagggctgttgcagaaagttctggagctggactaagctggccttgctgatggtgctgctaagcatgaacaagcaggctggccttgggcaggtccaccagggcctgagcagagacctagggaggctcagtaatgtggccagcccaccgtggctccttgtggtgagaaaggggctgagagcctggaaacgctgggggaatgccacccactggccacctgggagtgagtccttgcagccagggcaggtgcagagccaccaaggaggggaaggggtctagcacatcctcctgccaactgcatgccagccccaggggctgaggcagggacacccacacgctctttgccattaaaccacctatgtctgcactttgacgcgagccagacctgggggttgccaggaatatgcacgactacctggaacctggtccagatccctgccttgtaaggagacccccaccccacacacacccccaatcccatcctcgagcagaccctttccacacaggcctcatgcccgtgcttggggggcatcccagcctgcacggccaactctaatccccacctaatgccggcaagcaaccctccctttgtcaccctctggccagcaccgtggtttccctctcccagaacagcccaaaggacctggaagaaagctgaggctttggggaagggaattccagtcccaggtccccagagcatgacccagaaggagggacatgtgagctccaggtgccatgttctcttagccctcaggatgcctcaccttgtgggttgggaagcggccagagggacagagtggggccctctaacacatggggactagggcaggtgccttggtctcaggaacctgagacacttagcaatgcctcggaatccagtgccagcactttccttgagcgtatattaacagacagcacctctgtacccattcaaccgatcggaacgagctctgtgacaaaactcctatttcagcactcagctttatgggaaaaaaaaaaaaaggtcagtgtggactaagccatttattccacagacctcaccaataactgctgttatagtaccatacacagggactcaccccttctcaagaggaatggtgggtgcttaatacatcatctcatctaagggtctccacgttactcagaggatggccttaggatccccactttacagataagaaaactggtgctcaaagaggtttagaaatttgcccaaactcatggaatttttaaaaagagcagaatgggtttgaaatgcaagtccatgtaattctaaaatttaggctagtgaatgatacagagggattcatatatgtgcccccagaaaggtcacagtttagtgtggagtcagacacagaaaaccggtatcaatgcctgagcaggacaagagctgtgctgagtggagcaggagggcagtgtgggagccggagctgtggtcactcccaaggtccaaaaactgatcggcgccaatggagctctgaaggtccagcccagaaattctcaacccagagcccccaacagaacctttaaagagccccaaagtagacatgggttttcttggtgaccaacgaatgactggtgaccattgatgtgtcaagtggtcaggcccccgaggctcacaggggcaaggccccctgcccaaggtcacacagcttgtggcagtgccagggtcaggagacccgaggctggacctccggtgcagaggcccgtcccgtcctgcacggtgccatcagcgactgcccatggccacacggtaaggcagaaggcaagtgtgctccacgccagggaatgtgcctcctgtacccagaggaggaaggaaaatccttcctcttcctcatgcaggggaggttccctgagacaaggctggagaagaggaggtccggaatcccttcttcctttcaacatttttcacggggaatgacttcgagcgaactcgaacacaccagagaattccagtcccaggtcctcagagcatgacccagaaggagggacatgtgagctccaggtgacatgctctcttagccctgagtgcacagggtgttgcttagagcaggtcacttttgcaggatagtgtcccctgcaaactcatgtccacccagaacctatttggaaataaactcttggtaggtgtaatcaaactaagatgaggttgtattgggttggggaccaatatgattagtgtccttagaagaagagggagatctggacacagaaacagacatgtagggaagaaggttgggtgtcgatgggagcgcagattttagcaatgagcctacaagccaagaaacaaaggggtggctggcacccccagaagctggaagaggtaaagaaggatcctttcccacagcctctagagggagtgcagcctttgctcgtgccttttttggacttccatcctccgagctgtgagaaaataaattgttatttaaagccacccggtttgaggtactttgagcagtcctaggagatggacacagctgggtggttgttttctgaccatctggcagttggagatcaagggttggggtggagatcccagtctttatggaccaagtccttgcacagggagtggtcagggggctttctgccttcgttgccatcacccaggggacacaggctgcagaccctgcagagctacttcccttagccctgtactcttcactcctcacagccagcaagaccttcctgtgggcctgagagtgacaagccatgcagagaggcagaataatgaaaaatcctatcattccctgcaaattggtgcagtctttctattaagccttaaacatatacccactttgacagcaataccccaagtagggacctatcctaaggaaattattggccgtatggacaatggactgtgtgcaagcattatttattgtagcgaaacactgtgagacagagtggatttttttcccactctctcttcaccccttttctagtcgtaacacatacccagttccttttggaaccaagcacaggccaagccaggataacagaagggagccttttgtcaaaagtcagaaagagaaagagaggcaggaactcttttttagcacaagagtgaacagggtattgcttagagcagatcacttttgcaggataaatgtcagatgcatgtggatgtcagaccctgaagcagagccagagaggcctgccctgcatcctttctctcttcctacagcccaatccagacggaaagcagatggcccaaaggccgacaaccggggccaaaggctaaaaggaagccatggaatggaagcatgagggaacccagggggccaggacattgaagaaacaaggaggctctcaaaagatcaggaaaaggtggcctctcaggctgtctcgagagtccgaagcacagaggcatgggtgggtctgctgcaggagccctttgctcttcctgcccacggaggatgcggtgggccacccactggggccccagctaaggagcagccctacatctcctgcacttgccagctgtgtattttcattgacgcattgctctgtccagcccctcaggtagagagctgggtagagggtccgacagtggagattcagtttaaacaatgatggtaactccataaagtggatcttataccttagacggttatgttattaattgaagggagaaaaaagggaggctgcgatgagaggggacagtgagtttgggtttgggcctgttgaatcagaagtccccagtgcccttcacgtggagctctctagacggcagttgctagcacacaaagaaatcaggactcagagttatgagaacacacatgagatgcatggcgaagcccaaaggcagacacaagctccaagactcagatcaaaaccctggggtgtgcccctgacgggaaggagggtcgggcccattgggggagtcaccttagaaaaacattgtatgggaaatttggagcatctgaatagtgagtttacacccaaaaaaggttgaagatttttttttttaaattggcagagcaaagcaataggcatcaagagcccagtggggctccagaaagtcggggtctgcatctgaggagcggctgagaccccagaggagggaggcaaggattcctgggggattggagcctctgatgcaggtcccactctgccaccctgagcaggacacttcccctccctgggcctccgtcccatttacaaagctgagggcagaactcatcgttcccagctctgactgtattgtcaccctgtctctcctttgcttgtgtcctcagggcacttacccagcttctgtccctggctgttcccaggtaccaggaccctctgctgtcagggaccttaaaccaggaaaaggactagaagaggccagctggcccctccaccagggcagtcaacaccatgctgggggctgtgttctcggggcgacagaagattcctgtgacctcttaaaagggtggtcttatgaacaaccccaacaacattaaggaaattgagagaatgtgtaccagtaaacctcccacccactccaccacggttttcatttctctaaattcccctccatcctttgccctttgtaatatatgtttgtttgcacaacagcattcacagtgtatacacactaaggggtgctctttttttcccttaacgcaatttcataaacactctctcatgtatgtcatagttacatttgaaatggctgcataatactcctttgtgttaactgtcttttaaacaatgctctgagactgcacacttaggttctttccagctttgagtgattatgaagaatgtggttgagttttatacatatgccattttctttctttgtactcatttcctggagacaaatagaagaggatttctgagccaaagcatataaactacttttatagatcctgaaaggtcattgacttcctcaaggaactggcttgtttagatgtgctaaatggccgcagccaatggtcaggggacaagtgttaattggtaaataagcaatgcctttctttccttgactcctcccggaaagatgccatttttccaaagctctggcagagaatacactgaaaatgtctcacagaagacagcctgccagactgttgtttttgacaacaagcaggagaaacaaagtgctttgcagaagcactccatccagcggaactcagcatggtgggggctctgtaggatccaccacttcccaccctcagaggtggcaccttggcatcctacaagtcacttctgacaccattgtcactgccccaccccatgttcatccaggggctccagagacccctctagagatggggatccctgtgaccagtgttactggcacccccactagttgacagctgagctcagattgggactcttaccagacagaaacacagcgagggaccctgggagatgtcctatcatgcacctcttccagggtttcccagcagggcgagacgggagcacagcatggggccaccctacccccagttccctgcatcccttggattgctccaaaaagggtctcagagaatatgaggcctccagaaggagcatagagaaaggcaggcacccagggatgctgccagctgccgggccactctgggctgcacagaggaaggccacacaggcaaaggaagacttgggattcctgtctctgagctggaagcatggggtgaagctgaacattgtcctaacaaaaccaaacacaccatctgcctggaggtcccagcgaggggccagtaggctctgctaaaaacagagacagaccagggagggccactgcccaacattccaccctccacctcctgaagactgaagactggacaggaatgtgagagcccttctgcctcccccttttccctcctgggtgcttccaccaagtatttggtacctactttttctggaaaattacccattgcttatctaaaattcaagttactgggctcctgtatttttattggctaacattggcaactctatgtgtcgacgactggaggggtgcaggtcagggtgctgggagctcctcagggcttctgatgcatgaacatggggggcaggtgagatacagctggcagcatgcactggtttcaggtagatcatggtgtcatttacagagatggaaaggactggaggagaagcaggtttgggagagaaaagtcaagacttctgattacacattggatttgagatgatgtttgttaaataaccaagtggggaggccacgagaaggtggaattctggcgaagacagagatggaatctgatggaacttgatggcagtcactagaaagacagttcagttaaagagaagaggaggagggtaagggttggaaaactacctatggggtgcaatgttcagtacttgagtgatgctatttgcactagaagctcacatcacaccattacgcaatatacccatgtaacaaacctgtacatacatccccaaacccataataatatatatgcatatataaaaggagagaaaagggacaaggcctgagatttacaagtaaagcaggtagagatgggcagcaacggacacctatgatttcttccctgaattaaactgggacttctcagaaacctctattctgagatttacagggaaatgtttattgaggccctagtataagccaggcattgtgcaaaagcacttcatgtattatctcactgaattttcatcatactgatgattactcattgttatccccattttattggtgtttaaaaatgaggtccagagaggtttaaacaatttccccagatcacagctcataaatgatcaaatacttgacctcaggttttcctagttctcaagcttctgatctgccctgtgcttgatagcatattttatgcatatctgctctgccagtcagtatgatcctcatagcaggggcctctctttatttctcttcccatctccctgtgtctcattcggtgctaggctcgttgttggcacctggtaagtgtttgttgtttgggatttgatgggagagggccccaagccttgggcgaggtcagccaagacacgatgcctgcaggactgtcacagaaattcccagaacttataacttctctccaaaagggtggaggacgggagctcattagttgctcagcttccacgccagtaaaaattcaaagcccccagtaaatggcaaaatctgcctggtagctctgggcacacccagcagaagatagttccagaaagcaagaggagaggtgggtttaggaggcacagaggccgaggcatggacagggaggtgcaaagctgcagaaggaagggaggggtggactcaagcccactccctttctctttttgcttaaatagaaaagctccttttcttagcaagggttgggcactgcatgatgactctcaagtttcctccaatcctggctcctgggatagaaatcaaagcacttgacatgtttctcttgatattcgaagctgaattactgtgcagtctgtggcacttacacccggttataaatcacttaacaaacaccaatgatacatcccacctgctgaacactgttctaggcggttaacacggatgaattaatttcatcctcaccacaacacttcgaagtgggcagagtaatcccttctgctctgctatacagatgaggacattaaggatcaggtaggttgaaaaacttgcctgaggtcacatagcaattggcaaagtcacggtttgtaccctggcagtctgactccggtgccatgcacttcaccactgggtgttagattctgcctcagaccaggaggctcgggtgggagaagccctgaattcacgccattcccagctgcagtccaggcacccattccccagctgtggggccgtgggccagagtaggcaatgcgtctaagtctcagtttcctcatttataaactgagctattttctggattccttaggattgttgtaagaattagatgacacaatgtatgcaaaaatctctgaaaactataacttgcaatccagggaggaaggattaaagggctaattagtgatcagtgaagcctagcatggggttggcaaatggttttcttgtgaagggccaggtagtaaatattttaggctctgcaggcacacagactactgagccctgctattgcagcacgaaagcagccaagcagtacacaaatggatgagcgtgtctgtgttccagtaaaactttataaaaacaggtggtggctggatttggctctttgcctagaaggattgcagtgggatggagctgagagatgggtgctctgcagtgtcctgagtgctgtaagtagggctttggctgaagctctggagaacagggagtacttgtcagattcgcaggcagtgtttcagctgtctctgcccccaacttctacccggctcaggcgtggtcagaggcatcaccctgggcagtggaatcttccatgggaaactcagggtgtcaactggctcttgatccctcctcctccccctcttccggggtctgaggtgagacagaggtgccttctgcaggagaagctctgatggctagggcagcccgacagagctgaggtgggggcaggggaagtacagtgacctgcccaggtgtgtgcagtctgagtctaaggaagaggctggggggacttcaaacgaccctgactcacctcccaggatacaaggggtgaaatgcgtgcacgggctggcaagccctgggtcatgtcctctcgggaactgcacgcgtggcagcaggctacagaatggggactatagggacatggttgggacactggctccaacatgattgatagcacaggctgattgttaaaaataaatgacagatgtccaagtccagagccaaacagatccagcagactgcaatacctggcagaaaccagtgtgctgacatctaactgggatcgctgacaagatctgcatttaacttgaagcaacaagaccaacaaagccagtggcactgacacgcaatgggggagcacctactaggcaatggtttcctttgaaagagatctggggatggggtgaggaggagatctgacctgatcattgagggctgcatggtattccatcatttggatgtagggtcgtgtatcactatgagtgtcactagaaagtctcatgagaggtcaggcgcggtggctcatgcctgcaatcccagcacgttgggaggccgaggcaggaagatcacttgaggccaggagtttaagaccagcctggcaaacatggcaaaaccctgtctctactaaaaatacaaaaattagcccggcttggtggcatgcacctgtaatcccagctactcaggaggcggaggcaggagaatcgcttgaacccgggaggcagaggttgcaatgagctgagattgcaccactgcactctagcctgggtaacagagtgagactctgtctcaaaaagaaaaagaaaaaatagtaagtctcatgagaatttaaactaatatcaacatccatggtcacagcctggcacactcccccctggctaggccaccccaggagtggtgtctaattctgttgactactcacacctggagcctgttgggaggatggctattctgttgagacattcaatttgatccttccattaattacctgctatatgtggcacatgatggtaggcagtgggaggacagctgtgaacaaggtgcggtgccctatcatgaaagagctctcccggactaggaggagagccagcacagaaaccaatcattgcaatacagcatggtgagtgtgaagaccggggcccaaagacacaaaggtggaggaactgggttcactttccttggtgttaccaactcactgatgagcaatcgtgaggatgaggagaatgccttgttatgatatgatttgttccggcaagaagaactagaaacagtgtatgggaaagtcaaggaggacaaggaaggggtttctgtgactcgcagttgttttttgggaaaagcacaacaccatgtctgtctgggaagtcgggagggaggttgtaggagatgcccactgaagctaagcatctccgtgccatgggtggagccattgctggctccatcgctccctcccctaaagagctacaatcctggaaatgctgttctgttcctgtttcttggcttactgagccctgcgctgtcacggtacctcaaggacctctccaacaatgtctccaggcttccctgtgtgtttattggaaacatgtgcatatggacacgtactgcactgagcctagttctgtttatagacaaagttactgggtgttcaggctaaacaagtaggtctgtaatcctttgctattctgaaagcaaactgtctctgattgtgggaataataatatcaaatatttctggagcacttttttttttttttttaaagacaggatctcgctctgtcactgaggctggagcgcaatgatgcaatcatggctcactacgaccttgaactcctgggctcgagtgatcctcctacatcagcctcctgagtagctgggactacaggtacatatcactatacctggctcattttttaattattcgtagagatgaggtctcactatgttgcccaaactcatctcaaacttttaggctcaagcaatcctcctgcctcggcctcccaagagctgcaattacaggcatgagccactgtcccagcctactgagtacttacgtgccaggcagtgaaagagttttaatttttcatgtattatttaattcagtcctcacaacagccccatggggtaggcaccacgatcaacccattgtacagatgaaaaaaccaagtcccttggaggttaaattatttgcctcaaaatgatagagccattccatagtacagcctcgatttgaacccagaagtctggcctcaaagtccatatcctgaagagaatatagctactcccagaatgctcgaaagacacagagaacaatagaagtatcatgtagcccattgtttttcagactacagcttatatcctgttcatgaattatgaaataaatgagttgtgatcatgttaaaaaaacataaatagaatagagtagaaaggcattacaaatttaagtattatctcagctatgcttatgtgtgtgtactggttgtgtaggtcatggtaaaaaatgtttgagaccaccaatcttgcccaatttgctcactttacaaatgggtgaactcccattcagacagcaaagtgatgttcccaaggttacagagccttcacagataacctggggctaaaccctaggttatgctatcaaggttaattgactgcaaagaaaacgaagaaaaagtaagagtgacgatgctaataatagtggtaataccaatgccagcaataacaatagctactactccaaatctcatgttgaagtcagatccccagtgttggaggtgaggcctagtgggaggtctttggaccatgggggtggataccctcatgaatgtcttggcatccccctcatggtaatgagtgagttcttgctccattagttcacatgagaaccagttgtttaaagacggtggacctcctcctttctgtttcttgccacatgacgtgcctactccccattgtcttctgccatgactggaagcttcctgaggccttaccagagaccaaggagatgctagtgccatgcttgtacagcctacgaaaccatgagccaaataaacctgttttctttataagttatcccatgttaggcattcctttttagcaatgcaaaacagactaatatagggagtacgctgatttcccccgttttcagagaagggagttcttggccaagtgcctcggccaatgtcacatagctggtgatagagaagccagggttccaactcagacaggctggctccaaagtccctacttgtaaccagcgtgaagtctacacggtcctgcctgtctcaatattcttcttaaatgctgtaatgtcaatgcagtatataacatggtagatgtgttaatataatcacacacctgccacttctactagctaaatgtccctgggtagcaattccatattcatctcaattaggtacttggttaaaactgaaataatcatcttttttttctacaaatattttctagattcccttgtctctgtcattcattcacatattaaaaacatcatgcatttgaagaatcaagtagaataggcagaaatttttgtaaagataaaactgtacataatacccttccttgttccgtaaagaattaaggcaattcacaaggatacattaactacactaagattaaagtagatgagatgcaggtaaagaagatcaagtagagagaccccgaatgaagccaggaaggagactaacacaaaaatgctttcctgaagtctctatacttgctgcaggtggaccacaattctgtccccaggtttttgttttaatgaccttcaaattcacatatcctcatacaagggatgacagctgactcttaagtttgtgttaattacctccttgaaagtaattttaaagactttcagattcacagtctccataaggtgaaaacaaattcctcgaggaacacataactccttctatgactgagacagaaaataattggtgcatgggtcccctgagtacagcattgtgtaatgcaacaaataacatcctcaacatcattcttacaataagcacaaggggtgaaatttcacagggttgtttctgacagtgtcccaataaaggttgatggcattatgctcctattcccaagatgcgtgatagaatcaggaagctacagtgtagatggacatgggctctgagcatattgttctttcctgcaaagtccagggacagacctgcttgaaacaaggtgatccaaaaaagggatactcagttcaaagccaggtggacaactctccgcaggccaagcctttccccaaccattccagccctcagagattgggctctcctttgtataatttggcaacagcagaaactacgtcacattgcccgacaatgggtgtatgtattcatgattttaaaccctcctgtgcagggcctacatctcatgacgttttattcctagggcttgtccctttgccctgcactcaccgaacactcatgaacaaattcagcacttgttgaggatgatgatgacaacgaccgaatggtgctgttagaaaagaactaatttaaggtgcaggaggagcccatatttccctagggactctccctgtagaccagtggtcttgctacattgctgcgatgctgcagcctcaccccacattcgaatcccagatcttttcacttcccctttctgctgtttcatttccacagtgagaattcagacttatctacagagctgtctcaggaaaggggaagaagagatggttcctgatgaccacacccagtcaccacagtgactgcctagaagagccataggtaagactgagctccctctgaccccttaattctattgcaaaggacatcttgcctgaagtgctggattgaggaccccctggccacacgaccaggcaatctcaattctttagttcatgaacttaaacctgatggtctctactgttcaaaaatgaatcgggaacagaatgaaaacataatagggaacggtcagccaaggtaataatcaaaatgtgttgaagagatagaaaagcttagaggtattggaggtaggaggaggctcttgccgtctccttgggagatgatgacaggctatgagctaagggaagagaacccagtgccagcatgggattattggagtaaagctcccaggaggacactggtcaggttggatgatgggcagaatccaactgatagaataatttgggtggtggccggattaaccttcaaacaggtaaacttggataatgcataaacgtgaggtacatgtttgccttttactttcagtatttgggcaagaagatgaattgagaaaagtcctatgtggggcttataagactcatattttggtgtagtttgattacagatttttcatactgggaaacagtaagagtaagcatttgcacaccgagatgttgctaatcccatattcagatatggcactgggttgcagtggacaattttgtcatccagttgtaggagctatgagatttgcattgacaaggaggttttaagaatggtttaaatggatctcctgtgcaaggtgacctctctgggcacaggcagtgagttctacccaagaaggggaagccctctcccatggcaggacacccaacagaaggccaggcaagctcttcttcacactggactgtggatctcccctgacccctgatcttggtatctctgagaaggagcatcgctgaggtcttcaatcaggcaatcttaagaaacctctctaagatcagacagagcctccttaaagaacctcagacttgtccaccatcttgccaagtccctttcctatgctgccctcaccaaacctcccccagaggccagcatgattctccagacaagaatctggggaggtaagagcggccacacacccagggccaagagatcaggtacgacattgttgcaccagctccgtcccaatccaccccaaatttttgttcaacacaggcaatgtggtacccagaaacttcaggttctaagataattataatgatcagaaaaatgctggaacaattaaggaggtatggcaacatttctattagattgggaaaccatgttccaccctcctttctgaagcttccaggacattattataaacctcattcaatctccaagccaggagaaagcctttttttcatcatactggacggcactacttgttagcaaactgtcctttattttgaatggaaatctgtctcctaataacatccacctgttggtcctagctctgccttctggggtcacatagagtatgtctaccctttccacatggcagccatccagacaccagaagagaaccgtcactccactgcaagtcttctcttccccaagagacgatgcccttccaggacctccagaggcctgccccaaaccccccaccagcctggtccctctcctccagacccccatctgtcacctaaaagttcctgttctgcagagcttttctgtatctgtcacctaaaagtccctgttctggtttcctgttgggctggaatgctttctgaacattccagaaatttgttatggtcctcgcagccaaacccacaaaactcagatcccaagctctcaccaagcagcccgagaacatgttcaaatcctcctctggcccactcggcctgcgagggaccctgctggcccctgtcctctggtcccagggatgaataatgaggttctctcgttgttgctgttggctgcccctcaggttgctcattgatgggacagactccaccccaatgtctttgccctgagtgtggaaacctgaaggctcaggcagcattgaacaccccattacatcacccaactgactagtcccgcttgacggaaagtgaatcaagaccggggaggtcctggccatttgcctcaaaatttccagcaaaaggtcatctatctgtaagggctggacctccagattcctgccctgggcttcacccgagggcccctccctcagtgctccaagtcagctcggcctggccagcagcctcgctcccaccaactccacctgcttcatgcagcagccgcacctccctctatgtgcctgctctgtcaccatcgcattgggctacaccccatcacagtgcccgctgcattctgccttgaggcagggctctatctgcatgaccccctcagttcctaggctgggagctccttgagagaagcccctgggtcctatttagctgtgcccccaatcttagcatggagcctgctgcaaggcaggtactcatgtgagacatgttgggtggaaataaactgatctctcagccttacttgcgtccagtcctacctacctccactgagaaaggtgggaactgagcagcccttcctttcaaagggagtcaggagaagaccactacagccatctgcttcaccatctgtcttcatagggactacctatagatgatgagctgggctgctcacagcttggggccaacaggctcctgttccatcccttcttgagtccatgagctctccttctccatggctggagaacatgctagccctagcccatcgcctgcccatctcaaaagatagaaattggtaaggagagcctggctgaattggggcaaacccattctacctacagtaactgcaaagggcagcaggtttaccaggaagcaaagtgcctcacaactattttcatggcaccccaggaccagaagcttagacaacgcccagccttctcagagcaaaccataccccagaggcccagggaggcccagtgtaatgcacaatgccccacaatgatgcaggaaaagtcagaagccactccaagcagctaggtctctactgctggtctctttgattccacaagctcacatagcccctgccagctactcccacgcaaaacaagcaatactactgaagagcttcttccttcttcctctatggtttccatggtgacaagggcagtgtttgggctcatgacagtgggaatgaagagtggaagctccaggtcttccttcctcatcccaaaagaccaggacaaaaatggcctgctcttacctgctaagatgaagatgcccacaagaatcaggaagaccagcaggtagagccccaggacagcatgcttcagggccgacagggaccccagctgggtacagcagatgcttgcccgccgtttgtgacatggacctggacaataagggtaagaggaggaaggaaagaagacacttaaaaaccccataagctcttttcttttttggtctcatctctccctgatgcatgcagatgttcatgttgaacttctcacatcccttttgcatgtctagaatgcagccacttgatggggagctttccaggaccatcacattcagcctctagctctcctcccactctctgtgttcatgatcaagccagatcacatgtccacagctcacatgctcacaaaaaccaactcttcttgagctagtccaagcagcagaaagaccttgaaatagtcttggatatgtggctttaaaaagtgtcattgtcccatgggatccagggaacataaagagaaattaaaacaggagttgcaaactcaaacttctacagtggctgggaaggtatgggaatgagagaaatgggcccagtgggactgtggggaggccaacggcacgtgcctgctctggcagaggctactatgcagggatgagtggtgggtgtggccagatccagaattttctacatctatttttaagggttggcaactaattcatcaaacacaaaacactggggagtgtaaacaaaacacatctgtaagccagttctgaccagcttgcaaccttgcatttagatttgctagaaaacatggtaacctcatcctgtgacactcctcagcttctgctcaaaatggaacagggaaatatccttgctgtagtggccttttgggccatgtaattcaacccctttgttgtacagataaagaatgtcaaatgtcagttagcagcaaatccggccccaggacccaggttgatcttttagctgaactggtccttcaaggtggccttctcagatggcccatgaagaggcttactgatctccagctgctctgttgactggaagtggaaagaagggatcctctccctgatgttagcagggcatgtaggaatcactgggtgggggcggcggggggacggcatttttttaaaaaatgcttatccctttaatgcttgttccttaccccctgtgggtaagacccctctccagaaggactgtccccacttcaagagtgtcactaaggccaggcacggtggctcacacctgtaatcccagcactgtgggaggccaaggtgggtggatcacttgaggtcaggaattcgacaccagcctggccaatatggtgaaaccctgtctctactaaaaatacaaaaattagctgggcgtggtgtcgcgtgcttgtaatcccagctacttgggaggctgaggcaggacaatcacttgaacccaggaagcagaggttgcagtgagctgagatcacgccactgcactccagcctgggtgtcacagtaagactgtcaaaggaaaggaaaggaaaaaggaaaggagaggagaggagtgtcactaactggagtgggcagaaaaaggttgtcaagagaggctaaaataattgatatttagaaaacatcctgaaggatagtaccatgtttgcaattccttcataggttcccatttgcaaggatacctcaaaggttacatatcgcctcccaggtatcattactacctccttggcctcaggaggttttatgaccacaaggaaaatggtggtgactattggtaccttacgatccacactgccctggtcccccagaggtattgttatataaggaacattttctcactcattgacttcattttattacaaatactgctgttaaaccagctaaacagagctattacataatatttccataagacattgggtgcagtgtcgagcaagttgtcaatgactattctcactcatccttacattagcaagttttgaagagttgagctgattttccgctaagacaaaatagagcacatctttctaactcaccctaaaccttttctgggattttccatcctttaccatacactaggctctacaaagggttttgctcctaaatatgtaggctcctggtagcatttcttttatttttttccttctggtgagagccactagctgtctggttgcaacttaccagagaaaactctgttcctctcaagagtcagagtaggaggtatagcattgaataatattatacaattactggtttcattctcatggtggtagtttcagctctcctgctctgagccctgctgtctccttagcctcatgacagaataggaggaggaaaatcacacagccgtgaacacagttaacttcaagtttgcctttgtcatcttcatatgtgttgctagttcactgtaggagtgggtcaatgtgcaatgatgtctattttttccccattaaaaagaatatttcccttgccctctacctgaggcttctatttaatagcaagcacctacttgtgacaggtgccttagtcaaccaacacgcagaacacagaccttcctttgagagagtttagttctttgagcaagacttggttactttgtgcattaaaccaagtatattttaaatagaacataatgagggtttcaaatagaggtttcccacaaatggttagacaagcagaacatgaatgatctggcaaggcccttagagaatgattgcaagggaaagaagacaatttaagacaacgacaagtcacaaaggctgcccaaaacacatttatggactttttttttccaagtggcagaagcatgttagctgggtaaacctttcaaattatttaaacttagcagaagattacaaacactccaaaatgatcctatcagcaaagccagggcaaaacgtatgcctacttttttgttaaaaataatttttttaaaaatgcactatcaagccatgacaagacatggaggaatgttaaatgagtaattaacttggtaaaataagccaatctaaaaaagctacataccgtatgattctaactatgtgatattctgggaaaaacaaaactatggaggcagtaaaaagatccgtggttgccagggattgggagggcaggagggatgaacaggcggagcacgggggattttcagggaagtgaaactcttctgtatgatactgtaatggtagatgcatgcccttagacatttggccaaacccacagaatgttcaacaccaagagtgaaccctaatgtaaatgatgggctctgggagataatgatgtgtcaacataggttcactgatagtaacaaatgcaccattctggtggggatattgacagagggggaggctgtgcatgggaagggtggcaggcggggtatatgggaatgttctgtactttccatttgcctttgctataaatctgacactactattaaaaaacaaagtctattaaaaataaaagtagagcttttgacttaaggattgtaggggtaaaaactttaacaggcatttatggaacatccactgtggaaaagccccactctggtagccagccttcaaaatagcccccacgatcccagcaccttctgcaatcaacccccttccacgttgtaccaggattggcctgtgtgaccaataaaacatggcagaagtaatggtgtgtcacttctgaactgagaccaaagacatgcagcatccttctggctcaccctttctctcttggaacctttgtttgaggggaagccagctgccatgtcatgagcgcccacagagaggcttatgtggtgaggaactgagggctttggctgacagccatgtaggtgagtgagcctctaaggagatcctcctgccaggtcaaggcttcggatgatggcagcctggccaatatctttactgcaaccgaggtaggagacaagattcaactccagaggcagagctcagacaccagaccaacctgaggactagctaaaaaagggacgaggcaggagcagcttttcataagacacacccacccaccaaagtgccatgttgtttaccattgccatggcaacccccagacgttaccacccctttctatggcaataacctgacaacccagaagttgccaccctttttctagaagtttctgcataaactgcccaaaatttgcatataattaaaaatgggcataaataggcctctagaactgcctctgagctcctgttctggtcacactgcctatggggtagccctgctctgcagggagcagcacctctgctactgccgtgcactgccacttcaataaaagttactaacaccaccggctcaccctggaattctttcctgggcaaagccaagaaccctccaattttggggcttgctcctcctgcatcacaacctcttgagaaagcctgagccaggactactctgctaagttgtccctggagtcctcccagattatatagacatatgtgtgtgcaaaatttatctgaaaaaattaacaaaattttggcttttttttaaaaaaaaacccactacttcctcagaaactgcaagaggaatacatttgttttatgctgctcagtattagggtaatttcttatgcggcaatagataactaacacacttataatagatgctggggaatacaaagatgacacactgtgggaaggagagactttgttagcgtcattcacttccaactgcccatctcccaggccactgcctggcacatagcagatgctcaaaatatttgttgagagattaagatgcagccactgcctttcagatgcagccttgggaggggaagacgatgcataaaacggtaattgcaatacagggaagaatgaggttggtgcggaagggagcggtgacacaagcaaagtgctccctgcacaggtggcgatgcactcggtgccagaggtagtcacagagtctgcatggaggaggccacaattcaccagggtgtgaaggacagccctttctagatgggctgaactctgttctctttgtcttcacttcagagtccaatgtacaggacttataaatttgaaaacagtgactttaaggagcaaacagtcttcctctctgtgtgaaccatctgcaggaagtaccagacaaagctgttcatgattaacaggttgtctgcagacacaagcacacacaagaccagagcgctggagaaaatggtcaacaaccactacgacaacaacaggaagaagaaaaactctcccaaactcaaacagactcatgggaaagattcttccattttgcagtggcctccagaagtgagggtggcatctggaaggtcaggaagccaagaggtctagagagggcaaggccagtggctctgagcaaataaatagaaatgaacagtgacttgccagaagagcccagaatgccaggctgggagacgttgttcatctcggtgtggagcacgtggctgcttgatgattgctgggagcagcaggtagatggtttctcctctgtaggcatcctcccctgcatacagcctgcacaatcttgccatagcagagtgtccctgggctattactttcttaacatcactccacttaaatacatttaaacttaaatttctttggaaggaaactttatcatcgtaagtggaaaattagtatcttcctattatacattaaaatagatacctggctgggcccggtggctcacccctgtaatcccagcactttgggaggccgaggcagatggatgacctgaggtcaggagttcaagaccagcctggccaacatggtgaaaccccgtctctgctaaaaatacaaaaattagctgggcatggcggcaggcacctgtaaccccagctacccaggaggccgaagcaggagaattgttggaacctgggaggcagaggctgcagtgaaccaaaatcctgccactgcactccagtctgggcgacaaagtgagactctgtctcaaaaaaacaaaacaaaacaaaacaaaaaacaaaacaaaaaaaaacaaaaaaagtagacactttaacagatttatacctgtgtatcagaggcatcttgaacaccactatgctgtatgtagccacatcctgggaaacactgactttaatgaaagtaactaagtcacagttcagtgacatattgcaagaagaaagttgatacacaccaaagaaatttcatttatagagaagaaaaaccaaattttagatgttcaagttttaacatggttcaggccaggcagtggctcatgacttaatcccagcacttcaggaggctgagatgggaggattgcttgagctcaggaatttaaaaccagcctgggcaacataatctgaccctatctctacaaaaaatttttttaattagcctaggatggtggtatgtgcctgtatcctagctactaaagagactgaggcgggaggatcacttgagcctaggagttcaaggctgtagtgagctgtgtcaccactgcactccagcctgagtggcagagcaagaccctgactcccaaaaagagaaaaaagttctagaaggtagtatattaagaattaagtaccactgaaagaaccatgtcagaaccttgcatgcatctttcacaccatcctcattatcaaccattatctctttacctctctggcgaccccactagtctctaaggttctctgaggcaaggtgtgtctccctgtcagccagtgaacagcaaagcaaacacatgtgaacagttatttttgtggcaaagactgtctattacattcgccgtatgcaaataattgacaaactctaattggctggaaaaacacatttttagagcaaacttttggtctgaaaaaataaaagctggggccgggtgtagtggctcatgcttgtaatcacagcattttgggaggccaaggtgggcagatcacttgaggtcaggagttcaagaccagcctggccaacatgaaaaaaccccatctctactaaaaatacaaaaattagccaggcttggtggtgcaggcctgtaatcccagctactcaggaggctgaggcaggacaactgctggaacccagggggcggagattgcagtgagccgagatcgcgccactacactccagcctgggtgacagagtgagactctgtctcaaataaataaattaattaattaattaaaagctgggctttctttgcatatccagggtctctgcttgcttctttgtgcccatgcaggtaaactgtagaagctaatcactggaacagaatagatactttactcctggttgaaagtcaaaatcacacatggagcttcttagtcataccaaggcctgagcctgcccctggatgctcactctctgattcagtggtgaaatcacagatccatggcacggaggccacagctctgcagcaaggcatttgtcatatcaaaagggaaggtgaagacacattcttggaaagcatatgaaaagtcttactattattaagagcttgacttatggggtgaaaaaaattccttgatttcttttcaataggacacatcgaaaatggggttgtatcaaaagattgtattattcctagaggtaaacattgtgaagacttcctcctaaaaccgggagcaagaataccccaaagagtttttgctaagatactctatcctgggggtagggagatgtttggcaacggacattaaagaacaggaaagtttatataaaaacaacacaaccctggcaccctgagctgaggatgagtagggagagggtcccccagtgtcaggctacattgtggagagaaccttgaacctctacagccctctttccctgtattaagcaggcagcatctctcacagtgcttcgggggaaaagcatgggtctggggctctgtggaagtcaacgcaaagcctgcctctgtcatgcattaactgtgagaaccatgagcgagtattccagcagtccccttcatcaaaatgtcctttccttgaaaaactaatatttcagtttcttagtcataattttagagcattttggagttatccaaatttatttcccccctcccattttaaaagaaactcacaaattggatctgataaaaatgagtgtttatttccaaagaaactggctctgaacataaaaaaaaaacagaaggcaatgattccattgttacctccttgagttttaacagcaacaaacagctactttcttcttgttgtctttggtcccacagctcataaacagcaggtagagatagcgttttattgctgggaggaacctcagagctcagctcatccaaggagctttgtgaaacccacccaagtctgacttcacaatggttactcatcactcacattgttcactgtaacaggcagccacaaataacctgtctttgaagctgccaccactctctggctttcatggggactccataggggagggaaggaaagtatgaagcaggggcactgccaccgagagccacccacctgagtcctgcctggagtcacagcggacccagggaaacaagtctccctggagcctggcagggtcctcaacaactgtgatgttgtgaagtctatatcatcctggtcatcatcctgaatcctggcaaaaaaaaatcttctaaagctcttgggatttccagagtcataagagtgatttttgtgtattcatgagatgactggatctggggacccctagatcgcctcaggatggaggctggccactggaatgaccaaggcaggattagagagttgggactttcagccttacccccaacctccaggaaaagagagaggctgaaggttgagttgatcatcaatagccagcgatttaatcaatcatgcctacataatgaagcttccataaaaacccaaaaggactgggtttggagagctggatgtgcagaggttcctggagggcagaacagctggggaaggcatggaaggtctgcacccctcctcccagacccaccctgtgcacctcttccctctgttattcatctacacatcctttgtaatatccttttcaataaacctgtaaatgtgagtaaagtgtttccctgagttctaggaagcactctagcaaattaatcaaactcagggtgggagtcctgggaaccccgatttatagccagtcaatcaaaggaagtgggtgcggggtgggagcagtcttgtgggactgggccctcaacctgtgggaatccaaggctaccaccaggtgcatcgcatcaggattgaattgaaccagaggacacccagctggcatccgttagagaacccactgcagaattggctgttgatggagagaaatcctcatcgattttggtaacctgaagtgaagcattctgtgatgagtgagcgaatagaaaaaaacattttggtttttttttcctctctccagaaccaactggggtagagtgaacaccagtgacctctgccctgctgcatcccaggcctgagtcctcagggcagacggctcagcgagggcacccggggtaggagcctggtcttccacagggccagatgcacccaagcctttcacacccacttctaagtacaggagagcacgggaaggagagacagccagggctaattccatgcagattttacgatggtctgggacagattctctcagtactttcagagatctctccatcttgtcactttcatacaatgtgtgttatttttcctccacccccatccatgtcccaagttactctgcataaaaattcttgagaacaatcaagggtgtgtgtgcttgtttttgggaagggatgcccggtgtgcgtcttcttccgcagccggggctgaggggtggagagaggaagctgggggaggggagggcagggtggccaaggtgagctgggacaccactgcagccatgcgggagagagcctgagagccccccaggaagaacaagaggttcctggggctggtgaaagatgccattattcacgctgcaaatgcacagtacacggattagaagctatgcggcatcaatgcagtgagactcaagcagcaggctcagggttctgcctaatttcaggccaaaagaccctccccatacagagtggccccagctccttgttcagaagattcccagttcccctcctggccctttgtcaatgacaataagtcccttaaagatgtctgcaagttggaagccaggtctcagctagttccatttttaaaccactcctctttctgggatgctaatgcaaccttccgcccacctcctgggtccactttggtttgatgaactggtttcttctctgggcagaaacaaatgagttgaatacacctgtctcactctcccaattcctaccaccattcagtgggaagggtgtctggcttgggagacagaaatgctgagagcctcccctgccacttgtagaggactgagtcatccgtgtccctgaagcctccagctctgctacttacgcacgaaaaacacagcaggccatgccagaggagggagctcagcaggtcggggcaaagaggatggggatgaggcgccctaggactttgggtgctcctcgaaaaactcctccccacaaaacctcacagcctcaccagcagtttctgccctgaggccacccagcaggatcgcttgagccctcagtcctggcttagccagcccccctgccttagtccaggctgccacagcaaagtaccacagccagggtggctcataaacacaaatgtactgctcacagttctggaggctggaagtccaagaccaaggcaccggcagatcaggtgtctacacagccgccccactcctcacggtatactcccatggcagcaagagagtgagggagccgctggggtcccttttataagggcacttatcccacccacgtgggctccacccccatgacctaatcgcctcccagaggccccacctcctagtcccatcactttgggcattaggatttcaacataggaatttggaggggacacaaacattcagtccattgcacccacagaaaacccaggactccccaggcccccccatcacccactgttaatcccaaacagctgtgtttatcctcctttcatgctatctccctccctgactcctgaaaccttcctgcatctgccaccggactcccagcggatcagccgtgaaacctcattccctcagcctctgctgtaggcgtttcttctactttcttgttctaaatgagacctgcttcctgcctgcctaacctttcccatgaggacttttcttttcccattctcctcatacaccagtcatatgccagggcggtagatgtttctctttgcttccttctagaactttccctctccttcctccctaaaaacccccagcacttgtgttcactgtcataagacttgacactgcacctcccggttaagagccacctgctcctcccctcccgggatccctatcactgccctggctctcctgatccccgggtatcactccttccggcctccttacctaattccagcctccctggcctgggccatttgcttcgagcacaggaaacatggctggcccaagcagggatgggctccgactgtaaaaaacgcactggattttgaagactcagcatgagagaaaaatacataaatacctcaacaaactttatagcaattacatgtcaaaatgataatatattggatatactggattcactaaagtgcactagtgtatttcagttagtttcttgtgtcttttgttttttttttttttttttttgagacggagtcttgctctgtctcccagactggagtgcagtggcgcgatcttggctcactgcaacctctgcctcccaggttcaagcaatgatcctgcctcagcctcccgagtagctgggattacaggtgcccaccaccacatccggctaatttttttttttttttttaggagagaaaaggtttcaccatgttggccaggttggtttcgaactcctgacctcaggtgatctgcccaccttggcctcccaaaatgctgggattacaggtgtgagccaccacacctggccagattcttgtgtcttttcaccttttaaggtggctgctaagaactttaaaatttcatgtgtggctcacctttcatttctagtggattctgctgctctagaaaggcttttcaccaatcactgaaatctaaatcccatgttcaagtgtcccactttataagtgccatggctcatcttatttatttatttatttatttattttgagacaggctctcactctgtcgcccaggctgaagtgcagtggtgtgatcacagctcactgcagccttgaccgcctggtcaagagatcctctggcctcagcctcccgagtagctagggctacaggcgtgcaccaccacatctggctaatttttaaaattttttgtaggttggaggtctctctgtgttgctcaggctggtcttgaactcctggcctcaagcaatcctcccatctcggcctcccaaagcactgggattacagacttgagccacggtgcccgccctcatcttcttagtgcagtccctcaggtctctgactctggggtgccccagcctcccacagaccatgcatcccactgcctttccaccctcttacaccctcctatccttgctggctctcttatcctactccactccaggatccacgttatcaggtaacacactcccactcctcacttttgtcttgcttcctcacacttgcacagggaaactctaaccctggtcaggtctaattccacccacacagtcgagcacaggtggaaaaagaaaaccacgcccctatgccaatggggctgatttaaactcagagcctaaagacccaggggcactggctatccctgggctcccacctttccctcatcccatcatctctctttgcctctcccagatgtgacttcccactcgctcctcttcttcactctaggtttcctatttgacagaaaaaacagaagcactgctcagagccccaagggcaggcccaggagcagaagcagacatactgaagggacgcaagggtactctaccctaggacctcacatttttggggtgtggtctatgtatccatttggaaggactcaatgtggaataactcacgtaacccttgcaaaagcgtatgagccaggcgctacgggtttcccatttcttagaggaggggaagatgaggataagagcttgttcaagttttcccagccagcactcagcagagatggggtgtgagcccagcctgttcaactgcagagcctgcctgacttttttttttttttttgagacggagttgtactccgttgcccaggctggagtgcaatggcatgatcttggctcactgcaacctctgcctcccaggttcaagcaattctcctgcctcattctcccaagtagctgggattacaggcacacaccgccacgccacgcctggctaattttttttgtattttagtagagacagggttccaccatgttgcccaggctggtctcaaactcctgagttcaggcaatccacccgcctcggcctcccaaagtgccagaattacaggtgtgagtcaccatgcctggccccagaacctgtctttttaagcaccacacaaagccatccccacaacagagaaggtgagacttcagcactttagactcaggtatcagagccgagtgaggctgtgtgcgggtctgcaccaatgacgtgcccacaccctgaatttctggcccactgagtcacatttaggtaaccttgcacttgagccagccttgtgctggtctgcagtaggagggaggagagaggggaggacagaccagctagagcgatggtaaattgcagaagtcatggagccctatttcacacctctttgtgccccttgctgcacacagcacctgcaggatccctgaatatattttgctggaagatgaagatgaagaaatgaatgaatgagcaagcaaggaagcagaggccaggagctatgacagcaaggtctgtggtgaggagaactgggggatgccataaggaataactgccctggccactcatcaccccctctactccagggattaccagaagcccacctgcccacccagggctctgtcctcactgcgggcctccttcaagcccatccactccagactgtaccaggctagtgggacatgtcggtggcatccccctcagaccctcctcactgcccccatccctagagtaatgccacacaggagatggcatggcctagggctggggctttggctgaagacagagaggggatgctccaggccatgcccgtctgcatggaaaggcgcccctggtgcctctgtaccccctccctcctcttcccaacgcctcctggaaacagcagcctctaccctgagacaaggaaacacatcccttggctcttctggtagcaaacctcagggggcccctgggagcaaagtgcctccaattaggatgatgaagggacagacacacatacgccatagaatcaggagccctcagggcccagtatttctaatattcgagaaacaggactaaaggaacttgctcaatttcctggagtatctaggcctcatgagaatcccactagtaaccagaatgttgctttcttcagcagaaggccaggatcagcccgaaaacactctccaggccagggtccctgagaaggggcataggtgtttcctgggagtccctgggtggcagcagctccttctacctcctcatctctccctctccttcttccccacctctgcaagctttgcaggggactcccaaagaccagggagggaaataaatgtggatcgaggggctactgtgtgcaaggcgctttacccgggttatatcatgtaatcctcccacaatgcctgtggggttagtaacattattctcactttgcagacaaggacactcaagattagcaggtcagggccctggcagaaacagaaggctccctcagattaggacacatcacagggtttcataaaaggaatgtctcaaaggtgtggccagggtgtgacacccagaaggacagagcagcatttgcgggctgtaaccacccttgggcccaaagggtcagggatgggagcagttgccagaacctggaaggggaaaagcccaggtggacagggcagctttaaaggagctgtggtctttggtggagggacaggagcagccctgggtgactccacagggcagaagccggaggagtaagtgctccagcttccctgtctcccctcacccacctcctgccggggctcccccgtgagttgagtaaagaacagtgtacggcacgtggggatggcgggacaaacagaaccccctgcactgggtctgagttcacgcatgcaaggacaacacaactcgtgtgtgcaccatggtttcacatccagccctgacacactgcaacacgtgtcaccaagccactcccatcttatagagggacagcccattgggcaagagagacctggaacacgcctggccactggctcccccggggaccacagacctgcctaacagagccatgctctctgcttggcatgggctgtagctctgaactgggttaatagtcccctctcctgcaccagagcctgatgcggcaacctgtaaacggcggtgactcttccagaggccccagccagcccctcccaggaaatccattcccatctttgggcagcagcccagcagccctcagctgcgccaagtgaaccggggagatctgacggatatgaaggtagatgaggaggatattttcattttatggggaaggaacacaggaatggggaggccgggcctggaggcagcgagcggcccggctgcaggcgtcggcagctgccaggagcatgtgtaactcattacccccaggtcctatttgcggccatggatgacgccacgagtggagggggctggggccgtgggggcgaatgggactgcagtatttttctgacactaacacctctctctggccctcggaaagtgctgtggaggaaccaggcccagccagtccccacccactcccagatcggcctcctcctccacctcctggcgccagactggagaggccccggctgcatatcggggaaaccaaggcgggagaaaggaaggtgggggtggggtggggggcgggaggagggaggccagatcaccggtgcctggggttctgttcagagggtggtgtgagtgagcatccatcagaggccgctagaggcagcttggctcaggaaccttccaggtcctatttgggcttggcccttccaagcagttccagccccacaggaggatgctcggctattgcccaggatccacgaggtgaggaggatggggccttccatcaacagtgggccccgaggaggacagcaatggccaagacgcaagggaggaggcagattccagaggtggccccgcccaggcatgcagagaagggaggctctaaaggcatcagagagcaaggggtacctgcggggccttgaaggatgcagggacaggacgagctggaggagctgggcaagatggctgctcagggaggggacagagaaccaaggcacccaacagtccctcctcttcccatctcacctggcaagtgaagaaagggaagggataaaggcagggagggtgaagagaaatgaggggcgagaaggaaagagaaaaaaacagcaggtccggtgcaggagtggaacggtgcctgcaggagctgctctgctagaggagggtcccttcctctgcgctgaggaagctccctgggcatcgagcccccactcagcccataccccaagggtgtcccctcacctcctctcttgcttttcctgctctcacctctggtggtggctgcagggagctcctttcatctctggactgaccacctgcccaagcccataaaagagggactcctcagcacttctgcctgcaggaagtgctaccttgtccaatgggtgagctgtctgtaacctggcatttcttgtccctgtttctcaggtggatgggcaggagggcgtgtgtgggtgaaccaggtgaaggctggtgcctggacaggggcactcacgcttgctggctgggtgagtgtctgttgggggtgccagcagccacatcgtgaacagagcttttccaggcttaaggcagattctgcacttggattcccacatgcctccttgtctatttcccaattggttccaaatccagaagtgaggggagtcactccttggcaccatcagtccaaccccgtgaaatccccatcctgggaaggagcctgcatctcaggtaaggagactcagagtccggttccagctccaccactgatgacttgagtggacttaccacatcatttaccaacaatcacaaagacttctgggacatctgccacctacaaggtcccgaaagaattcccagaggagcaaaacacagtcctgacctctccggtctcagtgaagatgagtcctgcactccacagcacatgggccatgagagtggggcagctcatcacacccagcaggaacactggggagcctgccagtgaccggacccgggactcagcaggtcccaccaccagggaaggctgcatcttaccttcatgtcagggctgtacttttgggactttgcctcccctgatcccactatccccatggccagcctccaacaagaagtgccatctctcctcccctcttcccacctctcgccctccattgaaggaggaagacctgtaagggacttggagcttgtcctggacctcacacttcaccgtcttcatttactaaataaaggctcaagggcggccctgaccggattcagggtgctggctctcccttcctttcccatctcttcccaacttccccctcctccctccctgcctggccccaccctttcctcttcctctcccatttcactccgcagagataaggatcaaagatgcagcaaaacccttctaaagggtttctaaaacagatcaaatctggcttgaatttccccaagtcaagctcatcattttcctctctgaaatgaaaggaaaagggggaaaaatcaaattggaagcccacaagctttgaagtcactggcttcatctcaacactctactctgcctgggttccccatattccagcccccaacctggcagccaggaatgaagatggacccagagaattcggcaatcaggtgtagatggtgaatgctttgccacatttagacttcgaggacccctctgtttatccatccattcattcattcatctatttatttattcattcatctatccattcattcatccatctatccattcattcatccatccatccattcattcacccatccattcattcacccatccattcattcatccatccattcatccatccatccatgcatccatccatccattcattcacccatccattcattcatccatccattcacccatccatccatgcatccatccatccattcatccgtccatccagctatccatctatccattcattattcatccatttattcattcattcacatatccattcattcattcatccatccattcacccattcatccatccattcatccatcctttcatctatccatctattcatccatccagctatccatccatccatccatccattcattcatttactcattcattcatccatccatttattcattcatccattcacccattcatccatccattcattcatccatctatccattcattcatccatccatctattcccttcattcatccatccacccattcatccattcattcaaaaaatgcctagtgagcacttactgtatgctgggctcaggagacatcaataagcaaaacagagatgcctactgtggtccagcctatattcttgcctcagggaatggataataaatgatacatgtaaataaggagactacagtgtcatgaggaagtcagaccacggaagaaaggaaaaaagagtcagggaaagggggatggaaactcaggcctcgcagaaggtgggagctgagctaagtcctgggggaggtgagagcatggaccaagtgggagggggcagtaatgcacactgggggatgccagggaagcacccttctaagggcaaaagacccaggtgagcaagtcagagattccctgccaaggttggggcagcacagaggggagaggcacaggacctcttgggcacattgtcagcacccgagttttcactcctgctgaagtgggagccacagccatgctttgcccagcatagtatcatattctaacttggggttgaaaagggccacactcctaattcaatggccaggtccaattttacacacagaattctagaaccagataggacctcagagataaccccctgcatccccatttggcagatgagtacactgaggcccacagagggtcacatacccaggaggcacgagtcagcctgagatgagtacactgaggcccacagaggcccaggaggcacgaatcagcctggactccacacctctcaacctctgctgtctgccctgcacctgggccctagcatcagggaaccctgggacaggacatggctagcatggctcccaaagtgccctctgacagagctccccacagaggaggggcccagaaggcgcagtggctagggttgctgttaatttccagtcgttctggtccaaatgagctttttaaaaaaacaatctggggttcagaaaaagggagagtaagatgaggtactaggaagtgggtatggtggtcccagggacatctgacccctcccacccctgaggccccccaggctggccctgatagtcctctccaatcaccccactgtgctgtacccagtctttcttgccaaaccaagcccctttgctgatgtgccagtggatatggatgccaccttcccctttgcggatggactgatgggagctctgcatgggaccagaaccccaggccttctcctccgcctgactggtgtgagccttacagaaacctgacccagcttggtgtcacacaaataggaatatctttcccacatcttctcttagacaatctccttcagtcttccagcccttttccagaaagccctctgctcgcctgactttattattcacacacattttggcctactgtatattataggcagttgttcccatgccagcctcttctactgggatcataagccctttgaggacagagattttttaatttgtgtttggagaatccctggctgctcaccctggcctgacacgtcgtggatcctcaaaatatgtttgtcaattggaatccagaagaagagccaccatggtggacaatcctagggctgggtgagcaggttcattggtcagaagcccaaatctccttgtgtcctctgcctgcagagactctccccactctaagccaccacggttctttccctacactcagcgccttgtgggaggaatgcagggtcggaggaagagaagagtggagtcattgctcttgagtaatttcaagaggcagttggcagagtggagcaaaacaagagaggaaaaggcctgtctctccttggccggaagtctttgcaaggctcctcagtaagcttcattctatttctctttgacgtgggggcaatgctctcctctctgacatgtgctgcatgcagcaagaacttatcagtcatctactgggtgcacaggagccaagctggtggaaaagcgctctgggctcctccaaaggaagctgcatcacttggatctccagggttttagcaaataagcagcccctgagatgcaaggccttctgggtcactggcctggggacccctttctgtggcaagaccagggccttgcacccaggggcaggatgagcaccttggagagctctttgcccctcacgagtgcttcaggaagtgggtgggaggcccctctcctcacctgagagggtctgcactgactggctcagaggcccttgcctgacccgagtctcactctctcaggagcagaagcatggccctcggagtcaggaggctccatgctggaccaccataagactgatggactgtgaaatctgtccatctgtaaaatgagtactcatcttgctgacaggtttgtggaagtgaatgaatgagaaaacccatggagaagaccttttaaagcataaagttcaatatatgcactattacatgaggaggtcacaagcacttaaaggcaatgccaaggttgggtggtggtagggctccttccccacccccaggccagatcttgtgccccaagtctgagccagctgcactcaccatcctcacacaggttcagcttggacaggctcctgccatcaaaggaatcctcacagatggagctggtgtcacagtcgctgacggtgtgtaggtacatagctttgttctccatcacaccctgcaacagctgcagagaaggcaagaggggaggagagggaggacgaaggccgggagagagacagagaatcaactgtaggtggaaacagaagcaaatggatagaacaaggtgcccacccctgaccctaagcctgaacaccgggaccctctgctcatcaccaggacccaggtgccatcctccaggtccttggggccgtgatgcccccactcccagcttcctcagggcttcagaagaccaaggcccttgggcctttctgatggtgggatgtgtccattcctttcaacaactctcagtggggctggaatcctgagctggggtcactgtgggttacactgggtggggccaggaggagggaaccctgctgactcaaaaggtaacctgagagcaggctctgagccctcagaagcccggggcatgccagagagacttgagcttctgttctgtgttggaaatgaaggaaggaaactagatatgaaggggcattcagagggggtacagagtccacttgcaaacaaagctgagcagaccaggactgctcccaaatccaacggggctggcatgttggaaggagcttggctcagtaggaccacagcagggattcatctactgtggtggggcccgaggagcagggagcctctgaagggacacccaggcactaagcatctggacagctttaggccagggagggcttctgtctgcatggcccccagaggctgactcattgggtctctgggtctacgccatgatggtccaggagcatatacattgacttaggagaatcctatgctctttgaaaggaaacagcctgttgacgcaacaatgtgtacaacacgatcccattttgtaagacatgcacgcgtaaggtgcgtgtggatgtaagacgctatgatggctccgggtgagaaatgtattacaggactctggctggaagggattgtggggatttaatattcctttttgctttcagattttctgggttttctatgatgcatttacattccttatgtaatgagaagaatctgttttttaagccaaattacaaagtatatacatcaatttcttgatattgtttttgtcacataaatgctcagtgactttacaaattattctctactttcatcaaggttccagccatgagtttatcttgacctttgcttctgattctctttaactatctggacatttaaccaaagaacagcatcctttagaagataaaagccccatgaggatgggtcccaggcccagtatggagcaaactcaacccttcaacccagaggaggctgggaggagaggatgcagggctggcaggtggcagtggggggacaatgcctgttgattgagagatcagtcaatcagtttctcttcagagggagggtgggcaaggaggcgtggcaactttcataaatagacataatcagggaaggcggctggcggggttgctctgcagcagagcaaaacaagaattccgtattttctttcttctttttttttttctgtttctttctttcttttttttttttttttttttttttgagacagggtctcactctgttgcccaggctggatggcagtggtgcagtcttggctcactgcaacctccgcctcccgggctcaagtgatcctcccaactcatcctcctgagtagctgggattacaggcacaagccaccatgtccagctaattttttgcagagatggggtttcaccatgttggccaggctggtctggaactcctggagtcaagcgctccactggcctcagcctcccaaagtgctgagattacaggtgtgagccactgcacccagctgaagcccctattttcatgacttgagcttggcctccacagacctctgacatttgggctgagaagagaccagaactgaccagtcactgtatacatgtccttctaatgacccaggagggctggacgcctctgctgttagcccttctgtacatcccccataacgggcacacacacgcatgtgcacacacacagccttggggctcccagtatctgcgggcctctcctccagcctatgggagggatggaacagggggtggtcctcggctctgccaggatctctcctccctgccccagacaccacccactctggcttccctgtgctgcagtggtgtccagttcactgggctcccaattccggccctccacccaatgcctccacccaggcagggcctctaggtggggccgcgggcagctccagcactgctaagttgcaagggaccctccctcatttcatgagcactgtgtgcggcagccctccctctggcttcactccttgcggggctgtgaagcaggaggccaatgtctcttttgcctgcaataaccctccctctgccaaaggcaatagcctctgcttcccagaggccacacagagccagacagggcgctgcccctggggagtggaggtgtgaggccccactgccatttccaccttcctcctcttctggtcagctcctgggacggggctggaatgcacggcttgttagccagaatgtgtgtgaagggcagctgtctccttcctcctccccacccctcagctggtccagcaggagcccaggggatctgctggggagagggactggggccgagcggggccagatgtgagtgcacagggcttggaaaagctcagacaactctactcatgtttgttacttggaattgaaacctacgcatgttctgtctgcccaaggtttcttgggggctgtttttctttcttgggggaggaagcaggcattgggaccctcagatcatggatcttactgtctttggaccaagtctgtgctctagaagatgaaactgatggcaagtgctcctcccaggagcactgtgttgggggtaggctgatggcatttgcattccgtccctcccattttaaacataagccatcccagaccaaagaggcaaaggaaggaatggatatcagagcgggaagaggccccgggcacagttttcctacacagggcactggctcagctgcagggttgctttgtttgggaattgcatgtcagcccctttggtgaccactttctgggccccagatcaggcagagaagagaatcccacctcagactgccagccagtgtactccagcaggtggggatcctgggactgaggcagggctctgagagcttgaagcacatgggcgagatgtggaagccacagtgacctgtggatgaagcccaaggagactggacctcaacttgcaactcaaagagggaggtcttgctctaacagggaggtgtcaccctctccactaacctcttggcaatcatgatttacttccagacaatttcacccaaggcacttagaagggcaggttcagagccagggatctgcttctagattctgcattttagagctggaaaagccctcagccatctgtgccctgcagccctgtgccctggggccatctgcgccctgcaggcctggctctctgcaggaatgcagggaacacagaagccaagggctcccatcctagctcctctgcgtattggtttcttgggggaacttggctcaattacctgacctcattcagcctcaggtacatgacctctaagatgggaaggtgggtagctgctggtcacccaggatcactgtgagcctcccgtgagataatgcatgtggcatgactttatgaacaaggtcactcaggggagctggtggcagtctgatgagaaaaagcatcccccagcatcttctgactctgcctggcagccaggtaagggggtgtccaggttcccaaggcctccctcctacctagccagtctcagaaacaaagctgtttgaagttccctttgtaaaaggcaatcgcgaatgcactctagggctgatatcaggaccctggctcttcaatccttctctggagatcagaaggactccattaattcctcctctgagtgggtagcacgagcctcatttgctgctaccaagtcagtttctctgggtacccgcatctaactctgcagggtttatggcttttctttggattacctcactttaaactcatcaaaaccaaggaaaaaaatcacatgagtgtggcccttctccaaagagagaatcactaaggaggttttaaatgttttcctcctctaactgtacttagttaagctaaatcataacccaaagctggacagagacagatattttagaaataacctctccccacatatatcccaccactggcacatgcacacgcacagacatgcacacacacacacatgcacacacacacacatgcacacacacacatgcacacacacacatgcacacacacgaagccatggagaggagctgtcacctgagccatctgcaccctgagtaggctcttgagctgtgacatgagtcaggtggagtagccaccaaggcaatagcttccctctggcaccccaaatgcaggctcacattctctccagcccaggcagttggatgagggcccggcagatatctgcgggcccagcaggcggggaccttcccacctggagaaggcacctccaggctctaggtctgaagtttcccaaactctgtactcctctccatccagttcactccagtctcctccagctgtctttgagacagcatgcccaggagataggacaaaattagtaccaagactcacctgagtgcccctggctgaggctgtagagccttgtcccctcagatctcagcatttgccatggtggccagagagctggctgccaccacgctgagagccaggccgcccctcggaccgcgtccccacagccagccaaatccagatggagtcatagaaaggggctgcaggggcgcccagggacgagtctcagagcaggaccacaggggccacttctgcaggaggaccaggtcaagatgcaacctgtggcagagtgggggtctgggcctgggggacccagaatggggggtgtgcgcctgggactccctgtccttggtgcctggtcctgggtagcgatcaggagatgttctgaggaggcaccggcagctcctctaggtactgcctgagatgcgaactgcagctgctctcgccgccagtccgtataaaataaagttcttggagcagttgcggaggcttctgcaatggggtctggaatacggcccccctcctgcggccaatcgtggcattacagccccgtgtgggaacgcccgctgggcccagagcagcgcggtcggccttggccttgggactccaacaccccagtctaaaggtcctgctcaaaatactttttggaagacttctgggggagtggcagctagacctggcttatgagccacgcaagaaaaccagtcttgtaaatttatttatagcacagaattggcatggctcaattcattcaccaagcttggcacagagttacttcatgtattttcctggagtcacattcatcctcagtggacacggattggccacactgggggtagtcaggaaaatgccccagggggttccacggaactcagcagcagaatcagcgtttctggctcattaacgctgcacaggggctggggggtgcaggatgaagactagctggctgtccatagcaattcagtatgggagggggacccaggcacgaataatcctaaacctgagcatgattgcttacgtttgaaaaaggacatctaggccgggtgcagtgactcacacctgtggtcccagcactttgggaggctgaggtgggaggattgcttgagcccacccacaagttcaagaccagcctgggcaacatagtgagaccccatctctaaaaaaaaaaaaaatctctttaaaggcaatctaaccatatgtgaagggagctgctaaattcagattgaggtggtagtatcaggggcatcagagaaatcaccataattgtccaagccagggtggcagagttaggctatgcagatggcttccagaggacagcacccagaggtaacattcatgaatgcattcctgtttgttggtgaaaagttcagcctcaagactccagggtcaggcttcgtacatgaaaagtgtttgccaagactcagctgtgtcactgcagctgcccgcccacagctgagtcagaaacgccgtcctcattctcagtgactgccctgcctgactgcctaggaagcagctccaacatcaaactccattttacagaaagaacaaatgataattgtatcattatggtaataatcccagggagcggaggaggagaaggaaaagaagacaacactttatagcatataccatgtgtttcttatatattagctcattgaacctattcaacaaccccctgaggcaggtgctgctattatgctcatttacagagacagagaggaagtgacttgtccagggtcttgtagccagtaagtggcagagctagtattcaaccctaggcaatgtgatcctagggtctatgctcttaacccctcccctgtaccattgcctctcaaggggaaacaaatgtttttgtcccccatcaattcaccaacattcctaggaatgtaatcttaaaaacagccagaaatgtgctcaaaatatgatgtccaaccagcctgggcaacatgacaaaaccctgtctctacaaaaaaaaaaaaatacaaacaatagctgggcgtggtgatgcacacctgtagtcccaggtgcttgggaggctgagatgggaggatcaactgagcccaggagtttgaggctgcagtgagctgtgatcgcaccactgcaccccagactgggtaacagaacaagatcctgtcttaaaaaaaaaagtgatgtccaaagaccttccctaaagagatgtgtatgttagcaagaaatgtggtagttagtgtccccctaaattcaagcattggaaatgtaatctttattgcaacagtgttgggaggtggggcctttgtgggggtatttgagtcatgaatgtatttgggatgccgtagaaagggcttgcaggagtgggctggcttgatcctctgcctttctgccatgtgaggactccacgctcatcctcgcttgtcctcccacctcccgccctgttcgaagcactgagtcctattgcgtgataggcacataccacacacaatgtgtatatcggtctcctgctgaagggggtttgggatgtttccaatctttgtctattatgaataaagctgccggaacaggcaaagggagatttgacagtgaagtataggaatgacctggagggctggttttctcatgggtgagagtcctcccggcagctcttagctcagatacctccttgccactaaaatcagaattgtccccaaaatgatttgcttccattcaatcacggatggcatttgtagtaggcatttcccccccagaagctgaatgaaaatgtgattgccttgatagaggagggttcaatagacttctgaagtagtttcatctatgaaatctcagtatttgaaatggagggaccaagctttttcagtttgttttttctagaggtaggatgtcactttatcacccaggtcggagtacagtggcacaatcatagctcactgcagcctcgacctcccaggctcaagtgatcctcccacctcaacctcctgagtagctggggctacaagcacatgccaccacacccagctaattttttaaaatcctttgtagagatgaggtctcgctatcttgcccaggctggtctcaaacttctgacctcgagcaatcctcccgcctccaccagccaaagtgctgggattacaggtgtgagccaccatgtccagactccatttttgactctgataaatggtgctgctgtgaacattcttgtgtgtgtcttctggggaacatatgaatgccattctcttgggcatatacctgggcatggaatcgccagggcataggatggccctgtgttcagctttggtagacactgccaaagagtttcctatggtggttgtactagtttatatccagcaggggatgaaactacacttattccttgtccttgtcagtgtcagtgatgtttattccattttccctgctctggtgcattgtagaggtgccatattgtggttttaatttgcattttcctgatgactcatgaagttgagcacctttaattatgtcattaagtctgattgttgacttgaactctgggcccgttacaccagcaggtcctgccctatggcttggggttggctgttccatctgcctggagtggttccaccagatgtttgcacaactaacttctttgcctcattcccatcttttctcaaatgtcactttgttcatgctgctgagcctaatgattcctacccacaggccaggcatggtggctcacgcctacaatcccagcactttgggaggccaaagcgggaggatcacttaaggtcaggagtttgagaccagcctggtcaacatggtgaaaacctgtctctaccgaaaatacaaaaattagctgggtgcagtagcaggcacctgtagtcccagctactcgggaggccgaggtgggaggatcacttgaaccaggcaggccgaagctgcagtgagccaggattgcaccactgcactccagcctgggtgataaagcgagacctgatctcaaataaataaataaataaaattgctacacaccccttgccactcttagtccccctcaccctgcttggttttgcttactgtctgctagaacagcagctccaggaaggcagctcacttgagtgcttcaaaatgcctagcagggtgcctggcgcacagtacacgctccagaaatattggttgtgtgacaatctgaggaaacagcatcaggcacagggaacagaaggctcagaggcctcagtatggaaacacactggacatgccggaggggcagagaaaggcccagtggccagagcacagaggatgcagtggccagagagaggaggtcaggggagagggaagcctgggtctcaccctgagcacagagtggagctgaggccacgcccttcttttttgtctctatcttctcccagggaacacatcgatcctgtactgttcatatttttgcttctttttttttttttttttacatatttcttcattatagtttgctacttcttgtttaaactttttaaaaaaattaattgtggtaaaacacacattgcataaaatttgccatcctaacccttatttatttgtttgtttgtttgtttatttatttatttatttatttatttattgagacagagtcttactctgtggcccaggctggagtgcagtggcgtgatctcagctcactgcaacctccacctcctgggcttaagcaattctcctgcctcagcctcccaagtagctgggattacaggggtgaaccaccacgcccagctaatttttgcatttttagtagagacggggggttcgccatgttggccaggctggtctcaaactcaaatgatccacccgcctcagcttcctaaagtgctgcgatcacaggtatgagtcaccatgctcagccctaactgtttttaaatacatagttcagtagtgttaagtacatttgaattgatgttcaaccagtctccagaactcttttcatctttcaatactgaaactccactcattcaacaactccccgtcccctgtcctccagcccctggcaccactcattctcctttctgtctctttgaatttgactaccccagggaccttgctatttctttatctgtggcctactctgcaaaaatacactcgaaaatgtttacctttagtattttctttttggttagtttttaatctggttcacatgaaatataagtgcttttcaaaagcaatttttgtccatcgtttacaaaccagtgtttatcttttattattgttcagctttgtaaaaatatcttggtgagaagtatgtaatcagctgggtgcggtggctcacgcctgtaatcccagcactttgggaggccgaagcaggcagatcacttgaggccaggagttggagaccagccatggtcaagatggtgaaaccctgactctactaaaaatacaaaaattagctgagcatggtggctcacgcctgtaatcccagctatttgggaggctgaggcaggagaatcacttgaactctggaagcagaggttgcagtgggctgagattatgccactgcactccagcctgggtgacagagtgagactctgtcttaaaaaaaaaaaagtatgtaatctttcaaaactcaaaatttgtatttatcatttttaaaaagtaacatttaatcatataatgaacatgatcttgtttaggagttcattttggtaaaaataattgtacacatgaaataagaatttagcctttgtaaaattgtattcaatcaataacataaatgttttctgatttgtcatcttgtttatctcaaagtatccatgcagtctgaactgaagtctgttcatccagtctgaactgaagtctgttcatccagtctgaactgaaatccgtcaaccaccctgacccacaaggtcgctaaccccagccagcagtagctagatctcagggaggaaaaacagatctgagaaaagcggcctccaagtcagaaagcagcccagcttttaacatttttatttggatttcctcctctataattttctgtattcccctctcccctcaaaattatgagtactttattaattagaagaaatggccaggcacggtggctcatgcctgtaatcccactttgagaggctgaggtgggaggatcgcttgaggccaggagttcaaaaccagcctcgccaacatgacaaaaccccatctttactaaaaatataaaaattagctgggcgtagtggcgggcgcctgtaatcccgcttctcaggaggctgaggcaggagaatcgcttgaatctgggaggcagaggttgcagtgagctgagatcgcaccattgcactccagcctgggcgacagagtgagactctgtcccaaaaaaaaaaaaaaagaaaagaaaaaagaaaaagaaaaaactacagtaacctcataaaaagataactcagattatttatcctcagcacactaatttatatgcttagctaggaaagcaggcatgtcagcaacaaatgccactgtcacaaaatgctgaattaggagtaaatccctacacttacagtgtcaagtcttggacttcaatctgatcattcctaaatgcacatcactgggcaatcgctaagcttcttggtctctgtgttgtcacgggacataaaaataataactccatatcacagaatagacagtgggattagacagtggctgagaggccactgacaaacctcatgagatggtcctaggagtcccttgaaaaaggattctctggtgaaagccaaaagcatgcctttattgcaggacttatcagagcttttaaggtgctcttgagcctggtaatcctccaagagggggatgtagtgttaaggcttctccattctcacttgaacagagaataaggctagtgttccacagcatgcactgagggaaattctgagctgaaattggtagtagagatgactttctcaatcattgaaaataattttagaaaaatgttaaggcctactgctccaagtgccacatcgtaaaagacgcccacactggtggagtctgaggaggagccatcagtcctgagagggcagtaaggccatcttacctgtccccttcctgaggaaggggccacgtcccatttgtcattgtctcccatcctgcagctcagccctataaatgcgagtggcctgaacaccttgctcaaggccaggggccacccctgcccactagcctcctccatcctgtcctctgccaccatgacacccacactccttctcttgtccctctcacccccatgcccacctactgagcctctggcactgcctgcccttcaccaccaccttccagactccccagcacagctcacccttcaaggccagctcagactctgcctctcctctggagcctcctctgccagctgggcctcagcttccctagataattccagtgctaagggctgaccacctgctgaagggcctgaacaacatgcctctggttgcgctgagctcattaaaggcctggtccatatgttctacccttgcggctccttcttcagcatctagcccagtgacaggcccagagcagataatgagcccactctgaccagttggtgtggagactgaaggaactccatcttggatgctgacccgccatgttgacttccaattcaccccagttccaggaatgcctctaagatttctactttcacatacttaccgtgaatcctgccgttgggtctaaacaaccttgacgtaaatcctgcccttagcaaatccatgttataccccttccctgtgttatataagccctgggatagggggtgttggtgtggggttctaccatctcatcttgtgcccacctaggacatggcagtaggtttgcatagacctgctcaccacagaacggttggtgatatggatggtagacttcagagaagcttcgtgaagcaaacactggattctgagccatgaagcctggtcttgactcccatctccaccctcctcagccctgtgaggtaggcaagtcacaaaacttctttgaacctgagttttcacatgctgtactaccgggttactatttcccggccttaccatccacctcaagggtggttatgaggcgaaggcactttgaaaatgctgaagctcttctctaatgtcagccttactgttatttttcagacttagcagcccctgacaaatggagtattaatcacgatgatggggctccctatccagagtccagctgctgacagctggcactgagtccaagacagcgggagcaaagttctctgccttgtggagttccctgcgccgtcatggaatccacccaaccatctgcttcgtctcgatgtgcttggctcattttaattcttttcccagagtgtggggatgatggattccgtgagacagcccaggttttctgacaccggtccagggttgtagacagcaaagtcaatgagcttcctccgtgtcacgttcatagcccagagacccaagagccagccttaactggaactgcttattttgtcagactcaatgacccagggtaccctttaagggatctctcttggagttgagatgatgtaaaatttgagaattagattatgatatcattttaatgggggtaatttgtaattggtagccaaacatgtttattcaaatgaatcataagaaacttctcaaaacagggtaagatttggggccaaaacttgtaagaaggaatttagtgggatggggcaaaatagacacccatgttgggaaaagacacctctcacatacaggatatggaacaccaggcttctccaggcatataagaaaaaatcttacattggagatggctttgaggttgatggaagtcagaaacagttggggaaaacagctaccagttgagtaacctttatctaaaatgcttgggaccagaagtgttttagatttcagggtgtttgtttgtgtgtttgtttgtttgtttttctgagaaagggtcttgctctgttgcccaggctagaatacagtggcctgatcacagttccctgaagccttgacctctcaggcttaagcgatccactcacctcagcctgggactacaggcacgcaacaccacgcctggctaatgattttaccttttgtagagacagggtcttgctatgatgcttaggctggtctcagactcctgggctcaaacagtcctcccgcctcagcctcccaaagtgctgggattgcaggcctggaccaccgtgcctggcctggatttcagatttttttagattccagctcaacatccctaatttgaaaattctaaatcctacatgctgcaatgagcatttcatttaagtgtcatgttgacactcaaaaagtttcgaattttggagcatttcagattttggattttcagattcggatactcaacttgcatttcaaaacttaagctgcattagtaaaagcaggatgaacagaaagattgaggatacagagcctttgagccctgcgttaatgagctcacagttggtgtagtatgctcagttctaggttcttctgaaagatttagtcaaaacttagagggtgcccaccagagtgactaggctggtgaagggtccagagaacaacagcaaaatgcagtgcttaacccagagaagaaactatgcaacggggcatgactgtgttctcagatacatgaagggctgtcatgcagagatgtaagttttctctgaactatcctagagggaggggggaatgccaccaaatatacagaagttcttattcaccactgagctgtctggaccccagaaccctggctgacgcctggaaattccctaccaatggcattgcttaatcagagcttgggtaatctgtactgcatggaagtctcacagagtagtttcccgcactgggtggctgcctgcacccagtaaccccgatgcctctcccaggtcaaagaaggccattagaagaaaactttttccaccttgataaaaagtagcttacaactgactttgtgtttagtttgctttggttggggaaaagaaagaacattccatgcatgtttttaatagcaagaactaaaaacaggaaatattatattcaataaacctaataagtaatactaacaaatatatttcagcggcagattataccagaaagagaaaaaaaatgagaaaaaaaagaaataaaggtgaagaaaaattgagaaggaatgatggagataaaagagaggaaaataaggcaaataaatggaaaaagagagaaagagggagagggagagaggaaagaggaaatggaggaaaacagtgaggaatcagaatataaagtcatataacttatttccttctcttccttcctgaaacataacacatatcatggctagtgcaaagtgaaggttttctttgtttaatttagatcttatatttatcaaagatatgcatgtatttttaataatttaaaaaataaccatagctgggtggggtggcttgcgcctgtagtcctagctactaggaagcctgaggcagcaggatcacttgagcccgggagttcaaggctgcaatgagctatgattgcaccactgcactccagcaagatc

SEQ ID NO: 467 - DNA, 81527 bp, Homo sapiens
tatttttggtgattcacaggtaagtattttttaatttgactgttagatgtttatttcaatttgctttagatgagggaaagaatcttaaacaggtacttgtttcacaaacattggcttaggatttttaaatctttaagtgagtcagtagagaaaaataattcatagaaaatagtagattgtatacataagacataaatcatgaaggttgtacacagattaatggaaaatacaacaataatgattgaagtgctataaatattccctcctaaaaagtttattttgtcccaatcaatagtttaactttcattacttcacctccctatacctcagtttgctcatctgtaaaatggaaatagagtatctgctttcaatgggttgctgtgagagtgaataaattaactcaagggttaataagctaataaattaataaatacaaagcacttaaaagagagcctggcacttagtaaacactctaaagatgtcagctagtagtagtgatggtatttcagaagattaggaagaagcgtttacaatcctagatgggtacaagcattatctccatttttcaaaaataaaggaatgagtggaggcaaattgttattgatcacactgctatgcagttgaaatcagaagttaatactaggttaatgaatgaatgaatgttttcttgtatctatggtatatattatatgaagctatgaagtgtgttttacattgaatctggcagtgaccatgcctcatgatgaacacaactgctgccttttataagcaggtcttttataagcaggcccttttttttttgagacggagtctcgctctgtcacccaggctggagtgcagtggcgagatctcagctcactgcaagctccgcttcccgggttcacgccattctcctgcctcagcctataagcaggccttttataaggcaacagcaaggaggaagccagtgtatgtgcaggggaaggaagccagagcaaggctccagaagcagatgatgaacccaagagcgcaaacacattttccttgattttttttttttttttttttttttttttttgagacggagtcttgctctgtcgcccaggccggagtgcagtggcgcaatctcggctcactgcaagctccgtctcctgggttcacgccattctcccgcctcagcctcctgagtagctgggactacaggcgcccgccacaacacctggctaattttttgtattttttagtagagaaagagtttcaccgtgttagccaggatggtctttccttgctttctttccttcttttttttttgacagtcttgctctgatgcccaggctggagtgtggcggtgtgatgtcggctcactgcaacctccatctcctccgttcaagagattctcatgcctcagcctcctaagtcactaggattacaggcatgggccacccctcctagctaatttttgtatttttagtagagatgggattttgccatgttggccaggctggtctcaaactcctggcctcaagtgatccacccacctcagcctcgcaaagtgctgggataacaaccgtcagccaccgcacctggccacattttcctcttattactgcttttttgaagtttccctaattgatgtgtcctttactgtgtggttattttccaaattttttaataccagataaaattttttgagtagctgttcccataagaaaaaacattccatgcattcagggatgagatgggagtggactttatttttggcattttttcctttattctctaatttattgtacatacagtacctcaacagaattgtaggccatgtgtcctatcacgaatcctgatagagaaagaatcgtcaaaacaatgacttcacaattctttaaacacatcttcaaaagccctaaatgtgaaaaacagaatagttgcatgagtactcgaagtacagtttctaccaaatgtgtatcacttttgcaccatcccaaagtaagtcaagaccttctgtattcaattaatatttaatgatgtggcttaactttgggatggtgcaaaagtgatacacatttggtagaaactgtactttgagtactcgtacaactattctgtttttcacgtttagtacaatatttacaaaattacatgagatagtcaacactttattataaaatagactttgtgttagatgattttccctgactgtaggcaaatgtgttatgaaagcttttaaggtaggctaggctcagttatgatgttcagtaggttagttgtattaaatgcatttcaacttacaatattttaaatttatgatgggtttattaggacacaacctgatagtcaaggagcatctgtacttcttacaggtaagaccagataaagatatgttttttacactctttctgcaatgctctttactactggagcgtttgtctctataaaggatatagagctagtccatggtcatcagcaacttgtgatatcaaaagtgaccaaggtcattagtgagtatattaaagattcccaaagaaagcaatttcactctttgatacaatgggtaaaattgaaggagtttatacatatttgcttctgtatagtattcctagttccagaaaggattttaaagcagctatttttcctttttcctaatccctagtgttgaattgtggactaaagcatctgtgtgttgaatatgttacttgatctgcatgaatatcattctctatacctgttgaattcttaatcattgtttaagaggtccttatttgtgaagcctttcctaatttccttcttggggttggggtgggttatttatcttccctgaagagagattacaccaaaagccataataaaatggacaaaatgaatgacatcaattatgtaaatcatgaattgtatgcctgggctctatttgtgtgtttgctcgcattgtcctcccctcatctcagatattttggtcaggttaggtctggccaggcaggcagtgtacagctcttcctcctccttgtgagcagagaatcttgacgacaactttatagttatacttaacacactgcatagtaattatgtgtttgccaatctctcccatgagagggcttcttgaagttaagttattcttcttacatgtctaccacactaccatgctcagcaaatgtcactgaatacaggaatatagaatagacactacttataattaaatgaagcgagattgacagtattcactcatgtcttatcgtttcaatgggccccttcttttgatgttatgtagttgtgatggctttctgcattgacaaaaggttcacagggcagaggaaagatgagtttcaaaaacaaccacctacctcccaaaacaacaatgaagcatacaagcgttgtgaaatgtttctcttcaacaaggtagtcagctggctgcccgcagagtaaatcaggtctgttactttcattttgtgcccagaagtaagaactcatttttgctgctgcttttccccagacctaacttgatggagtggtttggttattattgacactttcacttctgcatgctaacctgtatagcatgcaaaaagaacatgagacctaccaagatccaattcatccataccatttctacctaagattgtgccacactcagatctgaacatgtctcttcttgtcacagggcacacattaatacctcttgtcctaccccttgctccaagaacattttataggaacactaacagcagtgttagtgtttactccctgtactgttacatgtatatgggagagggggtgcattgataggtgcacttaccattgtaatgatatagtaatgtgcttgctttccccattggacagtgagtttctcaaaggccagggcccgaactttccttaaggctgtgcacatagcatgtggcacgagataggctgtccaaaaatatttgatgggctgaactatttgagggggaaggagcatggataaatgttatgctcccccttctctgttggtataaatcattctggaattccattttaccactccagccctaatatatctttttcttctctcagcacccttccaataaaagatggcaaatgggaaacaaagtcaaagttgagtcacaccagttaaggttgggggtgaggataagggtgaataacctgaaaataaaggaaaagaccaaggtttgatcatatgatgcctttgagtgaattagaaaaaggcccccttcctcagagcaatgaagcctgtcaacaaggcacatggcttggcatgtgactaccaggctggatttcagccccagtatctcacctcagctggtgctctgtgtaggatgtaacctgtgcaaatctatgcagtggtcctgagaaagatttgttctgttttatttttccttgcagctagccttaatctaaaaatcctagaggttcctcaagtatctccaataatatttaaggcttacctttggtcctttgttttgcaggtctacaggtcacaatgattctggtgtgaagcagaggatgggccagaaagagattcaaaatgctacatcttcaaatcacttcacctgtccctccagtagcccttcaggtccttggcatcttcaactcctgctatcctcacatgtaatgaccctcaaattaagttctacaaattacccagatcagagatatgttccttaaagattaagctgctttaaagttgaaattgagatgaaggctctcaaaatcccaaagaacaatgcacagttatgcgtctgtttgccagggacagtactaccaactgatatcacaccaaaatccatttccatgcctacttctcattggtttcttgccagcctgctttcgttctgattggctgcctacattatccccacccccaatccagaagaagccaagtgatctagttcttgggaagctttcattttttaacactcaagttacgtaagtacccacaactgttttaactgattttttttttttttgctgacattgtagaatgaattcatgaattttacaagtataatcaaagacaaccaaaaatttttacttttcccttcaaaagctaagtgtagtgtagctcccctgtagtctaagttagagaagaatactaacagcgtgtttttccttctgtgctcagcaagccttatctgtacttgctagtttcacattccttgaggctcagggagttcctgtttcacctccctagcgcagctgcaaagttacaaggttaatacagaaacatggtttcccagggatgtggaacacgtagcatagataaatgtaaaagactgatcaactgcctttgttctcgctcttgtaagtacgcttcctgcatcacgtagctcctggccactgactgcttaaaaggtggctgctttctttgtccagggctcagactttcctggacgctagtcctactgagccaggtgatcaccttttaataaagacctttcctgaactcactctgttcggtctctcccatctttgattgtcccaaaacaacataatagctgaaatagtcaaagatattaatgtagacagaatctccttctatatttttgatatatactctatatttcttatgccaacaccatctggctcagccctaaccctcttcaacacagtcttgtctcctctctaattctttttcagtcatactgtttcattttatttttctacctctccttccttttcaatgtttctcactcccattttcctaactcctatccatcattggtttccagtcctcaatttgaagaaacaatgttacccattcttcatgggaggacaaatgcatcccaaattccatgatgcctaacttatatacttcttgcctcaaatataattactaaaaacaaatacagtataaatattaaacaaatgaacaataatcatcaattggtgggttactttcaaggaagagttgttttgtgacaaattctactctctcattcctataccacattcaccaaggttgctgcacatcatcttcttgagggcaccaaggagaacatcacagcagtaagattacaccttcactatgtatcaagaaacctctggcaagtgagtctcaattcctacttcagactaaacacaattctaatcaacagctctatgactgtgacaagcaacattggtgcccacatactagctcctaaaatattctttatgacttccttttttgtacaaactgatgtggttcttttaagccactgagctcatccctactataatgccaaggactatgttaaaaagtaattggcttattcacaggccctctcctaagagacccattccttactcttccctcttctgcctttacttaactcacctcattaccaagttcactaccctcccgttcggatcttcaccttatctatactggctgtcaccttgattcctctcaaaattaagtttgactctctccttagtcaaactgatctcagcactactcagtttgagtaatgcccttccaggttctgcctagttcccatcctactgctgtcccctcaggctcactcggttcacctaagccctgcagctaagactcctgtaggttgaatttaagtttcgaagttcagattccccatggcctttagaaaaatcctcatacttcaggaaaagttggagaaaatccataaagtcagttagcttacacatagttctgaaagctaaagaaagcaataactaaaatatagaggtgatcaaattttttatcctttcccatggagctttttttttaaaaaaaagcaataataaagttatatttcaccattttttataaatccagctgaaggagattctggtcagtttggggagttgagcgctgagaggctgcccagtgttttctcccaactccatcttctgaaaagagacaatactatttaattgagatagacacaaaacacaggggggttagtcagtttcccatcctcctaacattataattggttcaggagtgggcatggactcagacaacaccaattagatggctccctaggttggtatattccattattgggagacagctgttctctctccacttaggtttagttgtgatgaagacccctcagagcagctggaggccaccttcccagctgcatggagaaagcccacctaaagtctgaaaggttctatgaggcaccaccttagatatttctgaattcttaacaaatgactttataattccaccatggattttatctttttcccagaaaccattccttaggtggagaactttttgccatctagaaaggataggattgaaaagcaattttattttcaaagccagtgagcactggctcttttcatatcttctaaatcctaaaatttatttgaaagctgaaatgctccttctcagtttctctctctcctctcatttagtagaagccatactcagtctggaaatatccttagcagggtcatcgaattcattccttagacaaaatgtggccaaacttacccaccaactcctaacaagggtttctccagcttccaataacatcttcctctctttactataaactcaccaatagcctcctagaaggccctagcgcttctgctaatattgtacttgaaagcctgtagctttcacccacaccctcctccaggcctttctgtcctctaccatctagtcccaaagacaatgccatgtattttaggttttgttatgtcaatttctcacttccaagttatacaatttgtgaattatatattgttaagtaacaaatacataactgagtagcttaaaacaataacaatcatttatttcgttcacaaatctgcaattttttgcatggctcagcacagaaggcttgtctccactccacacagcatcagctgggctggcttgactggaggatctgcttctaagatggcccactcatatggctggcaagttggggatgactgcaggctggagctcaaccaaggctgtgggctggggcctcagttcctccctgtggatctctctataggctggtcaagagtgagcatctcaagagaaagcatttcccctagttaggcagaggcctcatcaccttttatgatctagcctcagaaatcacatggaatcacttccactgtagtgacgagcctgcccagattcaagaggaaagaacagagacacatctctctacgtgaggaatgtcatgaccatattgtaagaagagcatgtgggaagggagatgtggccatcctggaaaatacaatctaccacatattagattgaacatgggggcaagtgtcagtcctttacaatctgggggcatcatgttaatctaaatagcaatctacttagtccagagcagtagttctcaaaggctggaccacaggccagttctgattcatgacaaaagttccatcatatatgacaaaataagaaaaataaatacaacataaaggtctataataaaacttaatttatttaacttaaagggtagagccctacactgagatctcttcccttttctggtgttaaaatgtcttttgttaaatgatagtgatagtagatagtagttgttttattaatgatgtcctatcaatctcctcccctttttttacattttttctgttcaattaaatacagaagtctaaagaactactgcctaaaagttatcataacattgaatttagcctttgattgactacttcccaaataatgtggaggcttcattgatttattagtatgcactttgaatagtaattactttgtggatgttcagaaaaagccatgcagctacctatgtaacagctcaaactcaaagcctacgggcatttaaagttgcctatgaatagatctataattcaatgtaacaatatgtaacaagagatactataactctcaaaatggactaaaattgtaaatctatagatataaataaatgttcagattctcacatcaaaggaatctttgacatgagatccaggaatctgttgtaatcacttggttcacatgccagaaagtaaaatgacattcaatgtgaaggcttagaaaatagaaggtcagaggagaaattaggcgtagagatgttggatgtatgtgtggcttatctgctagaggagtaggagttaaaatggggcaagatatggagataagtgttgggagtcatttttataaaggtgcacaagctctataaattaatgaagaggtaatgagttctatgtataaggtattactaaaagataattcattcagttatttactaacttactgttttatggactttttaggtataaaaaaagaacaaaacaaaatccctaccctcaaaaagcttacaattcacacagaaggacaaacctgtgaacaattaagtagaatacagtatgaggctattagcactatgggtgccctaaagagggaaagactcattcttcataatactggtgacagggaaggtcatggaatagagaattacagattgctttaccaaaggttaggattgaattttgagaaattctcacaactgggggcaagaggaagaagaggaactggtgaaggagttagaaaagcagttttaagagagtagaggaatcataattgacataaaagtaccaacacaaggagtttaaaaatagcatcagcaaatatatcaaaagctataaaaagtttgaggataaggattgaaagattaataaagagggaaaataggtttattttatactaaggggtctccagaaatgccttggtctaatttagaaatctttgaagtaagaatccaggaatccctccctaatctggaacacactcctggaaaataatgttgtattcaaaatccaagctcagaaaatgtagcgttagagtagaaaggacaaaaatggcacctggacttttcctaaattattgcagtccttaaggacaccggtcttcgcacaatatactgtattaagaaaatgggctaggcatagtggttcacagctgtaatcccaggactttgggaggccaagtcaggaggaatgctagaggccaggaactcaaagaccagcctgggaaacgtagcaagactctatctctgcaaatttttatttgtttttattattattttttgagatggagtctcactctgtcacccaggctggaatgcagtggtgcgatctcggctcactgcaacctccacctcccgggctcaggtgattctcctgcctcagcctcccaagtcactgggattacaggcacgtgccaccacatacagctaaatttttgtatttttagtagagacagggtttcaccatgttggccaggcttgtctcaaaccgctgacctcaggtgatccgcctgccttggcctcccaaagttcttggattacaggtgtgagccagcacccagcctgcaaatgtttattttttcaattacccaagcatggtgggaggatcacttgagtgcaggagttacaggttacagtgagctatgatcatgataactccactgcattccagcctgggcaggagaggcagaccctgtcaagaaggttgcgggggtggagagagagagagagataagagaggaagaagaaggagttggagagggaagaggaggaggagagagaagaggagggggaggggaggggagaggaagggaggggaggggagaggaagggaggggaggggagaggaagggagaggaagggaggggaagggaggggaagggaggggaagggagaggaagggagaggaaggagaaggggaagggaagggaaaagggagaagggagaaggagggtaaaaaaaaaaaaggagcaaacacaggtcttctttgtactgctccataaacacccactgggtcggccaaaaaggtggctgaaagttattgcagtgttcttttgctttaaaaaattgaaactgaattgctcatacattaaaaggataaaaaactaaaaactttgggagacatttaaaacagggttatctcaaaaccatggttaaataaatgtcaactgacaaagtattactgaattacccattccttttccttctccccataagggaaaactagctttcagaacaggacaaagaagagaaagccataagaacgaacaataagtgctttttaaaaaccatcttcttttctataaaacttttccataaagtcacaacgtaagagaaggttgaggcgcctgattaaataaattagaaaaaaggctttccaaaccaccaatatgaaaccaactatcgtacttaaaacctaggaaatataaaacagaatgggaggggaaatggtcttcagtccagttacaatatctgtattgccagccttacagaataggagaactcttctaagtataaaactatacagatttgtgtttattaatttacagatagaaggaggtcaaagataaagaggggttttactcagaggtataccccacctcacaggtgaaatttaattttggacataaaaagtgatagttgtacccagaggctcctaatccaagctggtcttaatatttccttgctccaagtgtcattccataagatttcctttttaggcagggagaacaaattttttctctggaaatagccaaatatgtccttttatatggaatgcctcaattacacagaaaattattagattctctgagtagttcttaaagcctccacatggtcttcacgaatgatttatacccaagtgctttcctgaaggagcacgtgaaactcacatggggctgtgcttggaggagcagaggcgaggccagagtccggacataagcatgctgaacaggtcaaacaaaacaagggcgatgtaatgttgtacttaaatacttaaagaaacccacatctgttttctcgatttcaaatggcatgaataggtttgcctttcagatactaaaagaaaatgtggccttttacagaacgtatgttcagttggaggtatcatcttgacttctcttctggtcatggcttgttacagatttggcacttttcacttgacctgaaaggaaacagattttaaaattacatttaattagtttgcaatatgaaacaaaatgaagccagtttttaagacaataagaatggaataaattagattgtcccaggctgaaccagctactaattcaaccctagtgttgttggtatgtcattcaaatagtctctcctgttcactatatttaaagctgtgaggtcacatttcccatataatcagtattattgtccctagttctgccattgatgagagtaactttgaataaaccgctaaacctctgttgtcttcactttcttcactgcaaagtcagggttcatttcagaggttccatcaagatctaacattctgtgatatgaaggtgcttagagaacatgtgatatagggggtcgggggagagaggcaaatcttcacaggtgagaagggaaggaggggggattgttgggccaggttaatggtactggtggagaggtgggaataaccgtatatccaatagtcccagctacttaggaggctgaggcaggaggactgtttgaacccaggaattcaagttcagcctgggtaacatagcaagaccctgtctctaaaaaaaaaattgtaattgaaaaacaaattaagatatcacaaaatcttaaaaaataaaaaataattcaggtcttaattatctcactcttaaactatactcactttctctagtctcctctccctccaatccattttgcaaacaagcccagattatcctccgtacttaatctctcttctctcccaccccaaagcctttaaatgacatcccactgcccaaaaaataaagccgaaacttctaagtttaaaatttagtagttttaataaaatgatcacatgttaactttgcaaaaactctattttctacatttctactgtaccttgacacagactcagctacaatcagccacatgggtactggccacttccttattccccacatttccacttttgatcataatactgtgctttcattctggaatctccttcatactccacactggctatccatcctctcaggaaactcttctttcttcatgatgctttatctttatacttaggcttctctgatcatatagagcacttagattatcttttcaggtatgttctactcacaaactaagtggtaggctcctaggagagtgctatgtgtgtgctcaacagatcatatgattcatgttagttctagatggcaagaaacattatgtcatactgtaatatctggactaggttaagtgtcttaacctttaaaaatccacaactcctttttgataaacataaaaatcttaggtactgattatccacatgcaaaagaattaaattggacccctatggcctaatacatacatacacacacacacacacacacacacacacacacacacacacacacaataaaaatatatatctcaaaatacatcacagaactaaacattagtgctaaaactacaaaactctcagaagaaaacatagaattaaatcttggtgaccttggattggcaatggtttcttaggtatgacacagaaagcagaagcaacaaaggaaaaacagataaattgaactcaatccaaataaagttttttgtgttccaaaacataattaagaaaatgacaagacaatccagagaatgggaggaaatagaatcatatttctgacgagagacttgtatcaagaatacataaagagctcatataactaaaaaataaaaagacaatccaatctacaggtggcaaggacaggtgtggtggctcacacctgtaattccagcactttgggaggccgaggcaagtagatcacttgagcccaggagtttgagaccagcctgggcaatatggcaaaaccctgtctctacaaaatgtagaaaaattagccaggtgtggtggcataccgctgtactcccagctacttcagaggctgaggtgggaggattgcttgggcccagggaggttgaggctgcagtgagctgtaactgtgccactgcactgcagcctgggcaacagagtgagagcctgtcttaaaatgaaagaaagaaaagaaagagagagagggaggaaggaaagaaggaaagaaggaaagaaggaaggaaggaaagaaggaaggaaggaaggaaggaaggaaggaaggaaggaaggaaaagtttcttccctttaatgaccaggaaaagaaaaaaataaaaatgggcaagcaattcaaatagatatttctccagagaaaatacagaaatggccagtaagcatgaaaagatgctcagaattgttcgtaatttgggaaatgcaaatcagaatacattaagataccacttcatacccactaggatggctaatttttttaaaaaagacaatgaccctctccctctccctctccccacggtctccctctccctctccttccacagtctccctctgatgctgagctgaagctggactgtactgctgccatctcggctcactgcagcctccctgcctgattcttctgcctcagcctgccgagtgcctgcaattgcaggcgcgcgccgccacgcctgactggttttcgtatttttttggtggagacggggtttcgctgtgttggccgggctggtctccagctcctaaccgcgagtgatccgccagcctcggcctcctgaggtgccgggattgcagacggagtctccttcactcagtgctcaatgttgcccaggctggagtgcagtggcatgatctcggctagctacaacctccacctcccagccgcctgccttggcctcccaaaatgccgagattgcagcctctgcccggccgccaccccgtctgggaagtgaggagcgtctctgcctggccgcccatcatctgggatgtgaggagcccctctgctcggctgcccagtctgggaagtgaagagcgcctcttcccggccgccatcctgtctaggaagtgaggagcgtctctgcccagccgcccatcgtctgagatgcggggagcacctcttccccgccaccccgtctgggatgtgaggagcacctctgcccggccgcgaccccgtctgggaggtgaggagcgtctctgcccggccgccccgtctgagaagcgaggagcccctccgaccagcagccgccccgtctgagaagcgaggagcccctccgcccagcagccgccccgtctgagaagtgaggagcccctccgcctggcagctgccccgtctgggaagtgaggagcatctccgcccggcagccgccccctctgggagggaggtggggggcagcccccgcccggccagccgccccgtccgggagggaggtgggggctcagcccccgcccggccagccgccccgtccgggagggaggtggggggtcagccccccccccggccagccgccccgtccgggagggaggtggggggtcagcccacgcccggccagctgccccgtccgggagggaggaggggggtcagcccccgcctggccgccgccccgtccgggaggttggggggcgcctctgcccggccgccccttctgggaagtgaggatcccctctacccggccaccaccccgtctgggaggtgtacccaacagctcattgagaatgggccatgatgacgatggcggttttgtggaatagaaaagggggaaaggtggggaaaagatagagaaatcagattgttgctgtgtctgtgtagaaagaagtagacatgggagacttttcattttgttctgtactaagaaaaattcttctgccttgggatgctttgacctatgaccttacccccaaccctgtgctctctgaaacatgtgctgtgtccactcagggttatatggattaagggcggtgcaagatgtgctttgttaaacagatgcttgaaggcagcagactcgctaagagtcatcaccactccctaatctcaagtacccagggacacaaacactgtggaaggctgcagggtcctctgcctaggaaaaccagagacctttgttcacttgtttatctgctgaccttccctgcactattgtcctatgaccctgccaaatccccctctgtgagaaacacccaagaatgatcaataaaaaaaaaaaaataaataaaataaaataaaataaagaaagagctgaacctgtttgtccctgggaaacagaaactgtggaaaaggggctctacggccactattttcctaaattttgtataactatctctgaaaacatctatctgcagaactttgataaaaactacaaattgaaaccagttttaaatttcaatttccaaatagttatagcttcagtaaagtggaattcttaccatcataaatatgatggaattatgcaatatattccaacatttccatttaacatattggacagccactttcatagatttcgtatgcaaatctgcctgcttgctaaaatcaatactcctggtacttttgcagtcatttacagatatgcacaaagcagagaaaaatctgaggttcccaacacacatgttcccagcaaaggctgaacaagatgacactatcttcttaaataagacagctattataccataaacaagggtcctttttgaggtgtagtgtcctgtttttggcttttttttctttttgttgggattttgttgttttattttattttattttatttttgagacagagtgtagctgttgcccaggctggactgcaggggcatgatatcagctcactgcatcctccacctcccggattcgggtgatcatcctgtctcagcctcctgagcagctgcaatgacaggtgcacgccaccgcatctggctaatttttttgtatttttagtagagacaaggtttcaccaggttggccaggctggtcatgaacttccaacctccagtaatccacccgcctcagcctcccaaagtgctggaattacaggcgtaagccaccgcacccggcctagatgttgttgtttaaaaatgcccccccagaccgggcgcggtggctcacaaggtcaggagattgagaccattctggccaacatggcgaaaccccatctctactaaaaatgcaaaaattagctgggcgcggtggcacgtgcctgtaatcccagctactcgggaggctgaggcaggagaatcgcttgaaccagggagtcagaagttgcaatgagctgagattgcgccactgcactccagcctggcgacagagtaagactccgtctcaaaaaaaaaaaaaaaaaaaaatgccccccaagtgtagtgctgaagtgcggtctagtgctcctaagtgcaagaacgatttaatgtgtcttacagagaaaatactgtgttaggtaagtttcattcagacatgaattataatgctgttggttgtgagttcaatgttaacaaaattaacaataaaattaaataaggtgactttaaatagaaaaaaaagacaatgacaaatactgacaaagatgtggagaaatttgaatcttcatgtactgctggttggaatataaaatggaaatcagtttataactcagcaatataccaaagaaaaaggaaaacatgtgaccacacaaaaattttcatacaacagttcattgcagcattatctataatagccaaaagagtggaaacccaaatgtccatcaattgataaatagattaaatttgggccgggcacggtggctcacacctgtaatcccagcactttgggaggcagaggcaggcggatcacaaggtcaagagatcaagaccatcctggctaacatggtgaaaccccgtctctactaaaaatacaaaaaattagccaagcatggtggcgggcgcctgtagtcccagctactcaggaggctgagccaggagaatggcatgaacccaggaggcggagcttgcagtaagccgagatcatgccaccgcactccagcctgggcaacagagtgagactccatctcaaaaaaaaaaaaatagattaaatttgtacccacaaaatggaatattatttagccataaagcagaatgaagtactgatacatgttaccacatggatggacattaaaaatattatgccaagtgagagaggccaccacgaaaggcaacacatactatattatttcatttataaatgttcaggggcaggtccagagggcagccatcctaacccaacctgccctgcccccagaaaaaaaagttaaaaaaaaaatgttcagagaaggcaaatccagagacagaaagtagattagtggttgccagggcttgagggagggaagaataggaagtgactgctaatagctatagggtttcttttcagagaggtaaaactcgaaagttagataagggtgataattacacaactttgtgaatatactgaaaaccactgaattgtactctttaaaatgattaattttaaggtgtgagaattatatctcaataaagctattattttaaaaaaatgttaggggtgtgcctgccaccaatattctgatacgttcacctttctgattcttaggatagtattcccacagtaggtttttcccgaaatatagaattataatactgaaactgctttttaaaatgctgccaagaggaactgagatggccgattagaaaaagctgcagtccacagctctcatggaaaataaaaacagtgagtgaattcagcaccttcaaatgaaatatccaggttcttccattgggactgactaggcaaatggcttgacccagaaagaatgaagaaaagtagagtggggcaatggcccacccaagagcagcacagagccaaaggaacccccacccccagccaagggaagcagtgagtgattgtgcgaccactcacaatgtacgtgtggcttatctgcttgaggagtaagtaaagtgagaaaccacacttctcacacagatctttgcaacccaccgatcacgagatcccctcatgagcccatgccaccagagccttgggtctgatacacagacctatgtggagtcttggcaaagcagatgctcaggctcacacagagacccaggagttttacatactctggccccaggaatcccagcaaggcaggagatccatttatatgctcccctaggaatagggctgaatccagagagccaagcagtgtcattttgtgggccccacttccacggcacttcacaagttaagacccaccaccttggaattcctgccagacagcgcaacaggctggagactgcctgagatggatgagttcccagagggtagaggcaggtgccatccatttctgcagtttgttcaactcagcccttctagccttccagctctggggagttcaagaagtcctgatgaggaggagtcctgcacaatgcagcacagctgctgtgccagattgtggccagattgcttctttaaatgggaccccaatgcatcccccttcactgggtggggcctccctgcaggaattacagcaactccagccagggttatacagacataactctgatctcttttaagatggagccactgtggggagggatgaccgatgtctctgcggttcagtcaacagcctttcggcctgctggctccggagagtccaggcagtctggatgagcaagggctatccccaacacagcacacctgctctaccaaaaagcagccagactgcttctttaagcaggtcccttatcccatccctcctgactgagtgagacctcccaacacgggtcttcagatacctcctacaggagtgtccaggctggcaacaggtcaataccccactgggacaaagctcccaaagaaaagagcaggttgttgtccttgctgtttcacaggctttacttgctgaaacctccaggtagaggaaaagccaaggcaacttccagctttctggagccatcccccagcaaactgcagcagccctacagaaaagtggcctgacttttaaaagaaaaacacacaaacagaaagcaacagcagcagcagcatcaacaaaaaaggcctcaaaaaaactccattcaaaggtcagcaacctcaaaactcaaaggtagataagcccacaaagatgagaaagaatcaatgcaaaaatgctgaaaactcaaaaagcccaagtgcctcttcttctacaagtgactgcaacacctctccagcaagggcacagaactgaggccaagatggctgaaatgacagtaggctttagaaggtgggtaataatgaacttcactgagctaaaggaacacattgtaacccaatgcaaagaagctaagaatcatgataaaacaatacaggagctgaaaaccagaatagccagtttagaggggagcataactgacctgatggagctgaaaaccatgatgcaagaagttcacaatgcaaacacaagtatcaatagaagaacagacgaagaggaggaaaaaatgtcagagcttgaagactatcttttgaaataggaagacaagaatacagaaaaaaagaatgaaaaggaatgaacaaaacctctgagaaatatgggactacgtaaaaagaccaaacctatgactgattggggtacctgaaaaagacggggagaataaaaccaagttggaaaacatacttcaggatattatccaggagaatttccccaacctagcaagacaggccaacattcaaattcaggaaatccagagaacctcagtaagatattccatgagaagatcaaccccaagacacataatcatcagattctccaaggtcaaaatgaaagaaaaaatgttaaaagtggccagactgagaggccacatcacctacaacgggtaacccatcagactaacagtggacctctgcgtggaaaccctaaaaccagaagagattgggggccaatattccacattcttaaagaaaagaatttccaacccagaatttcatatccagccaaactaagcttcataagcaaaggagaaataagatccttttcagacaagcaaacactgagggaatttgtcaccaccagccctgccttgcaggagctcctgaagggagcactaaatatgggaaggaaaacccattaccagccactacaaaaataaactgaagtacacagaccagtgacactttgaagcaaccacataaacaagtctgcaaaaataaccagctagcatcatgatgacaggatcaaattcacacataacaatattaagcttaaatgtaaatgggctaaatgccccaattaagagacacagaatggcaagctggataaagatccaagacccatcagtatgctgtcttcaagagacccatctcatgtgcaaagacacacataggctcaaaaaaaagagatgaaggaaaacttaccaagcaaatggaaaacaggaaaaaagcagggatcacagtcctagtttctgacaaaacagactttaaaccaacaaaggtcaaaaaggacaaagaaggggctgggcatggtggctcatgcctgtaatcccagtactttgagaggccaacatgggtggatcacctgaggtcaggagttcgagaccagcctagccaacatagtgaaacccagtctctactaaaaatacaaaaattagccaggtgtggaagtgggcacctgtaatcccagccactcgggagggggaggcagaagaatcgcttgaacccaggagacgaagtttgcagtaagccgagattgcacaattgtactccagcctgggtgacaaagcaagactccatctcaaaaaaaaaaaaaagacaaagaagcaaagaagggcattacataacaataaagggttcaattcaacaagaagagctaactatcctaaatatatatgcacacaatacaggagcacccagattcataaaacaagttcttagaaacctacaaagagacttagactcatacacaataataatgggagactttaacaccccactgacaatattaaaaagaccatccagacagaaaattaacaaagatattcaggacctgaactcagctttggatcaagcacacttgatagatatctacaaaactcttcacccaaaaacaacagaatatacgttcttctcatcaccacgtggcacttactcaaaaattgatcacatatgcagaagtaaaacagtcagcaaatgcaaaagaactgaaatcataacaaactgtctctcagaccacagtgcaatcaaattagaattcgatgctaagaaattcactcaaaaccacacaactgcatggaaattgaacaacctgctcctgaatgactcctgggtaaatactgaaattaaggcagaaatcaagaagttctttgaaactaatgagaacaaagagacaatgtaccagaatctctgggatacagctaaagcagagttaagagggagattcacggcactaaatgcccacatcaaaaagctggaaagacctcaaattaacaacctaacaccacaactgaaagaactagagaaccaagagcatggacacaggaaggggaacatcacactctggggactgttgtgggttggggggagggatagcattgggagatatacctaatgctagatgacgagttagtgggtgcagcgcaccagcatggcacatgtatacatatgtaactaacctgcacattgtgcacatgtaccctaaaacttaaagtataaaaaaaaaaagaaccaagagcaaacaaaccccaaagttagcagaagacaagaaataatcaaaatcggagcagaattgaaggagacagagacacaaaaaaacccttcaaaaaaatcaatgaatccaggagctggttttttggaaaaaaattaataaaatagatagaccactagccaaattaataaataagaaaagcagaagaatcaaatagacacaatcagaaatgataaagttgatatcaccactgattccacatcaaaacaaccatcagacaaactataaacaattctatgaacataaagtagaaaagctagaagaaatgaataaattcctggacacatacaccctccaaagactgaaccaggaagaaattgaatccctgaatagaccaataatgagttctgaaattgaggcaataataaatagcctaccaaccaaaaagaagcccaggaccagatggatttacagctgaattccaccagaggtataaagaagagctggtaccatctctactgaaactattccaaaaaattgaaaaggaaggactcctttctaactcattgtatgaggccagcatcatcctgatacccaaacctggcagagatacaacagaaaaagaaaactttaggccaatatccctgatgaacattgatacaaaaatcctcaataaaatactggcaaatcaaatccagcagcacatcaaaaagtttattcatcatgatcaagttggcttcatctccaggatgcaaggttggttcagcatacacaaatcaataaatgtaattcatcacataagcagaactaaagacaaaaaccacatgattatctcgatagagaaagaaaaggcctttgataaaattcaatatctcttcatgttaaaaattctcaataaactaagtattgaaggaacatacctcaaaataatcagagccctatatgaaaaacccacagccaatatcataatgaaaggacaaaaagtggaagcattccccttgaaaaccagcacaagacaaggatgccctctcccaccatgcctattcgacatagtattggaaattctggctagggaaatcaggcaagataaacaaataaacagtattcaaatagggacagaggaagttaaattatctttgtttgcagatgacatgatcctatatctaggaaatcctattatctcagcccaaaagcttcttaaactgataagcaacttcagcaaactatcaggatacaaactcaatgtgcaaaaattgctagcatttttatacaccaacaacaggcaagcagagagccaaatcatgaatgaaatccacttcacaattgctacaaaaagaataaaatacataaaaatacagcagtcaagggaagtgaacaacctcttgaaggagaactacaaaccactgctcaaggaaatcagaaaggacacaaacaaatggaaaaacattccatgctcatggacaggaagaactaatattatgaaatgaccatactgcccaaagtaatttaaaaattcaatgctattcccattaaactgtcattgacattcttcacagaattagaataaactattttaaaattcatatggaataaaaaaagagcctgaatagccaagacaatcctaagcaaaaagaacaaagctggaggcatcatgctacccaactttgaactataccacaaggctacagtaacaaaaacagcatggtattggtacaaaaacagacacatagaccaatggaaaagaatagagaactcagaaatcagaccacacacctacaaccatctgatcttcaacaaacctcacaaaaacaagtaatggagaaaggattccctatttaataaatggtgttgggaaaactggttagccatatgcagaaaattgaaactggaccccttccttacaccttatacaaaaattaactcaagatagattaaagacttaaatgtaaaacccaaaactataaaaaccctagaagaaaatcaaggcaataccattcaggacataggtgcaggcaacgatttcatgagtaaaacaccaaaagcaattgcaacaaaaggaaaaattgacaaataggatctaattaaactaaagagcttctgcacagcaaaagagactatcatcagagtgaacagacaacctacagaaaatttttgcaatctattcatctgacaaaggtctaatatccagagtctacaaggaacttatacaaacatacaagcaaaaaacaaacaaccccattaaaaagttggcaaaagacacgaacagacacttctcaaaagaagacattcaaaaaaaaaaggctgggcatggtggctcatgcctgtaatctcagcaatttgggagactgaggtgggcggaccacctgaggtcaggagttcaagaccagcctggccaacatggtgaaaccgtctctacaaaaaaatataaaaattagctgggcatggtggcacacatgtaatcccagctactcaggaggctgaggcaagagaatcgcttgaacccaggaggtgggggttacagtggaggcgggggttgcagaacccagtctgagtgacaagagtgagactccgcctcgaaaaaaaaaaaaacacattcatgtagtcagtaaacaaacatgaaaaaaagctcaacatcactgatcattagagaaatgcgaatcaaaaatacaatgacacaccatctcatgccagtcagaatggcaattattaaaaagcccagaaacaacagatgctggcaaggttgtggataaaaaggaattcttatacactgttggtaggaatgtaaattaatttaaccattgtggaagacagtatggcaattcctcaaagatctagagacagaaataccatttgacccagcaatcccgttactgggtatatacccaagggaatataaatcattctattataaagatatatgcatgtgtatgttcattgcagcactatccacaatagcaaaaacatggaatcaacccaaatgcctatcaatgatagactgggtaaagaaaatgtggaacatatataccatggaatactatacagccataaaaaggaacgagaccatgtccatttaaaagacatggatggagctggaagccattatcctcagcaaactaatgcaggaacagaaaaccaaacactgtatgttctcacttgtaagtgggagctgaatgatgagaacacatggacacatggaggggaacaacatacactgtgggggtggggggagggacagcatcaggaagaatagctaatggatgctgggcttaataccaaggtgataggttgatctgagcagcaaaccaccatggcacacgtttacctatgtaacaaaccagcacatcctgcacatgtaccctgcaacttaaaataaatgttgaaggaaaaaaataaatataaatataaataaaataaaatgttgccaccctatctcccaggaggagatgcctcctagatgagaatcaaaatcaccgacaggcccagtgtggtggctcacacctgtaaagccaacacttcaggaggctgaggcaggaggattacatgaagctaggagttcaagaccagcctgagaaacatagcaagaccctatctccataaaaaatttaaaaattggccaagcatggtaatgcctgcctgtggtcccagctactcaggaagcaggagtatcacttgagctcaggaggtggaggctgtggtaagctacaatcacaccactgcaccccagcctgggtaacagaggaagactctgcctccgggggaaaaaaaaaaaaaaatcaaaacaaagctacagtaatcccataaaatttaatgactgatgatggtaatattaagattagtattagacatttcctataggaagaattcagttattattagttattactaatattgcaaataatgaaactagggaactatatcatagattagtgcttgtaacaatgttaataactacttaatgaagattgttaaaatcagaatatctcaaaaataacaacattgaacttaattttcatcccttctgacattcaaaccaccttttatccaaaacttacatggtgtagtcatttttgtgaagataggagtcacaatatcttccagttgttgtctctgctcaaaaagctcattaatggaagcttctgtatgggtttccaaccactcattttttgcacggcatgcactgaggatggtattctagggacagaaatacagagtttgctctccacttatttattgaaaaataaaactcaacagtatctctaaaccagcacgtccaactgaactttctgtgatgatagaaatattctgtacctgcattgtccaatacagtagccattagatataaatagctattgagcactagaaatgtggctagggtgactaaggaactacattttaaattttatttaattttaaataattcaaatttgaatagtcacatgtggctagtatctattatattggacagtgcagctctaacattagtggaatatgagcacaataaaactcaccatcgagagtcatgaagcctggtaccattctacactttctccctaattctttatttttgttaagccctgtgactaaaagaagtacttgcaaagaccagaaaagaatgggtggatggtatgagttgcatgcaactcaaaagacaatgctgatattttattccctctcaaatggttcacagaaggaggaagttcaagaaatacaagaaaagctccatcttactgaaaatctctcaatttgcactgtaaaattatctcatcgcacatatgcagcaaatttctgatgtctgatttaagatgtttattatactatggtctgtaaaaataaagataaataaatacatttgtggtatgtcctgtccatactgttaaataataagcagtagcatatgcagaagtatgtagaagcaggtagacttagagaggtgtccataatatcttattgagaaggaaaaaaagtaaaattaaagaataatatatataagtgtgatctcatttttataaaaacaaaatctttcataaaattcctattatgtgtatggatacatatgattatataagtgaaagggaaaacataacacaaaattatttttgaaaccacatagtaggtattaagaatagaaatagaaaagggaaaactattatgtttgctttagacattctgattttttctaattattactatgtatacataataatttctagttcaaataatcaaatttttaaaaattaaattaagaatgttctagtaactagtttgacaaagcactatttctttgtgtcaggaaaattttgctttgcagatctgatagctccaaatgctattctaataaattttgcctacattttgtttgtttcacaagagattttgcagagtactctacaagacacaagtgcaatgtataacttatcaagtgctagacttggtgatatcttatacttttagcaatacctaattctttttcatctgaataataagtcacaggaaattcacagagcatcctgcacaaaaataaatgaaataatttaaaaccaaaacacatttctgataccttcagtatattttttaaatgtacattcagagcactaaactattccacagggaatgcttagatctagtacttagatatgtggcaagtgggctttaaaattactgtgtttacagctgtgtatctcttttcccattctggaaaatttgacacattaaataatatgcaatgtatttgtacatgtacatatatactaaaatatacaatgtatatctcagttttgaagcaaaataatgaaatgaatatttccattgtattattttggaccctaccagtccagaaccagaacactaccagtactattaatacagcttctgtccctccccatcccaccccccgactgccttcaagagataactatgatctgtgcttatccctttgcttggctttttaaatagttttactcccatatgtaggcatccctaaattatatagtttgatattgcttgtttttgagctttataaaagtctatgtagtctttgataattttttttactcaatattacatttctaagattcagccatgttgctgggtttgatacttagtacatctctatgtcactctttaatactatttattttagttttgatcagactatcctctattagaagtttataaagaaaggaagggaaggtaggagggaagaaggaaagaaagagggaggagggaggaagtaaggaccactacctgcctttagaacatcagtgcaaaaattaaaatgtaagacaaaattctcaaaacactacagaacaagcaataatcacaatacagtaccttgtcttccttaaggagtttccctgatcccttttctgtgtcagtaacagctaaagagacttttgcaatatattttttcagagtcagccttgcatctgaaagaatggacagaaacacacacatgacaagacaaacacaagaggcaaagcaagatagtcaaatggaagcctccactgtccaccccaccccacagaaacaccaaattgaaaaactatccatacaaaaaagcaccaacatgagaaccaaaaatcaggtaagcaatcacagtagctccttttaacatcatattaaggaaagaggcactgaagagggtaggaaagacagttttgaactgcctacaccacacttcccccatacccctggtaatagccacacagtgcagacagagaatctatatgcttgagggagagcacagtgactgtgggactttgcactacagctcaatgcttccctatcatagaagaaagcaacatggggcagaattcagctgacaaccatggatgcagcatttagaccagccctagccagaggggaagcacacagcccagcagttggaatctgagttccagcaggccccaccactacaggctaaagtgctatggggtcctaaataaatttgaaaggccatctaggccacgagggctgcaattcctgggcaagtcctagtgctgtgcagggatcagagccagtggacttggggtgcacatcacctagtgagacaccagcctgaatgaccatgagagtgcttgccaccgctctgccaatcccaggcaacacagcttacagctctgggagagactcctttcttctgcttgaggagaagagaggcaaaagtgaataagactttgtcttgcaacttggataccagctcagccacagtagaacacggcaccaagcagagtcctgaggcccccattccaggccctaactccaaagtggtatttctagacacatcctgggccagaagggaaccagctgccttgaagggaaggacccaggcctggcaggattcatcacctgctgactaaagagcccttgggtcctgaataagcagcaatgatacctaggcagtactcaccacggaccttgggtgagactcagagccatgctggcttcaggggtgacccagaacattccccagctgtagggactaaggggagagacaccttctgcttgacgaaaggagagggaagagtaaatgggactttgtcttgcaacttgggtaccagctcagccacagtggtgtagcacaccaagcaggatcctaaggtccctgattccaagccttggctcctggagagcatttctgggcctggcctggaccagaggagagcccactgccctgaagggagaaacccatgctgggcagtattcaccacaggctgattgtagagcccttgggcctcaagtgaataccagcagtagccaggtggacttgctgtgggcctgggcagtggtggccacagggagagactactctgttagaagaaaggggagaggaaaagtgggaaggactttgtcttatggctcgggtgccagctcagctgcagtagaatagagcaccagctagattcctaaggttcttgactccaggacttgactcccagatggcatctccagacccacccagagcctgggggaacttgttgcctttacggaaggacgcatgcctggctgtatttgccaactgctgattgtagaccattgggccttgagtgaatataagcaataactaggcagtggccaccacaggccttgggcaagacccagtgccatgctggcttcaggtctgacccagggcagtcctagtggtggtggccacaggggtgcttgtcttacccctcccccagttctaggcagctcagcacagagagagagactctgtttattgaggggaaagtaagaaaagaaaaaaagagtttctgcctgataatccagggcattttcccacatcttacccaagaccattaagacagcatctctacaagtctgcaagagccacagcgttactgagcttggggtgccccctaatgcagatacggctagagtaaccaaaaacttagatcacaacatccaagtcccttcaaatacgtagaaagccttcccaagaaggacaggtacaaacaagcccagactgcaatacctacaataaatacctaactcttcaatgcccagatgccagtggacatccacaagcaagaaggtcagtcagaaaaataggacctcatcaaacaaactaagtaaggccccagtgatcaatcccagagtgaaagagatatgtgacctttcagagagagaattcaaaataggtattttgaggaaactcaaagaaattcaagataacacagagaaagaattcagaatcctatcagataaaattaacaaagagtttggaacaacttaaaagaatcaagcagtaattatggagctgaaaaatgcaattgacataccaaacaatgcatgagagtctcttaacagtagaattgatcaagcagaagaaagaactagtaagcctaaagacaggttatttgaaaatacagtcagaggagacaaaagaaaaaagaataaaaaacaatgaagcactcctataagatctagaaaatagcctcaaaagggcaaatctaaaagtttctggccttaaagaggaggtagagagagagcagggtaaaaaatttattcaaaggaataatattaattaaaaaaagaacttcccaaacctagagaaatatatcaatattcaagtactagaagattatagaacaccaagcagttttagcccaaagaagactacctcaaggtatttagtaatcaaactcccaaaaatcagggataaagatcctaaaagcagcaagagaaaagaaaccaataacatataacggaactccaatacatctagcaacagacttttcagtagaaaccatataggccaggagagagtggcatgacatatttaaagtgctaaaggaaaataacttttaccctagaacagtgtatccatgaaaatatccttcaaacacatcagagaaatattttcgcaggcaaacaaaagctgagggatttcatcaacactagacttgtcctagaagaaatgctaaagggagttttttaatctgaaagaaaaggatgttaatgagccataagaaatcatcagaagatataaaactcactggtaatagtaagtacacagaaaaccacaaaatactatgtatgacactgtaattatggtgggtaaactactcgtattttgaatagaaagactaaaagattaatctatcaaacataataattttcaagacataggcggtacaataggatataaataaaaacaacaaaaaggtaaaaagttggaggggaatgaagttaaagtgtagcttttatttgtttttctctttgcttgtttgtttatacaatctatgttaagttgtcatcagtctaaaataatgaactataagatactatttgaaagtctcatggtaatctcaaatcaaaaaacatacaacaaagctgggcttggtggctcacatctataatcccagcactttgggaggccaaagcgggcgatcacttgaggtcaggagtttgagaccagctactaaaaatacaaaaattagctggcgtcgtggtgcatgcctataatcccaactactagggaggctgaggcaggagaatcgcttgaagccaggaggcagaggttgcagtgagccaagattgtgccactgcactctaacctgggtgacagagtaagactctgtctaaaaaaaaaaaaaaaaaaaaaaaaaaagagagagagacacaaaaaataaaaagcaagaaactaaaaggaagacaggaaggaaggaaagaaggaagataagaccacaaaacaaccagaaaaccaatagcaaaatggcaggaataagtccttacttatcaataataacactgaatgtaaatggactaaactctccaatcaaaagacatagagtggttgaagagataaaaatcaaagatccaattatctgttacatataagaaacacacttcacctgtaaagacacacataaatggaaaataaaagaataaaaaaagatattccatgccaatggaaaccaataaagagcaggagtagtacacttacatcaggcaaaatagatttcaagaaaaaaactatgaaagagacaaagaaggtcatatataataatagaggggtcacttcagcaagaggatataacagctgggaatatacatgcacccaacgctggagcacccagatatttaaagcaaatattactagagcttaagagggagctagaccccaatacaataataggtggagacttcaacaccccactttcagcattggacagatcatccggacagatcatccagacagaacatcaaaaaagaaacatcggacttaatctacactacagaccaaatggacctactagatatttacagaacatttcattcagtgactgcacaatgcacatttttctactcagcacatggatcattctcaaggacagaccttacgttaggccacaaaacaagtcttaaaagtttcaaaaaaattaaaattatatcaagtattttctctgaccacaatggaataaagctagaaatcaataacaagaggaattttggaaactatacagcacatagaaattaaacagtatgcttctgaatgaacagtgtgtcaatgaagaaattactaataagaaggaaattttttaaattcttgcaacaaatgaaaatagaaacacaatataccaaaagtatggaatgcagtgaaagcagtactaagaggaaactttatagtaataaacacctacattaaaaaaatacaaaaacttcaaataaacaccttaacaatacatcttaaagaactagaaaagcaagagcaaaccaaacccaaaattagtagaagaaaataaataaaaaagatcagaacaaaaattaatgaaattgaaattttaaaaaaattcaaaagatcaatgaaatgaaaagttggttttttgaaaagataaacaaaattggcaaaccattagccagactaagaaaaaaagaaaggcccaaattttaaaaatcagaaaaaaatgaaaaagaagacattacaaccaattccacagaaattcaaaagatcattagaggctactatgagcaaatatatgtcaataaattggaaaacttaagataaatggataaagttctagacacatacaacctgcaagtttaaaccatgaagaaatccaaaacctgaataaaccaataacaagtaatgagatcaaagctgtaataaaaagtctccaagcaaagaaaagcccaggacccaatagcttcatgccaagttttaccaaacacttaaagaactagtaccattcctactcaaactattctgaaaaatagagaaggaggaaatacttccaaatacattttacagagccattattaccctgatatgaaaaccggacaaagacacatcaaaaaaaaaaaaaacaaaacaaaaccccaaaactacaagccaatctccctgatgaacactgatgcaaaaatcctcaacaaaatgctatcaaactgaattcaaccacacatttaaaagaccattcatcatgactatcatcatgaccaagtgacatttatcccaaggatgcaaggatgtttcaacaaatgcaaatcaattaatgtgatacatcatatcaacagaatgaaggacacaaaccatatgatcattttaattgaggctaaaatttaatattccttcatgtaaaaatcctcaaaaaactgggtatagtaggaacatacatcaacacaatcaaagccacatatgacagacccacagctggtgtcatatagaacaggaaaaactaaaagcctttcctttaagatctggaataagacaagaatgcccactttcaccactgttattcaatatagtgttggaagtcttacctagagcaatcagagaagaaaataaagggcatccaaattggaaaggaggaagtaaaattatccttgattccggctgatataattttatatttggaaaagtgtaaagactccaccaaacaattattagaactgataaacaaattcagtaaaattacaggatacaaaatcaacatgcaaaaatcagtagtatttctacaggccaacagtgaacaatctgaaaaaaaaatcaagaaagtaactccatttacaatacatacaaagaaaataaaatactttgggataaacttaacccaaaaagtgaaaaatctctataatgaaaactataaaagactgatgcaagaaactgaagaggacataaaaaatggaaagacattccatgttcatagattggaagaatcaatattgttaaaatgctcatactacccaaagcaatgtacagattcaatgcattggtatcaaaataccaacgacatgcttcacagaaatagaaaaaacaatactaaaatttttatggaaccacaaaagccccagaatagccaaagacatcctgagcaaaacaaaaacataaaaactgaaggaatcacattacttgacttcaaattatactacagagctatagtaaccaaaacagcatgggactggcctaaaaatagacacatagaccaatggaacagaatggagaacccagaaataaatctataaatctcacttttgacgaaggtgccaagaacatacattggggaaaggacagtctcttcaataaatggtgctgggaaaactggatatccataagcagaagaatgaaactcgaccccatctctcaccatatacaaaaattaaatcaaactgaattaaagacttaaatataagacctcaaactatgaaactactgtaagaaaacatttgggaaagtctccaggatattggtctgggcaaagattttttcagtaataccctacgagcagaggcaaccaaagaaaaaatcgacaaatgggattattacgttaaaaagcttctgcacagcaaaggaaacaatcaacgaagtgaagaggcaacccacagaatggaataaaactactcatatgacaagggattaataaccagaatatataagcagctctaacaactcaataggaaaaaaatctaataatcctatttttttaaatgggcaaaagatgtgaatggacatttctcaaaagacatacaaaatggcaaaccagtatatgaaaaggtgatcaacatcactgatcatccagagaaatgcaaatcaaaactacaatgacatatcatatcaccatagcactccacagatacagacatatagatttagatagatacaattattttctgtatctccctactagaaagtaaactccatgaaggtaatgattctgttttgggctacgttgtgtatatattctcagctcctagaacaatgtttagcacacagtcagcactcagcaaatatttgttatatgaatgcttacacaaaatgtctttgcttattatgcttccccaatcttagataccctctctacactgccacctataaaaattctactcattcttcaaagcctactcacatatctttttctgcaaaatttcctaattcccccaagtgggactcattgccctctcaacagttatgtgattataattttatttagttctcatttagtaaaatctaaaattttttagatttagtaaaatgagaactatttattttttataataaaatcagaatcattttaattattatattactttttgcttttacctctagattgtacactccttaaaggcaaggtctatgtcccatctttttatcatataccatgccaccttcctcacccctcacccactacctgatagtaccacatcaccaccacaggaatatattataagggacaggcactcaatatttgttgaactatttgaagggaaggacattcccaaacaaaaaaataaaagcagatgctgggttatgtgaagtggtatactattttttaagtaaatgtaaaactgcagtgcttcagaagaaatgttagaggtgacatgagtaaattgtttccataagattctattaatatgactatagttgaatttattagctagcaaaatattagtaaagtgttcacttttaagaaaattgaagaagctcaaaccattctggcaaaacaacaacacaacaacaacaaaaaagtatctttaagaaactcaatgtgattggtcaggtgacaccttttagttccaatgtggttatttatgatgtcactgaacttatccctgagtcactatgactgatgatgttacaatgatcatcactgtatcctttgctgggcatattttgctgactggcaaggttatatgaagtgcttttattgaagcaccattttaactaatagctcctggtattttctgcttcccttcgtagggaatttagttattttattttattatttagctaatttagctattttaaaatagctaaattttagctacttttttttcaattgacaaagaaggatgtctaatcaaagactaccgctgattttttctctgttgtttatctgcttcttcggggagagtttctgcatttgtgatggaactgtctggacaaaggttggatgggagattcttccagaagaagtacattattggaaagttaagggttctccatctcactgcctgccttatcttctggataaactatgctgcgactttgctaacatggatatatttcagggttgtttatatctcatttataatttattacaagctgtcttcttcgtcttatttgttttgtctgtgcattacctgtggaagaaatggaagaaacaccaaaaaaaggtgaattcgtgatacaagtagtaatagttacaaaatctctaagggtttagaacataatattactagtttctttgagagagggtaccgtgttttattcctcattgtaaccttcccccaacttcccattcattcccagcatctagcacagtatcttgctcatactaggtgttcaacaaatgtgtattgaattagaaggtccttagaatcatctagccccctctacttcaagttacaaaacacaccaaaaaaagtagtgtgctaccatgaggagaatgtatggaaaatcaagttatctgtctgggtccttaggtaagtcatttgctctatctcagttgcctcatccacaaaaggatctgtaacaagagatctcttagaaccctttcagatgtatctaagaaatctaagtacaaaaggtgtcatgtaatttttatatgggctataaactaattgctaatattagaacaactttctgagaaatggagcttttaaactattacataatttcccactttgccaatagatgacaccatagtttgagaggcaaccttaaaagctctttgatcaaaaaacaaacaaaacctcattgaccttcagaagaattagatatttataaatgttttcttatttttaaaatgactattactttatggtgttataccttgaggttctttcataaacgaatacattttgctaatcaaataatttctcccaagagagtaccctaaacataggacacactaattgtttgctgatggtgataaggatcatacatgtggcatatagataacatttcctctgcacttataccttacttctatagtaaccttcctttagtataaataattgatgtgtgctgttttaataaggtttgtttacatatttagaacataaatttaatttgaactatattattaactatactatagtattgaactctactgttttatgtagataaaatctgtattgtttttctccttttagctgaaaaagcaagcctccttagaaaaacctggtaatgatctagaaagcccattgatcaacaacattgaccaaacactccacagagtggcaaccacagcatcagtgatatacaagatctgggagcacaggtctcaccatccttcctctaagaaaattaagcactgcaaattaaagaagaagagtaaagaagaaggagccagaagatactaaataaatgcatatgcaaatgtagcttagtcaattatagatatcacaaaagaaatctatcatctaaggattaaaaattgttctttggaaacctttataaactttttgccacaatctttactaaaattttccaaagaagcctgggttgaaatgttacttcccattcaattaaaaaagaacccggacttactaaagtactagagaagaaattgtatactgtagaaaatgaaatagaggttcctcttcaaagggacattcctcccagtctaattcagaatagatagtaacctctcttagaagcaaaatttactcaaagacctgtgctaatattcttaaattctgctagctgtaataaagaaatcaatatactctgttcttagctcccacattttagcataggtatttgccctggcatgcctgaataggtccaagcaagcatgaggtcatagcctgtttctctttccttatttgtaagtgtttttgcctctctcagcattccacaggttaattcctctcttcctttgttctcctctgcctttgcctcttttgggaagttctaagttgctagccaatcaggttgagtacagaatgtgaggtcccattccagccaatggaaaccggacacagcagtagggtggatgcatcaggttataaattaccctgtctcttttgttggtgtgtggcaagactgctagcaagcagcaccctttctgcagaaagtaaactagccttgctgagagatcctttgtctcagtgttgatttttgcaacactaagcacccgttcccaacaatttggtggcccgtaggggattaacattcccctctgggacagtctttggtcctctctcatggggaggtgccccactgcccattgtagcagcccctggaggacagccaggacctacccggagcaaggaatatagttggattctcagcaacgcagggaaagagagaggcttgcaggaccacagtgaccaggtgactccatgcacgggccaaggtaggaaaagctgcaagagggtggcaaagtatttccttggtggtcagcttttggaggctgagtgtgtgtgtgtgtgtgtgtgaacgactaccagtctgttgctggacagagtgcatgaacacaaacaggaagggtgtaaggaaccaccgaaagggaaaaggaggaaggttaacctcccagggaaagagaatcggcgagacatctctggtgtgagagattgagcctttcacaagcctttaaggatgggacagccaagacatccccagtctgaagaatctgggggattgagccttgccgggaaaagaataggcgagacatccctagcacaagggattgggcctatctaggatccaacatgggaaaaggcccttggcaagcctccaaaggaaggaagggcaagaagcctctagtaggagaggttgagccacccccagccccctgccgctgccatatccaggagtgctagaaacctccagcaaggagcaaggggggttgaaagctccagggaaagggcctatcccaggcaccaccccaaaacttcaagataggaaatgtttcgagtaagacagggaagataaacacctgtggctacagcaatattagttgaagaaagtagaaaattaacctttggggggagattaactgtaagcacgccccaccaagttagagctattttaaatcaaaaagcaggaaggtggcttactgactccagaatcttgaaatataaggctattttgctagaaaaagatgatttacccttgactactgataattcactcaacccagcgggtttcttggcaggagacccaaatttaaaaaacactcgtgtctagatttgactgactaccaaacaaaagtcaggccagatctaggagaggccccttttaaaacaggacggcactggtttatagatggttcccccaaaatagtcaaaggagaaaaacataataggtattcagtaattgatggagaaactcttgaagaagtagagtcaggaagactgcccaataattagtctgcccaaacctgtgtcctgtttgcactcaaccaagctttgaaacatttgcagaacaaagaaggaactgtttatactgattctaagtatgcctttggcgtggcacatacagttagaaaaatttgggctgagcaaggtcttattaacagtaaaggccaagatctagtccacaaagaactaatttttcgtgtcctagacaatctccagttgccagaagagatagctattgtacatgtcccagggcataaaggacttttctttcacaagtcagggaaataaccaaatgaccttgcagatcagataaccaaacaagctgctgtttcttctaaaatgcctttcacttaactccttgccttccttcccctactgcagtccccatcttctcttccactaaaaaaggaaaagttaataaaaatagaagctaaagagaacacagaaggaaaatggatactaccagatcaaagggagatgttatccaaacctctcataagggagttcttaaccatggttctcagccttcatgggtgtataggaatttataccctagccaagcaagttacaaatagttgtctaaaatgttaagaaaaccaacaaacaagtcataaagaaatcacctccaagggggagggatccaggactaaggccattccaaagtgttcaaatgaactgcactgaaatgactccaatcgtttgcctcaagtatttgttggtaatagtagatcagctcaactcactagattgaagctacctccttttcaaatgcaacagctaataatgtagttaaagcattaattgagaatatagtgcccaaatttgggctaatagagaatattgactcagacaatggaacctatctcacagcccatgtcattaagaagctatcccaggttttaaacattagatgggagtatcataccccttggcatccaccttcatcagggagggtagaaaggatgaatcagactttaaagaaccatttaaccaaattagttctagaaactcatttactgtggaccaaatgtcttcccattgccttattgaggatcaggacagctccctgaaaggatataggcctgtctccatatgaaatgttatatggattgccttatttacattcctaagctgatgttcctgtgtttaaaactaaggatcagttcctgagcaattatatacttggtctctcctctaccttttcttctcttaaggtcaaaggtctcttagcacaggccaccactagaatttccagcacaccagcaccaacccagggaccaccttctcatcaaagggtggaaggaagggaaactcgagcccacctgggaaggcccctatctggtgctgttaaccaccgagactgccgtccgcacagctgagaaaggatggacccaccatactctagttaagaaagcagcttcctcgtcagaatcatgggttgctgtaccaggattgagtcctaccaagttgaagttaaagaaagcttaatttttatataccttctatattgcttcctttcctttccttattctgttactagctcctttgttattaatgtaactaagtctgactcacctcagaccattgcctttaatgcttgctctgtcacaccttgtggagatgtgaaagatcaatgacagctagccttttcacacaaatatttatgccccagccctctaactgacacagttattcctagctctcatagttgtgatcgcctgcagctgagacaccaattgtctgctcctacagcctggcaaccttgcagtagctggaactatgtcctttgaactactcaggagcaaggttagacttccacggaagaggtttgtgcaaatctaaaatccctcacctatttctgtcagccttatcagtgtaaccctgtccttctctctctcaccacctccaccttaactgattctaaacttgcccttgttcacttctatggtatggggattgatgtaaatgggaaagaccccctaggcatttttgagatatgcattattccccagtcttccccttcttcggtagcctcagttttaaatcccacaccagttgctcctacacctaatgataaaactagggtgtctattgtgaaagtgaaatatcttaagacagaccttagccattgagataggatatcaagatgcaaatgcctggctgaaatcgattaaatattccattcgcactttaaataaaagcgattgttacgcttgtgcacacggtaggccagaggcccagactgtcccctttccacttggatgggctcctcgttgaccaagcatggactgtatggtggctctcttccagaatcccactgcttgggataatccatcatgccaagctctctctgctgtttcctgaagttcaacacactgagggtcaggcccagagggcaatccagcttccacctctaaatgccaagtttacttcctgcctctcatggcaaggggagaatttagtgttccttggaagcataaaaagatgcaaggagctcaggcctttccagaagcttgttcatcagtccccgagctgtatgatggtactgtggaggacctttactggacactctgccttataattggagtggtacttgtgctctaatccaattgactatccccttcaccctggcatttcgtcagtctgcgaaagtaaaaacaagacactgcaggccaagggaaactccatttgagtcctttgatcctcaggtttacatagatgctattggggtcccatgaggagtgccagataagtttaaagcatggaatcaaatagctacaggatttgaatctacattgttctggtggttaactacatatctataaataaaaatatagactggataaactatattacaatcagcaatgattcataaattatactagggactccatcgaagggatagctgagcaaataagacctaccagccagatggcctggaaaaatagaatagccttagatatgatattagcagaaaaaggaggtgtttgcataatgattgaaactcaatgttgtacctttattcctaataatactacccctgatggaactataacaagagtgctacaaggattaacagccctatccaatgaacttgccaaaaattctggattagatgatcctttttctaaaagacagaacattggttcaggggatggaaagggattttcacttcaattctcacctcgttagctcttgttattggtgtacttattctcataggctgttgtattattacctgccttcaaagttttatacaaaaacttgtctctgccactcttacaaagttaattcctaacttttcttcaccctattcagaaagattacttctcttaaaaggacaaacagagcaactgagtcaagacatgttaaacaagtttaaagaggaattataaaataaaagaggggggaattgtagaaaatgaaatagaggttcctcttcaaagggacattcctcccagtctacttcagaatagatagtaacctctcttagaagcaaaatttactcaaagacctgtgctaatattcttaaattctgctagctgtaataaagaaatcaatatactctgttcttagctccacattttagcctagatatttgcctgggcatgcctgaagaggtccaagcaagcatgaggtcatagcctgtttctctttccttatttgtaagtgtttttgcctctctcagcattccacaggttaattcctctcttcctttgttctcctctgcctttgcctcttttgggaagttctaagttgctagccaatcaggttgagtacagaatgtgaggtcctattccagccaatggaaaccggacacagcagcagggtggatgcatcaggttataaatgaccctgtctcttttcttcgtgtgcgctcttgtggcaagactgctagcgagcagcaaccctttctgcagaaagtaaactagccttgctgagagatcctttgtctcagtgttgatttttgtgacaccaaccacctgttcccaacatatactatcactgctacatgtttaagtgttttgttatttttaatgtgttagattatatatagaatagaagcttaatttagtgtttcaatacatctctgataaataatatctgtgacttgtcttatttgcctgagaattttttttttttttttttttgagacagagtctcactctgtcacccaggctggagtgtagtggctccatcttggctcactgcaacctctgccaccctggttcaagcgattctcctgcctcagcctcccgagtagttaggattacaggctcctgccactgtgcccagctaatttttgtatttttagtggagatggggtttcaccatcttggccaggctgtcttgaacttctgacctcatgatccacctgccttggtctcccaaagtcccgggattacaggtgtgagccactgcacccaggcttcctgagaaaattttataaccacaggaagacttttaatttcctacttcagattgctaaaatagcatggaaatattaaagaatatattaatttttaagtataaatgttttcattttcagtataataaatgattatagattaatgtttttttaatttcagacttttgttgacaagacaattcaattttttaaactatggttaccgtatttttcaaagaacagctaggagataggcctgagactgggacagaagatttgacttaaagtatcttgaaaaatcccagaaaaaatatatctataacatatctgccatcattataaggaggaaaaaaacttttcaaaaataatacttgaaacagtaataaactttacagttttataagtaacggaaaagaatagtacctggcttgggctattatggattacgaaaggtttattttgttccactttccagactccctttacctccgttcctccttagcacaaccccaccttcacatttctagaaatgtttgtttcatactttcagagttctgaaatgttagctaattccctctaagagaatattaatatacatttattctaatggtgaactgttgaagactttaaaaatccccaaacctctaaaacccagagaaatttatctctaataatggaattttcagtagaatgcagaagactatttggggtagggatttctgaatcctttaagtctccccaggtaactcctactgtaatcactagaagaaacagaagtgacatacattcttgataagactgaattaaatagatgttaaattttatgttatttatgtttctgacattccacagctacattactatgaaactccattctgaataagactgaattaaacaaatagtaaggctgaattaaataaatgttaaattttatgttgagttatttatgtttctgacattccacagctacattactatgaaactccaatattaatttaatcattgatctggaaacacaatactagtttgctttttatagttttcatttcttttcaccactaagacatattcggtataattgctccaagaacctaaggactcaaattaaacagatggatattatgaagaaggaagccaataatacctcacatccataagccccaaaaaatttttcagaaaagttacagcaaaatttgtccttgaattgtgatttttaagtactatgggtcatttttcaaaaatggattttaaattatggaatgtgggctgggcatggtggctcatgcctgtaatcccagcactttgggaggttaaggagggcagatcacgagatcaggagttcgagaccagcctgaccaacatggtgaaaccctgtctctacttaaaatataaaaattagccagccatagtggcacatgcctgtaataccagctacttgggaggctgaggcaggagaatcacttgaacccgggaggcataggttgcagtgagtcaagatcacgtcattgtactccagctggggcaacaagagcgaaactccatctcaaaaaaaaaaaaaaaaattatggaatgtgaatttcacctaaaattactattcatggggggaatcaattgaattatttgctatttgtgttttccttttacttacagatctaatcataaaaatagaagatattgacataagattgcttatagaaaatatttagttcaagtggacagttaattataaaaataatctacaaagcacaactcatctctttcttcccaaatgtgtttccttcaagttccttgtttctatcaattattctagtccctttctcattttattgatgaacatgcatcttaccactaccagctgaaacttcctcaagttcactttcatcctcttcctcttctacataacaattttcagtggctcccagaataaaataaaaacaccttagcctggcatttaagggtatggtgtaataaaagcagcagcatttttcaagtgctgaccacatgccaggtattgtggtaactgctttatatcatctcatttaattttcacagcaatccacaaaaggtgggaactatattatttgcccctttttcagagaaggaaactgaggtatagagaatttaagcaccttgtccaaggtcacataggtttcaagtagggacaccagtatttaaactcaatctcaagaagacatgtattaacccttttattattctacctatgttatagcctacctgtggaaactatgacctactactcaataaggcaatcttgtcaccatcctccaacatgccactttcactcacagctctaagattttgctcatgccctttccctctctattgcatattcaaatcccatccattcttcaaggcccagctcaagcccaacatgctctgacttcctattcttccaccactctatagcacagaatacttgctctgccaattttaacctttaatcacagtctttctgatatttttatataattgttgaatgtgtccataacttataatctcccacctaacaaatatccagagggtaggaacaaccaattgtatctacagcaatactatgctcacaatgggaattcaataaatgcttgctaaaaacaggaatgcagataaccatgcaaaataaatgctgtaaacttcataaatactagcttagttacaaaggtacatcttcctgaaatctctttaagctatactttacagggttgtggaagtatatatgcaaaatattagcaaattcaaaatagtactattttttgaacttcgtattgaagtataacttacaaacagaaaagtacaaaaaccatgcatacagctcaatgaattttcaaagaaacatacccatgtaccagcaaccaggttaagaaaaagaacattacatcccagaagttccccatgccgtaagggtagctactattctgactattagcactataaattaatttagcctaaataaacctttctaaaattattgttacaaccttttatatttgaggaatcaaatgtattactcaaatatgctattttttaaacatttaagaaatgacccactttgcctgagtctctcaaaaaatggccttgaacatacatattgaacatacaataatcttcttatagaaattattttctcatagacaattattggtgagacagaagttggtaaatcaactagcttccaatatgttcagttcctaataaatacaatgtttatggccaatagcaaaacaaagaaagagggggaaatttcatgtattatcaccaactgtgactgtggttgtatctacaaacaaaacactgtgaaaaaaggtgacatatcctgtaactcataggagaaaaactcatcacatcagtcagtttgctaaccccttgtgagcttccttacctgcccagtccaggaattcaacacactcagtctgagaatatctagcagcaacatctcgagccctttcttcccggaagttcaaagcttctatatcaacatccagttctaccagtgctttcaaagtttccaaacgaccccaggctgcagcacaatgtaagagtgtgtaccctaacaaatggaatgaagatggtgagatcaaacagactacattgttttaggctaatttatgtagtggaagatcataatggtgatcaagtattgaacaattactgtgggccaggcactattctaactgtcttacatatagaaaactcatttagttttataaaaccactatgatgtcagaactactacagttctcattttatagacaaggaaactaaagtccaggtggattaagaaacttgcccaaggaaacatccctggcaaacagtaaatgatggatgccagcatagactgtctgaaggctgagctcttcaacatcatgggaggaagatggcaatctccctagcagtcacctattctgaacgcaactggacctgtgattttaaagaatttttatcaaactctaattagcattattgttagcacaatcatacaaattactacaactgtgtataccttaggtttggaaattctattaattaaaactaaaattatggcctatcaaattagaaagtcatttcttagactttctcaagtgactatcatgaggtataattgtaaacaagaagaatatggaaggcatctttaaatatttttcagattgattttttaaaaattaaagatcactgtttgaacttgctcacaaggatatacatacttctttttactacaattcactttattgcacagagggacaatactcttaagctttctagaggcttcctggtgtgataaagggacaaccacagtcaatcccataatcttttgtgtctaaatactctaaactgttttttcagacaggtctcactctgttgcccagtttagagtgcagtggcatgaatagctcactgcagcctcgaactcctaggctcaagcaatcttcccacctcagcttcctgagtagctgggactataggctcatgccagcatgcccagatatttttttttttttagatggagtctttcgctgttgccaggctggagtgcggtggcacgatctcggctcactgcaacctccgtgtcccgggttcaagctattctgcctcagcctctggagtagctgggactacaggcatgcagcaccacgcccagcttatttttgtatttttagtagagacagggtttcatcatgttggccaggatggtcttgatctcttgacctcgtgatccacttgcctcagcctcccaaagtgctggtattataggcataagccaccatgcccagccaataattttttaaatattttgcagagacagagtctcagtatattgcccaggctcgtctggaactcctgggcttaagcagtcctttcctggcctcccaaagtgctaggattacaggcatgaaccaccacacccagccactctgaactttttgatccaacatgtcaacagaaggttatagagtcatatactcagttttttctcggaagcatgcttttctgacagtgaatcttaattttcatgtctttgtcatatggacaggcttggaatttcccaaattatccttttctcaatttatttttcccctggtattttcctataagcagtgagaagaaaccaggagcacctgcaacacttagcttaggaatcccctctctaaataaggtttcatgatgacatagaatcagaatgaagaaatagaatattttagagtgtatcatcaagtcctaaaagactatacacctattcccacacattggaaaatacctacaaaaaagatggcaatattcatgtcaaccagtcacaatactaccttccttgaatagtgttagggacacaatgccaaatattgatttgggtctctccttttcctttatatagtatggttttcaggtattactattatcctcatttttatagatgaagaaaccatagcacagaaaggttatataatttgcccaagtcacatagtcaagttagtggaaagctggggttttaactcaggtagtctggctgtaaaatccatgctcttaaccaatctattacagaatccttttgtaacttgatttttgtctcaatatttttaagtgttatccattttaatacccaaagagctaattcattccttttaattattgtgtaatattccattgtatgaaaacaatttatctacccttctattgtttatttccaatgattaactgttataagcaatatttgaataatcatcttatacttatgtcttcttgtaagcatgtgtgagagtttcccaaagacatatatctagaaatggaaattaggatcatcaggtatgtccatgaacaacttgatataagtgttctcaaaagggattataccaatttatactccctcctcagagtgaaggaattcccatttcctacatctttaccaatgtttaatcctgtcaaatatttaaatttttctgaatctgatgagtcatggtagcccattgtttacatttgcttttaatagtgaagttaaacatattttcatttatttactggccatgagagtttctcttccataaattgcatgttcctatcctctgcctatttttctattgggttgaattctaagcctgttgattagtaggctgtctttacatagatatatcctttgtctgtggcttattttgtcattttgtttatgatatcttttatgcagagtttaaaatttaggtagatagacagatcttttcccttagtggttgggttctttatatctcaagatattctgtgatgtctcaagaatatagcaatactctatttttcagaaagtttaaaatattttgctttacacattcatgtcttacaatcatctgtaattgatttttatgtatggtacaaagtaggtatataattttatttttttccagatgaataataaatattctctggcatcatatattaaatagttcattttccccactgaaatttagggtcagcttctcagtttgcttttaaaaagattcttctgagatattaactacactgacaaattaattgggaagaaattaagagaaacagcgttatgatatttagtctcactattgagacatatatacatttcgtgtggtctttcatataaatcaataaagtttcatactttttgccataaatgtcttacaattcttattttattattattacactttaagttctagggtacatatgcacaacatgcaggtttgttacataggtatacatgtgccatgttggtttgctgcacccattaactcgtcatttacattaggtatttctcctaatgctatctctccaccaaccccctgccctataatagaccccggtgtgtgatgttccccaccctgtgtccaagcgttctcattgttcaattcccacatatgagtgagaacacggtttggttatctgtccttatgatagtttgctgagaatgatggtttccagcttcatccatgtccctgcacaggatatgaactcatccttttttatggctgcagagcattccgtggtatatatgtgccacattttcataatccagtctatcattgatgggcacttgggttggttccaagtctttgctattgtgaatagtgccgcaataaacatacgtgtgcgtgtgtctttatagtagcatgatttataaacccttgggtatatacccagtaatgggatggctgggtcaaatggtatttctagttctagatccttgaggaaaattgtgttccacaatggttgaactactttacactcccaccaacagtgtaaaagcattcctatttctccacatcctctccagtacctgttgtttcctaactttttaatcatcaccattctaactggtgtgagatggtatctcattgtgggtttgatttgcatttctctgatgaccaacaatgatgagtattttttcatgtgtcttttggctgcagaaatgtcttcttttcagaagtgtctgttcatatcctttgcccactttttgatggggttgtttttttcttttaaatttgtttaagttctttgcagattctggatattagccctttatcagatgggcagattgcaaaaattttctcccatcctgtaggttgtctgttcactctgatggtagtttcttttgctgagcagaagctctttagtttaattagatactgtttgtcgatttgggcttttgttgccattgcttttggtgttttagtcatgaagtccttgcccatgcctatgtcctgaatggtaatgcctaggttttcttctagggtttttatggttttaggtctaacatttaaatctttaatccatcttgaattgactttagcataaggtgtaaggaagggatgcagtttcaggtttctacatatggctagccagttttcccagcaccatttattaaatagggaattctttccccatttcttgtttttgtcgggtttgtcaaagatcagatgattgtagatgtgtggtgttatttctgaggcctctgttctgttccattggtctatatctctgttttggtaccagtaccatgctgttttgcttactgtagccttgtagtatagtttgaagttaggtagcatgatgccttcagctttgttggctttttgcttaggattgtcttggcaatgcagggtcttttttggttccatatgaactttaaagtagttttttccaattgtgtgaagaaagtcattggtagcttgatggggatggcattgaatctataaatcaccttgagcagtatggccattttcacgatattgattcttcctatccatgagcatggaatgttcttccatttctttgtgtcctcctttatttcgttgagcagtggtttgtagttctccttgaagaggtccttcacatcccttgtaagttggattcctacgtattttattctctttgtagcaattgtgaatgggagttcattcatgatttggctctctgtttctctgttattggcgtataggaatgcttgtgatttttgcacattgcttttgtatcctgagactttgctgaagttgcttatcagcttaaggagatttggggctgaaacgatggggttttctaaatacacaatcatgtcatctgcaaacagggacaatttgacttcctcttttcctaattgaataccctttatttccttctcctgcctgattgccctggccagaacttccaacactatgtggaataggagtggtgagagagggcatccctgtcttgtgccagttttcaaagggaatgcttccagtttttgcccattcagtatgatattggctgtgggtttgtcataaatagctcttattattttgagatacattccatcaataactagtttattgagagttttcagcatgaaggtctgttgaattttgtcaaaggccttttctgtatctgttgagataatcatgtgtttttttgtcattgggtctgtttatgtgatggattatgtttattgatttgtgtatgttgaaccagccttgcatcccagggatgaaggcaacttgatcatggtggataagcttttgatgtgctgctggattctatttgccagtattatattgaggattttcacatcgatgttcatcagggatattggtctaaaattctcttttttggttgtgtctctgccaagctttggtatcaggatgacgctgacatcataaaatgagttagggaggattccctctttttctattgattggaatagtttcagaaggaatagtaccagctcctccttgtaactctggtagaattcggctgtcaatccatctgctcctagactttttttggttggtaggctattgattactgcctcaatttcagatcctgttattggtctattcagcagttcaacttcttcctggtttagtcttgggaggatgtatgtgtccaggaatttatccatttattctagattttctagtttatttgtgtagaggtgtttatagtattgactgatggtagtttgtatttctgtgggatcggtggtgacatcccctttatcattttttattgtgtctatttgattcttctctcttttcttctttattagtcttgttagcagtctatcaattttgtggatctttgcaaaaaaacaagtcctgtattcattgatttttttgaagggttttttgtgtctctatctccttcagttctgctctgaccttagttatttcttgccttctgctagcttttgaatatgtttgctcttgcttctctagttcttttaattgtgatgttagggtgttaattttagatctttcctgctttctcttgtgggcatttagtgctataaattttcctctacacactgctttaaatgtgtcccagagattctggtatgttgtgtctttgttctcactggtttcaaaaaacatctttatttctgccttcatttcattacttatccagtagtcattcaggagcagattgttcagtttccatgtagttgtgtggttttgagtgactttcttaatcctgagttctaatttgattgcactgtggtctgggagatagtttgctgtgattttagttcttttacatttgctcaggagtgctttacttccaactatgtggtcaattttagaataagtgtgatatggtactgagaagaatgtatattctgttgattcggggtgcagcattctgcagatgtctattaggtctgcttggtgcagagctgagttcaagtcctggatatccttgttaaccttatgtctcgttgatctgtctaatgttgacagtggggtgttaaagtctcccattattattgtttgggagtctaaatctctttgtaggtctctaaggacctgctttatgaatctgggtgctcctgtattgggtgtctatatatttatgatagttagctcttcttgttgaattgatccctttaccattatgtaatagccttatctcttttgatctttgttggttttaagtctgttttataagagactaggattgcaacccttgctttttttttttttttttttgctttccatttgcttggtagatcttcctccatccctttattttgagcatatgtgtgtctctgcacatgagatgggtctcctgagtacagcacactgatgggtcttgactctttatccaatttgccagtcagtgtcttttaattgcggcatttacatttatggttaatattgttatgtgtgactctgatcctgacattatgatgttagctgattattttgcctgttagttgatgcagtttcttcctagtatcaatgatctttataacatggcatgttttttcagtggctggtaccagttgttcctttccatgtttagtgcttccttcaggagctcttgtaaggcaggcctggtggtgacaaaatctctcagcatttgcttgtctgtaaaggattttatttctcctttacttacgaagcttagtttggctggatatgtaattctgggttgaaaattcttttctttaagaatgttgaatattggcccccactctctactggcttatagagtttctgccgagagatcagctgttagtctgatgggcttccctttgtgggtaacccaacctttctctctggctgcacttaacattttttccttcatttcaaccttggtgaatctgacaattatgtgtcttggggttgcccttcttgaggattatctttgtggtgttctctgaatttcctaaatttgaatgttggcctgccttgctaggttggggaagttctcctggataatatcctgaagagtgttttccaacttgtttccattctccccatcactttcgggtacaccaatcaaatgtagatttggtctctccacataatcccatatttcttagaggctttgttcatttctttttactctttttctctaattttgtcctctcactttatttcattaatttgatcttcaatcgctgataacctttcttccacttgatcgaattggctactgaagcttgtgcatgcatcacatagttctcctgccatgattttcagctccatcaggtcatttaatgtcttctctacactgtttattctagttagccattcgtctaatcttctttcaaggtttttagcttccttgcgatgggttcaaacatccttctttagctcagagaagtttgtttttactgaccttctgaagccaacttctgtcaactcatcaaagtcattctccgtccagctttgttccgttgctggtgaagagctgtgatcctttggagaagaggtgctcttgtttttagaattttcagcttttctgctcggtttctccccatatttgtggttttatctacctttggtgtttgacgttggtgacctacagatggggttttgctgtggatgtcctttttgttgatgttgatactattcctttctgtttgttagttttccttctaacagtcaggtccctcagctgcaggtctgttggagtttgctggaggtccactccagacctgtttgcttgggtatcaccagcagaggctgcagaacagcaaatattgcagaacagcaaatattgctgcctgatccttcctctggaagcttcgtcccagaggggcacccacctgtatgaggtgtcagtcggcccctactgggaggtgtctcccagttaggctacatggggatcaggaggcagtgtgtccgttctcagagctcagacgccatgctgggagaaccactgctctcttcagacctgtcagacgggacatttaattctgcagaagtttctgctgccttttgttcagctatgccctgaccccagaggtggagtcaacagaggcagcaggccttgctgagctgtggtgggctccacccagttcgagcttccctggctgctttgtttacctactcaagcctcagcaatggcagatgcccctccccctgccacgctgctgcctcacaggtcaatctcagactgatgtgctagcagtgagcaaggttctgtgggcatgggacccgccaagccaggcacgggatataatctcctggtgtgccatttgctaagactgttgtaaaagcacagtatttaggcaggaatgtcccgtttttccaggtacagtgtatcatggcttcccttggctaggaaagggaaatcccctgaccccttgtgcttcccatgtgaggcgatgccctgccctgctttggctcaccctccacgggctgcacccaatgtccaaccagtcccaatgagatgaaccaggtacctcagtcggaaatgcagaaatcacccgtcttctgcgtcgatcatgctgggatctgcagactggagctgttcctatttggccatcttgtaatggacccatgtcttaaaccattcttttgtcagacttattcctagtttctttatcattttgttatgaataagatctttatttgtatcacattttcttgttgttcatggtatatagaaagttgctgattgggatattggtcttatgttcatattcttcctaaactctcttagcactaatagtagattcccttgaatttaagtctatgtacctatgaataatcagagttttgtttcttatactctaatctttatatccagtagtgtgctggtaaatgtataactagttatctggagaaaaaagccctgatttgtatcattagccaattactgtgatgtatggcccgacatggccagtttcaacagctatcaacatgacgtcaaccaattcacagaaactctgaaaatttaacaatcagttcttcagagctcataaaagctggctctagcacaatactgtgttatttctcttacccttcttactgctcttgctggaacctctattataatgataaatggaagccataataacaaatatcttagtcttatttctgattataaagaatgcttctgaaaaatccaatgttgggtaagttcgctttgggtttttgatagacagccttaaggaaagtttcttctattcctatttccctaagagctttcatcacgagccagatgcagtggctcatgcctgtaatcccagcactttgggaggccgaaggaagagcattgcttgagcccaggaggtagggaggcttgtctcaaactcctgggctcaagctatgctcccaccttggcctcccatagtgctgggattacaggtgtgagccaccacacctggctctaatgattttttttacatcttaggtttttttctgtgttaatattctatgttttcaattccaaatattatttgtgctgtctctctctgattaatagtattaaagctcggctgggcgcggtgactcacacctataatcccagcactttggaaggccaaggcaggtggatcacctggggtcaggattttgagaccagcctggccaacgtggcaaaaccccctctccactaaaaaatacgaaaattagccaggcatgttggtgcatgcctgtaatcccagctactcgggaggctgaggcaggagaattgcttgaacccaggaggtggaggctgtagtgagccaacattgtgccactgcactccagcctgggtgacagaacaagactctgtctcaagaaaaaaaaaaaagagaacaacaaatatgtgtgtgtctgtgtatgtgtatgtgtataatcaaatgtttttcaactcattttcagtgaacccaattttggtattatcaatcctttcctttccatctattctgttttctattttctttcttcttcttctttttttttttttttttttcagcaacagggtcttatcatgtcacccaggctgttcttgaactcctgacctcaagcaatcctcttgcctcggcctcccaaagtgctgagattttaagtgtgagcctctgcacctggcctctggcctatttctttattttcaatgtcattaatttattcaattatttttcttttattttctttggttactcagttgttctttttctaatttcttcagtcaaatgctttgtttactaaattttttatgtttcttatattctaatatatgtattatactagaattttaattttagttgtatcccatgggttcagacatagagtgatgctgttgtcacttaaacatttcataattttcattatatcttctgtgaccaatagatgatttaaagtgtgttcttggctggatgcatagctcacacctgtaatcccagcactttgggaggccaagacaggtgggtcactggaggtcaggagatcgagaccagcctggccaacatggtgaaaccccgtctctaccaaaaaatacaaaaattagccaggcgtggtgacccatgcctgtagtcccagctactcaggaagctaaggtgtgagaatcacttgaacctgggaggcggaggttgcagtgagctgagatcatgccattacactccagcctgggcgacagagtgagaccctgtctcaaaaaataaaaatgaaaataaaaaataaatgaagtgtgttcttgttttcagttttcagttacctttttgttactactttttaattttattttgttgtagtcactgatcaaagactatatgctatagatactttgatagttgttaagacttcctttatggctcaacatatgatcaatattttttaaatgttccatgtgagcatgaagagaatgtatatcctttctttgctgaagatcatgctgatgatcttttttttattttctaccatgaccacgtattatatttgcaatctgaaaaaataattactgaatttaaaaagcgacttagataatgattgctaaaaaattaataaatcttcaaaggaaagagataacagtaaattattacacatttactatatatcaatttacgatatgccaagcactaaaatatttattttatcctatttaatcctcattataccctataaggaaaatataattattatccccattttgcagatggaaaaacagatacacaaaaagatcaggtaacttgccaagtcacacagctaataaatagtaaagtctatgttctaaaatactatactatgtaatatcaacattgatacatttacatgtatacacatacatacacccatatagatgtatatacacatatatgtaaagtataaaacaggcacatcaaatatatctaaccttaaagatattacattgcatctttaggtagtcataagtaatactgatgagagaaaaaagacaaaatacctctggtggttttttcattcagattcacaccatattttgccaaagctctaatcacgtcactttgcccagccatgcaagctgcatacaacaaatttctcccaacgatgtcttcttctaagagaagctgcatggcctgttcatgatgaggattctcaggatcctcaaatatcttctgcaaaccctctacatcccctgtgagagcaggttgtaaaagggggttcttagggcctgtttcctctggttcttgggcttcttcttcttcattttcctcttcttgctgtgagaaaaattctgaactctctgactctggaggtccttctgactccattaactccaaaaatacctatgaccaaaaaaataaaaaagtgataaaaatctactcaaacacatcagtatttgtttatttatttgctcagtcaactgacaatatagatggtataaaaatacttaactatttgaaaataactataaagtaagatacttcagcaattccatcaataaagtttattgtgtacctattatgagtaggtacatataacatagctcaagtatatactaaaatgttaaatgtgtgaaataaataataaattcaatagaaacaggagaagaaagagatcatatgatctaaattcattaggaagagattgaaaaagaatgtctaagagacccacttgcctaaataagggtccttgtatgagagaagtgagaaatataattgggttactggagccagattatgattaaaaattaggcaacgacatttaaacagaattcattcagtcagtaacacatactgaaagcactgtgtaaattgtgaaaaccagaatcaaatttatttcctaccttcaacaagttactatttcaaaggaaaaaatatgaagtgcacaaaataagtgtaataaaaggtgacaagtagtaataatgctatgggagaaatgctatgggagtttagaagcaataagattaattccagataaaattattcaagatgtttctttttttttcacaacagacaggaaatgtgcccgtgttgtaacaaggtttgaaggaggtacctctcacacatgagcatgaaaacccaataatcacacctatgaattacaaaaggatctaactaaggatgtcttaatggtgcttcagtctgtcagaacacagtattaaactgggaaagattcagagaagagtaccagagtcccttcattacgtacaagaatgtttgtggcatcactgttcacaacagcaaaaaacccagaagggaaaaccaatgtccaagaagatgagcataaactggtatattcacacaaaatggtatataactgttaaaagaaataaattacaatgatatgccatatggtaggcaagttctgacaaggctcccaatgtcccacccctgcctcctggtattcataccttcgtgtaatttccttaccttgaatgtgggctggacctagtgactggcttctaatgaagagagtacagcaataatgaggggatgtaaattctgtaattcagttacaacagactgtgattttgtcttgctgatattctctccctggctcttctcatgcgctgtgatggagaaggccacctttcaaggaactgagggtgatctctgttcaacagccagtaagaatcaaagctcttaatccaattccataaggaacttaattctgccagcaaccactgagtgagcttggaagtagatctggcccagttaaccttgaggtgactatggcctcaggcaacaccttgattatagcctcatgagaaatcctgaagtagaggatccagctaacctgtgcctagattcctgacccacagaaactgagataatgaatgagtgttgtttttaacctaacaagcttagggctcatttgtcacacagcagtaagtaagacacagaacaatataaatgaatcttaccaatatatcacatgaaaaatgtaaatccaaaagattatatatatatatctcaagatgtatttttgtcaagtgaaaagcaattaaacagactttttaggaatacaagtagatgcagtaacactacacagaaaaaaaagacaaaaagcaacattgaacacagattcaagatcatgtttaccaggggtgaagggtagtgggagaagacaagatgtgggaaatgtgataaagggaattatatgtttagtaaagaatattaacatttaagctgagccatcaagaatgggcaagactgtcattcagaagtcagaaagaaggaaattccagatggaataactaagttaaagcaccaaagcaaagatcacaggtatttttgggaatgagcatgttggccaatttggttaagtataggccattcaaaataagcaagaagtctgctcttaaaaagaggctgggattgcatcagcaagtctgaacttgattctgtagacaactggtagagcaaggagcaattaaggacagttagctgaaggttttagtgctaggaactaagtaggtttcaaggagattgatccgacaagcctgagtgacatagattagaggagtaagagactagaggcaaaaaagaaaaatcaattagacagttattacagaaatctaaattagtgtgaattggggctttaattattcactcatataattcagtgtttactggattccttcctctatgccaggcactatgctagatcctgaggattcaacaaggtaggaaagatccctcctatcatgaagcatatattctgattggaaacaggcaataaaaaataaaaaaagtgataattttagattgttataagtgtttccaaggaaataaacatggtgaaacactaggaaataacagggaagtgaagagaaaaaacttgaaaaagaacattcaaggtgatactgaagtaggactgcagagaatgacaaagactatgaaggccacaggaaaatggaacagcattccaaagcaggggtaaaaggccagggagcagatattttaggcttgtggaccctctgtctctattctaacgactcaactctgcagttgttgcttgaaagtagttacagacaatacacaaatgaatgggtgtggctgtgtttgaagaaaaccttatttacaaaacaggtggtggtccacaggccatagttttctgaccctgttcttaagaaataacagtcctaaagagtgctgaaagaaaagaaaattgtcatttactgctatggtgaagtaaagaaaataaataggataatagtcgaaagatcattgtgatatgcattttaaattggtagaatattagaaacttctctattactaccctacattaatcccttccttctgtaaatgtgtataatgcttgtaagctgttaggaattctttggctgtaaataatacaaaagccaagtaagactgactatttaaaagtaggagattcttttcacacataatgagaaatttaaagatggagatggttcagcagctcaaaaatatagatccaacctctttctatcactccatcatacttagtgtgtaagactttcatcttcacaactcttgcctcatgttataactcctgaaatctcatcttaattgatggcaggaagaatggggaaatcacctagaggataccagtgatatcaatccttccaatccctcttaaggggaaagcaaaacaaaaatcttttctaacaagtcccaacaaacttccagttatatctcaaaggccagactgtacaatgcggtgtggctaccccatctttaagaggagagggaggaaaaaaagcaagtttcttgattttccagcctctgtgatagaggcaagcaaggtagacagggattggaaatgggagttgagttacccaatcaacaatgactcaaccataagatttggtgcatgtcttgtatttgagatggtttagttcaactctttcattttacagaagaattacagtggaaacttataattcttcagtgtctgacatccaactccccacccttccaacacacacacacacacacacacacacacacacacacaccttctttaaagcactcctatctcagtttcagagaattctaataaaagatatagctaacttcccacaccggaagactaagaagcaggattcttcttttctctctctcagcacaagcctgggggcaggcacattatttaagctcagcccatcaggggatctatcctgcgatcttgaatcttgaacaagggacacaaggaaatgaggctagttgaagggcactcatcgcaagtgacagaaatagtatgctgatcaaactgcctgctatgagaacatactgtggttcttgtggtctgatcctccacagttcccttggtttcctcattttcagcctcccagtaattactagttgtcttccccaaaatctcatctccttttcttttggaatagaaccccaccctctcttcttttggaatagaaccccaccctcttttcttttaacaaggcttttttctaaactgatctttatggtggaataagactattttccaatctctcttgtaatattggtgtggccacatgtccaaatagtaagcgataagatgtaatcagatatatagactgcaaattccaggaatgcttaattccttcccactggatttcaagcataatagctggagcctgaaaggataatttagaccatgaggtggttgttctcttcaaatacgtatatattattttatatcttgtataaattatttctgttatacgtaaattagtttatgacattttaattttatatgtaaatatatgtaactactatcaatagagtatccacataatttattgttcagtaacaatggacaattttatcctggatacatggcatatatggctatatttgtacatatatatttctttttaaaacaaagcaatgtttctctttactacaggtaacatatcactgttttttgtcgcattctatttttttaaagctgggtgccacctactaaactgactgtatgacccactaaatgggatacaacccacagtgtgtaaaaacatgagtcttgaataagcactatggagactataccaggaaatcaacaagaaggactctaacagaagttaaacagcttgtgtttatggttaatagcttgggtgacatatgtcccaatgtatgcaggacatttcccgttatagctgttttcctggtataatttttaatagcatctactttcactctcaaaagtgtctgttattattagacaataattttgtcactctattaatagtagttgtaatcttttgaaacatttctgctaaagatatccatattcaaaccttagagaatagaggcaggatgtgtttggaatgcctttcactggaacaccagggtcccagccatgagaccttgaagatactgagaaattcctatttttgtttcacaggtattcctgctataagacctagaatagctttacatctcctacattccaactacccaaatcctatttaggccaagctataagcccactttcttcctaagcctttccctaattcctctcttgagtgtacactggcctttcaatattctgaactccaaaggtcattatgtatagtctatacaatacaacttaccaaatatgatattatattatttcctaattgtttcaagtacgtaatctatccaattaggttgtaaacttgctgggtgcaggaatcaagccttacatttctttgtgttactttcagacttaccacaattcttaacaagtcatatatattcaataactcttaaagtcaagcttgcaattcccagtgctttttttcatagccaagagcaatgggttttggagtcagagagacttgggttcacaatccaatccctcaatttattagctgcataatactgggcaatttacatactcttttgtaggaataacactagagcctagtctatgattgttctaagaattaaaataaattaggtgatgtacatgccaagcacatggggaacatttagtaaatagaagctaccatcatcattattaggtcatcatcaaacctccagcaaaatcatccatgaagcaaaagaaaagatggtaatgctacttattttcttttttaaaaaaataaacaacaacaacaacaacaaaaaactaggtcttgctacattgcacaggctggtcttgaactcctgggctcaagctatcctcctgccctggatcctaagtagctgggctcacaatcctcctgcctccacctcccaagtagctaggactataggcccatgccaccacacccagctcttcttcttttttaatatgccatagtttattcctatgcaaggtatgaataaataattttctaccctaccaccaccagacacttgattaccaacatattattccacatttagagatcagtctgatcccaggttaattcaaagatatgaagacaaactagatcaaatcttgaactatgatttggtccagaatattcaaagctactcttgttatacccttgaatggagcttaatttctatatcagcccagaaccaacataattagggcagtggttctcaaattctttgatctcagggctctttacagtcttaaaaattgagaaccccagggaatttttgtttatatgagttatatctaaattaatatttatattggaaattaaaactgaggccaggtacagtggctcacacctgtaatcccagcagtttgggggactgaggtgagtggatcacttgagttcaggagttcgagaccagcttgggcaacacagcgaaaccccatctctacaaaaaatacagaaaaaaaaatagctgagcatgggggcacatgcctgtggtcccagctacttgggaggtggaggtgagagaatcgcttgagctcaggaggcagaggttgcagtgagctatgatcacgccactgcactccagcctggatgactgagcaagaccctgtctccaaaaaacaacaacaaaaaaaccacaaataaagtacgtattaattcatcttaaacacattacttgttaacgaaaaaatagtttatgaaaaataactaggcctgaatacaacaaaagattaagtaagggagaattcactctgcctaatttcaagctgggcatctaccttcaggctcaggctgggactagaacttatactatcagctttcctgtttctcaggccctcagacctggattggaactacacaaatggctctcctggatctccagcttgctgaatgcagatcttgacatttctcagcctccataatcacatgaaccaattccttataataaattattctatatttattcatatatacagttgtccctcagtattcatggggggattgattcaggaaccctccacccctgtagataccaaaatccatggatgttcaagtgccttatataaaatggtgtagtatttgcatataacctacacacatcttcccatatatgttaaatctagattacttataatacctaatacgatgtaaatgctatgtaaatagttgttatactgtattgcttagggaataatgacaagagaaaaagtctgtatacgtttagtacaaacacaaccatccatgttttttcaaaaaattttagatccaaggctggtttaatccgcagatacagaggactatatatattgtattgattctgtttctctgaagaactctaacacaaatagcatttaaaaaaaattttttttttagacaagatctcactctgtcacccaagctgaagtgcagtgatgccatcacgactcactacagcctgaactcctgggctcaagcaatcctcccaactcagccttctgagtagctgtgactatagatgtgtgccatcacaccaggctaattttttaatttttctgtagagacagggggtctggctatgttgcccatgctggtctcaacctcaagtgatcctcccacctcagcctcccaaaatgctgagattacaagtgtgagccaccgtgcccagctgcaatttgcattttagaaaactcatactggccatgtgttggccaacgacttcccaatacttttatgatgagatcagagatgatattaatgaaagtgggcttttaaaaatattacagcatgaaacatgttaacatttggaaaactggtataactaaatgaagcaacattttgcttgatttgaatgactgcttttcttctttacaaaatcagcttcactccccctgccattttccattatgttacaatatcaagcatgggtaaaagatccaaagtataagacagatcaatagattttaatgtaacacagtatgaaacgttcattgacatggcttcagattccacactgcaaccagcctttaagaaactaccacttgtggccaggagcagtggctcacacctgtaatcacagcatactgggaggctgaggtgggcggatcacaaggtcaggagttcaagaccagcctggccaatatggtgaaaccccgtctctactaaaaacacacaaaaaaattagtcgggcatagtggcaggcgcctgtagtcccagccactcaggaggctgaggcaggagaatcactggaacccaggaggcagaggttgcagtgagctaagatcaccccactgcactccagcctggcacaacagaatgagaccccatcttaaaaaaaaaaagaaagaaaaagaaactaccacttgcagagttttggtgcagtcacaaaaatgtgcacaattatctgaaaaagctattaaaatactcttcccttttccaactatatatctatgtaaggaggaattttctttacatatttcaaaacaacatattgcaacggatagactgcagaagcagacataagaatctgtctcccattaagccagaaattaaagacatttgcagaaatgtaaaataatgccactttctaactaattcttttgttctggaaaatatttttatgagaaatatataattatgttacatgtgaatttattttttaaggaattaataaacattttttaaatcctcagtttaatttctaattcttacaacatatgtaatactatattaaaagacataactcacataaaggaaagctcttcgggatcatttcttaagagtaaaatggagtcctgagacaacaaagtttgagagcactgccttaggatatacatgagacctagaaataggaaagtcttgcaggatgcttgccctactcaattgctatagcagggcaaggaggctttgcagggagggagggctgtggtgcaaaccactccagtcagggctgaagggaagtcacagcaggaactcagcgcaattgagtgagccagggagctcaaccgagtcctgacaaaaccaggagatacctgttcacaaggtatataagccaaaggttaaaaccaagaaagccatagggcagggagcactcggtataccaggaacatcaccccccagagccaagggaaggcaaagggaccctgacccgtccccataactgattccgtgagccatccacatagccagggcaccatctcaaggaaagaatccaagaagatacctgataacctaaatatttgtatataagagaaattaaacactagccaaagaaatcaattctagattgagctaaactttaaaaccaatcggacatttagattctttcctaataatcaataagtaaatgctcatgaaaggaaccagatcagtcatatacaaaaataaattacattttctttgcccacaaaagtaataacatacatcaaaattgtaaccttgctacatataactgaagtttcacagagaatatgagcattggagggaagagggaaggctggaactatgaaggcagaatggcattgctttagtcttgattctgttactaattatgtgacttttctgaaatgaggatagcacctggtctgccttactaaataagtgtagaaaaatctataaacttttctttttaactatagaatgtgattgctttcgagccacccacaatagaaaatcacataggtcatagcacctaccccataggctctcacattttggtagggaagacacaagtaaatcagcaatgacagagtgagatcagggattcaatggaggtaggtagagtgctttgaaagtaaaaccgtggacatctacattcaattctgggtggcggtctcagaaagttttcccagaagaggtgaaacctcgatagtgaagagtaggagtcttaaaaggaggaaaaaaggacaatccaggtaacgggaagagcataaacaaagggcaaggaggcaggcgacgcagcctgaagttgtgatagaggagtagatcctaatgtgccttttaagccaactgatttttttcttcaaaaaaaaaaaaaaagtagtcgcttaatcaagtcccagctcaaggagaaggaccccaagggcaaccctgggcacacagagttaaacaaagagaaggcctgaggaacaggatacagaaagtggcagcgccgccaggtgatccaggaggtcccgcgagggggcaacggacacttcagggcaccagagtttgctcttcggcctgaattccctagggaccttctgcgatcccttgcggctgccggcggggtaggagaccggtgcgcaaagctctggacagaagcagtgtgaggacgctgagattgaagcccactcccctccagccctgcccgagcagcctggagggaagatgtccgtctaccccatcgcactcctccccaagtgcccaccccggcccacagcgccaggacccctagactcaccacacccgggccccggcctcctcggttaccatagcaacggcgcaacacgcgaggcagcgcctcctcctgcgccgcggttccggcagcgcgggaaggttattcttggttgcaaaggcgcaggaagccagagtggaaaacagccaggaattatctataatttcagtctctgggtggcgtgtcggttttttctttgttttgtaaattttctgtaataaggtatttgttttacagtttaaaaataagttgtgcatattggttgttggcctgtctttggcttttaaacgaaagaattttctggaaatatgaggttgcattctaaaaactacaaaagattgtatgaataaccccttgcttaattttctagttattggatatctttctcccatggtttatggtcattgtcaccagcaaggagtgtttcaggcgacctcacaagtgccaactaccttaggagcagaagaaacttggagactatatccctcttgattcagaaattcaagatgcaaaacacaactttaaaaggggggaagcgatggaggtggagggacaaggggttcgaaagaaaccagcagggaagggccaggcatacctagcaattatatcaatgttcacatgaatcacacagtgaaaacagggaagtttttgtgctgaaggcaggtgtgaaggaaaatattcatttctttactgtttctaccaagagtccactaaggagtaagtgaatgttttagaggggctctgaacatctgtgctgaagttcgaatagcctagttctgaaatgaatatttgacctaaggcccaagcaaaatttcaccattgttacagtaggtagtcaggcatgagcagagcaggctcccctatcccccaccaggaatgtcaggcgaccatcaggtgataggcagttgttaactgtctctctaaaataataattggttgcagccaatgccaggaaaaggcactctccgaatagatagaaaacatctgaaactggttatcagcagcttccccataagagctcaggagttaggtgatgtgagaaacacactcacctgtccaaacccaaagaatggacttagaggcatgaagaacagcaaaagagacactttttaataacggtcttgcaagatcgggtgtctggtgagcaggaacacccagtgcagtttcaacaaggaatttatcacctagtgtgcaagtccctaccctggttcctcataggctgagtactatggggttacagtcttccccaacgttgcctaagtttcattatccccttataaggttacatcttgtctccttccccactttaagttttgatttcccaatgacaaaactttctttccttttatggattagccaccccaccccctatttttttttctccctcccctctgacttctgtgagtcttatcactcttcccagatgtctgtagcatgcggcttgtcacatctgcaagggagctgcctggatttgccggggcctgttttctgaaaaatggaccacttaaaaagtacttcttacaggtgagtgggctcaaggatacacattaagagtcaaaatggtggagtttaactggtatatgaccttcttgggtacattcaattggtaagagaagaatgcctcaagtgtcatgcatagaactgcagtaaacacactgcacgtgctcctctcccaagtgctagcaggccactgcacatgtggatagcccatcccaagagaagaatcaggggagaagggacgcaagaccctagaagtatgccaccatataaaaccctaaggccgggcacggtggctcatgcctgtaatcccagcattttgggaggccaaggcgggcggatcatgaagtcaggagaccaagaccatcctggctaacacagtgaaaccccgtctctactaaaaaataccaaaaaaaaaaaaaaaattagccaggcgtggtggtatgcgcctgtagtcccagctccttgggaggatgaggcaggagaatcacgtaaacccgggaggcggaggttacagtgagccgagatcgcaccactgccctccagcatgggtgacagagcaagactccgtctcaaaaaaaaaaaaaaaagaaaccctaagtcaaaagtcaaactggacttgatctctcaaagtcacccacttggccctttccaagtgtacattacttcctttcattcctgcccaaaagctttttaataaacttacactcctgctctaaaacttgcctcggtctcttcttctgcctaatgcccctcagattctttcttctgaggcaagaattaaggcggctgcagacccatacagattcaccaccagtaacaccatcataaatctgaacttttgaaatacaagaataaatttgaattttttcaaatgtaattattaatttttcatgttcaaataagttgtggtaatcaaaattttagagttttacattatagagaggaacaataatctgtcagttggaagcttgctcctgcagtcactatacaacacatttgctctactcaacaatcatttcttactgaaggtgatgaagagcaaggctaattttaggcatttcagttttaacatgctatttttcatagtctttgttttttaatatctggatggaagatgacttatgatgcataactgtacaaaactgtacatgattctgtttttcattaatcttcaggggatatgaagaattcccaaatagaactgtttcttgaatgtctgaagtggaattaaacaactaaaaattaaatagaacttttaaagattattttttagtgctctgaatgctaatattagaaaggtagtaagacacaataggtttgagacctaaaagcaaagatgccgtgagctccacttgaactccaggtcagaaacagctgcgtgatgcacctaggcagaccaggttagaaacagacaggagattcatggcaagagtgtggcctagatgcagcagaaagactcccatgacaccctctcttagccacaccccctgcaagcttgacctgagagtattggaaagagccactggatttgaaggggccgagtgcccatgtgtaagacacatctcagcaataacctgtgggtattaatgatggaggtccagataagacagtgaaggcctggtgaacagacagcttaagcagcaaatgattaagcactattcaaaccccccagaaattagatcccctccagaaaattatggtaggtgagaggtttccaaaactattgaaactagttttttccaacataagagaataggccctcagaatagaaattattgtataaaaaactacatttctatactttttttttttttttttgagatggagtcttcttctgtcacccaggctggagtgcagtggtgtcatctcggctcactgcaacctccgcctcttgggttcaagtgattctccggcctcagcctcccaagtagctgggattacaggcacacatcaccacgccttgctaatttttgtaattttttagtagagatggggttacaccatgttgggcaggctggtctcgaactcatgatatcaggtgatccacccgccttggcttcccaaagtgctaggattacaggcatgaaccaccacaccctgccatatttctatacttcatagactgagtcatgtccgttgtacaatgtcaatttctgatgaaaaacctggatcaactagttgaaaaatttactccaaggtaacttaatgtgctacatcttgttgtttgaaagcctattatatgctgagtactgtgttaagtgattcatataaattatctctaatccttatagcaactctataagttgctataagaaagtgatattattcttgaaaccgacacttcagaaggttgagtcacctacctaagaccacacagctaatagggccaaaccaggatttgtacctaggtcagtctggtttaaaacaccagaggactgctacttgttagctatatgctaattaaatattagagaaaatctgccaaaaataacaactttatttcaaaataatttgccttgagtctttctggcaataattagataatattaaagccactcccctggtgtgtaactaaagaattatttctccatgtagctaatctctacagttgaggagaatgaaatagtgaacacccatggttttcacctgctggtccctccttttctggttagtgaactcccattttctgtgagggaacctttcttttctttttctagatatagcatcttactctgtcacccaggctggagtgcagtggtgtgatcacggcccactgtagcctcattctccccaggcttaggtgatcctgccacctcagcctcccaaatagctgggactacaggcacccaccaccatgcccagctaatttttttttgtattttttgtagagacagggttttgccatgttgcccaggctggtttccaactcttagccttaagtgatcctcctgcctcagcctcccaaagggctgggattacaggcacgagccactgcactcggcccaccttcatggttcttttgggatggggatatttttggctttttttttttccacattcaccatgcttttgtgaacctcaaaaatctgagacaggtatcagttgatttggaaagtttattttgccaaagttgaggatgcacgcccatgacacagcctcaggaggtcctgataacatgtgcccaaggtggttagagcagtccccaaggtggttagagcagtttggttttatacgttttaagaagacatgagacattaatcagcatatgtgagatgaacattggttcagtctggaaaggtgggacaactcgaagcaggggggttagaagtagggggtgcttccaggtcacagatacataagagacaaatggttgcattctgattagtctctccaaaggaggcaatcagatatgcatttatctcagtgagcagaggggtgactttgaatagaatgggaggcagatttgccctaagcagttcccagcttgacttttccctttagcttagtgattttagggacccaagacattttcttttcacatttccccactttttaaaaattttttggagaaagcatattaaaagaaatgagtctctggtctcaggttttgtctgatctcttatggctaggatggtttattcctagactggtaggtcccaagttattaggaaagctcatttttagaaggttgtaaagtcttatgtcctatgaagagaaaataagggaaggaaggaggaaaaacaacaacaaacaaaagaacgatcctggaaaatcaatataggccatattgctctgaagtccatatattagtaggcaggtatgaaagtggcttatgtacgtaaataggttgctattattttcctctaaagtttaagttatttagcttcagttcgcagggctttaaaaaaaagtatagcttagttttcagtgactccaaattaggaaaaatggagaaaaaagaaggaaaaaaaattgaaaacattattttgcaggcatgtagccaagaaaaattagaattcaggccagtcacggtggctcatgtctgtaatcccagcactttgggaggccgaggcaggtggatcacctgaggtcaggagtctgagaccagcttggccaacatggcaaaaccccgtatctactaaacatacaaaaaactagctaggcatgctggcaggtgcctgtaatcccagctacttaggaggctgaggcaggagaattgcttgaacccagggggtagaggttgctgtgagccaagatcatgtgactacactccagcctggggaacagagggagactctgtctcaaaaagaaaaaagaaaaaatagaattagaattcagtccaaactgtagaaaataataaaaattgaaaaacaataggcaagactagaatctaacaacgggtgtactatagttttttaaacataatttttctttatccagtttcccatttttattaaagacaaatcatggtaagactgatttgctttattacacttcacctgattatttgtatacaatgtatcaagaataattttattttacataggcatttaaattggctttgatggaactttagtccatagaaggaatctcagatatgacttttttaaagccaagcccagccatggatttgtaccatcaaatacctatgagttgtgaattcctctcctctcaatgttccaagataaacttggggctcttgggtctgtcagaaagtgacattctttacctaccacaggtcaggaaccctgtaaagggactgtgtagaaaaaggtacgaggccaatttttccaaggggcttttattggctccataagtcaagtttgattccttaaatgaaagcacaccattttagtcaaagccttggtaaaataaccagtttctccaattgtgtcctgttaaaaatgaagaaagattcttattgcacttatgcaaataattgtattgtcataagaatactcacaaatagtttccaaattctgtagaaatcaggtagacagaaacacatatgctccaacttttgttcataggagtacacttaactgttaaaagctgtaaatagcttaaaagttttcttgactctgaaaaacaaaggatcagcaacgttttaaacaaaaagttaaaaagattactttaaacttctattagtttagtccctgcggttaattcctgttctgcttgatagtcataaacatttcagctcttcatgagtcctgaaagtttttcctctgttcaaatgttacaatctccaaagtaatcagaaacctgcattcaagggcacctgttagagtttatagctgattataaaaccaccttttaaagaggaccaaaataagacaacaatcattcatggatgacaaaaagttttagggcagccataaagatacaattgacaaggaaatttgttaccttatggcacacaataatttaccataaaaattataattattactgataacatacactaattcatattagaattataggagttttccacctgggtgacagggtgagactccatctcaaaaaaaaaaaaaaaaaaagaattataggagtttcccataatttttgaacacatgccaataacatctttatacaaatacagcccaaagaaaaccaaacaccatttcatgtttgacaatgcttcctatataatttttataccaaataagccaaatatgtcatttttggactttaaggaaccgggaatatcttaaaggattaattaggtcagaaaaagacataatttataatttgattttggaaagtttgtcaaatatcaaaactttaaaacacttgatattacaaaataggatcacaggtcattgtaaaataagtcattcatttaaccaaagtgataactgaaggattttaaaaaaaaaaaggtgcaaaacttttattttgagagaggaaacaattttccaaacaataaaccctaataaaaacaacatgaagtcaattaaatttgtttttcaaatttttataaatatataaaattttaatcttgatcataagctataacttccataagccttttataatctttattaatgttttggttaatgcttaaaaaacaaaccatattaatctgacacaggggctcatatgctggtcttgcatcagtgtgccattgatattaatggttaatttatagagaaactgtacttattttatgtcttaaaatgggcccttacaatctcacacacccacctcttcctcaatagtccctggaccttgaggagttgaatggtgttaatttctggccctctgtctcaggaatgcagtttattttgattggcatcctctatggggcctgaagatgaggatttaactgctgtcagtgtttaagacttagcagggctttgtgtccattttagacccaggagtcaaatccctgtaacttagtgttacaagtactttaaaagcacatacagaaagatacacggatgtaataaccttaattttaaaaaaaaacaattatcaggtttttttcctaagcaaagtaaaacttaataataatggcataggaattatttcaataagacgtaaaatctgtgaggccagttaccaaaaggcaaaagaaaagaccttctgcagtgtacaggatattatgttggaagaaaacatttcctttagacctttaagaaaatattgttagcaccaggccacaacaaacagaactgtggggaaaaataacttaactgagctgaacatgagttgaaagagagctttattatttcataccttttaaagggggagaaaaaaacaaaaatggtgaaaccaaaaaaagtccaggacaacacagattcacagtcaaatactaccagacgtacaaagaggaactggtaccattccttctgaaactattccaaacaatagaaaatagaatcctccctaactcattttatgagcatcatcctgatacaaaaacctggcagagacaaaacaaaaaaagaaaattttaggccaatatccctgatgaacatcgatgcaaaaatcctcaataaagtactggcaaagcgaatgaagcagcacatcagaaagcttatctaccatgatcaagtcagctttatccctgggatgcaagcctggttcaacatacgcaaatcattaaacagaatccatcacataaacagaaccaatgacaaaacccacatgattatctcaatagagataaaaatggcatgcaacaaaattcaacagcactttatgctaaaaactctcaataaactaggtgttgatggaaggtatctcaaaataataagagctatttatgacaaacctacagccaatatcatactgaatggtcaaaaactggaagcattccctttgaaaactggtgcaagacaaaactggcacacaccatttcaacatagtattggaagttctggccagggcaatcaggcaagagaaagaaataaagtgtattcaattagaaaaagagggagtcaaattgtctctgtttgcagatgacatgattgtatatttagaaaacccaactatatcagccccaaatctccttaacctgataagcaacttcagcaaagtctcaggatacaaagtcaatgtgcaaaaatcacaagcatttctatacatcaataacagagagccaaatcatgagtgaacttgcattcactattgctacaaagaaaataaaatacgtaggaatcaaaattacaacaggtgtgaaggacctcttcaaggagaactacaaaccactgctcaacaaaataagaggacacaaacaaatggaaaaacattccatgctcatagatagaaagaatcaatatcgtgaaaatggccatactgcccaaagtaatttatagattcaatgctatccccatcaagctaccattgactttcttcacagaattggaaaaaactactttaaagttcatatggaaccaaaaaacagcccacatagccaagacagtcctaagcaaaaagaacaaagctggaagcatcatgctacctgacttcaaactatactacaaggctacagtaagcaaaacagcatggtactggtaccagaacagatatatagaccaatggaacagaacagaggcctcagaaataacaccacacatctacaaccatctgatctttgacaaacctgacaaaaacaagaaatggggaaaggatcccttatttaataaacggtgttgggaaaactggctagccatatgcagaaagctgaaactggatcccttccttacaccttatgcaaaaattaactcaagatggattaagacttaaatgtaagactaaaaccataaaaaccctagaagaaaacctaggcaataccattcaggacatgggcatggacaaagacttcatgactaaaacaccaaaagcaatggcaacgaaagccaaaatagacaaatgggatctaattaaactaaagagcttctgcacagcaaaagaaactatcatcagagtgaacaggcaacttacagaatgggagaaaatttttgcaatctgtccatctgacaaagggctgatatccagaacctacaaagaacttaaatttacaagaaaaaagcaaaacaacc

SEQ ID NO: 468 - DNA, 118572 bp, Homo sapiens
ttcccttccttccaaacatgttcttcatttccctgtggaacccagaaccatgtcatgcacacaagcgcacggtgcccagtggcgtccgttgatgaaacgtgaactctatttgctctagtctagagccttctttctgacctgttggcccaggcctgggtcaccacctttccactggtcctcagcacatatattctgggtctgcctccccttagttcacttccaattcatcacaaaaaagtaggtcccagcgactccatctatccacaatggacagctttcctcctctcatctgaatcctgccttcatttcagatgaggcccaagtcccctcttctagagtctggagcctcctcacctgcctcccagcctgagtctctttctgtctggctcacttatcccagccagcctctccctactgactgtccactgcctgaggaactttacgtgtattatctttaatatcctaacaaccctctgaggtgaacgttatcatccccactttacagatgaggaaacagaggctcagagaagtgacagaattgagaccccaacctatgcctactggctccaaaacctctgctttttttcaatctaccacatggtatccacttatgaaatataactcctttgttgtccacttgtccattacacatctattgaacacctactgtgggaaagacaccagtcttctttctccgactagatttagaaagcctttccttttcttggatccctcttgatattaagcacagaagccctaaaggagcccaccatctacaaatagctgttggggatctctattatcatccctgctaccccctgcccctgctgccagccctgcctagattagcatttgctgactgatgtttctctggcactgtgctattggtctgtgtgggagggaggaggggacagggagcatctccaccctcacaatcttcaggccccttgtctagggtattggaggcaaaagctgggtttggccatgtggtaccctccagtctcatccctctgtattcccccatatggactggcccttcaggatagctacacaggggaaccatgggacagtcaactcaggaagattcaactttaggtgtgcacccagccaaacagggagaaagagagccagaacaaattaaataatgcatgttgttctgcttgatgaagtctctttgggctgttgcggggattaaatgagtgagtatgtgtaaagcacgtatgacaatgcctgggacatttcaaggtctccaaaatgtgtgctagatcttttcctttcatgcctccagccttctccaccctgccctttgtccagagggctctgcctgggctcctctcccctctggctttctgctgtgttcagccatcgggaggcacaagcaggagatgagaggcgtggggagacaggaactgaggctcctagtccctgggggctggctgctgggccacagttaggcaggttcctccacccaaggctgcagctgctgtctgggcctctttggcagccctggttctcacctgttctggtaaccttccctctactggccccttcagggatgctggcctcctgcatctggccccagggtgcagcttgttgggtcatttaatcctgcccttttctgtagaacctgttcataaagctttcttggcttcccccttggacgagccacctgctccctgctgccaccctggttagccattagcaatggtggtaccagcagtatttcctctctgtggactcctcctctatctttaagactcacttcaaatgtcgcctcttcttggccaagtctttccttaggctcccacacaaagctggccacatctttctctgtgcacacaacagcactttgtccccaactctgccatgggactcaccaagctgtgctgaactttctccctttaccctcctgtctccccacaagcctgtgtgtggcccagacacaggcctggcttgtgagtgtggtggtagagccaaagaaccccttccccaactgggtctgctcctctctgtgcctcagtttccttatctgtaaaatgaggactaacatctctttttaaaatgggatttaatcactatgagagattaatcattgttttttagtattaatttaatgagttaataattatgaagagttcagaacagtgcctggcaggtagtaagtcctgtgtttgttacataaaactaagtgacaataagtggacataaattctatatccacagcagtgggcagcgagtggccctctgtagatgttagtgggatgaatagatccagccacacttcttcccaggcctttagagtgtgcatcccagtggtaccaggctttatttgactctcattttcttatcatccatcttttctttttcttttgctttctttctttcttgtctagggttctctctgtctctgtctctgtctctctctctttcttttctttctgtttctgtttctttctttttctttttttttttttttttgagaccaggtcttactctgtcacccaagctggagtgcagtggtgtgaccacagctcactgcagcctcaacctccaggctcaattgattctcctgcctcaacctctcaagtagctgggactacaggtgcacaacaccacacctggctaatttttgtattttttgtagagatggggtctcgctatgttgcccaggctggtctcaaactcatggactcaagtgattctcccacctcagcctcccaaaatgctgggatttcaggcgtgagccgccacacctgacttcttttctttttctggaaccactttattgaggtatgcctgacatgtaaagcgctgtatatatttagtgtatacaacctgatgagtttggggataaatgtgcacgtgtgaaagcatcaccaccatcaaggacatagacagtgcccttcatcttttcagaggctcttgacatgtcagctagtttgtagtatttcaccctgtgcctggcacagcaatcacgccctgcttctccttgctttccttcctcgcttgctgctccttctcctccaaaagttgaggtaccccgggctctgtcctaggtctcctctccatctgcactgtctctctaagtgacctcattcatctcaggggtttaaataccactcacacccccaaggacctaccgatgcttatctccaggccagacctacagccttctcagtcacctctagcaggcgtctcaaacttacagcattcgaagtggaacgctaggtttccaccacctcctgctccgtctccaccaacctgctccgtctccaccaaatgtggattcacccttgatgcctctctttctacgctcgcagccaatccatcagcaaagcctgtcagtttttcctttaacatgtatcctgaatccgacccattctcacccgagtccgagcccctgcctctggcctgggctcctgcaggagcctcctgactgaggtccccttctactcttgggcccctcagtggattctctacagagcagccagaacaattccttttaaatgtaaatcattcacacttacaagaaaatcctgacctgaccatggcctaccaggcccctaccacccctccgacccatttctcaccattctccactcacgattcctctgggacacactgtcctacttgctgttccatacaggcgggcatctgcttgcctcagggccttcacacttgttgcttccactttagggaatgctcttctacatgtatctctgtggctccttctcctcacttcttctaggtctctgctcagatgtcacctcttcagagaggccttcgtgactgcctaccttgtcacttactatctctctctccccatcttagtttattttttcatagaatttatcactatctggcattgtatgatacttttgttgatttccttttaactacctgtcttccctactggaatgtactgtctaagacagcaagggctttattttgttttttgatgcttagagtactgcctggcatatattaagggctcagtcaatatttattgcctatgtgaataaatgaatgattaacaaattcctagagagtggtggctctttctgatcttattcatcccaaccggttgtcagatgcctggcctcaggcagaatacacagctatgctcataaatgcatgattgctgaagaggcaataaatacttttaagccaatgagtaaccaagttcctaccctgtgctggtgctgcgaacagaagagcagtctccctttgaaagctggttctctgagggagaaaacagtctctgaccaagccctgctcccccacatcctggcccaaggttgctactagttactggaagggtatgcaagtgctcctggcggccttggggtaacttcacaaatcaaagggagtcgatgcctggagcctgttggctcccactggacactctgcaggtatcagctggaaacagtgtggttactgtgggcccagagcagccagtactttaattgctagttagttttgactgtcttgtgaggtaagttctacaaactccatctcatagctgaagaaactaaaactcagggagagtgggtggcttggtcaaggtcttcctgacagtgacagggctaagatttggtcccagttctgctaactccagataataatcaacatggacatttcttgagagctccctaagtgccagggtctatttaagctccccacacacatgtaggtctcattcagcattcatggtaaccttattcgttaaatattgttatctcttttcacaagtaagagcactgaggcacagagagattaagtaacttgctcaaggtcacagagcactttccattataacacactaccttaaatattacttccaacaactaaggatttagatcacaaaccatttcttccaaaacactaaggaagggacccctacaaagcaaacaacagcaagctgtaaatttctcccagcatgtctgtgtgcctcctttctatcctctgtgcttcatcctctctccccagttcctggatgatccccaacctgggaggggaaggctgtggctgtctccaaggcagcagggcacaaagtccagcctgggccttgcctagcgcatggcgcctgccctgcctgcacacagggatattaataagtaatgactgttgcgatgaggaagagtagggcagaggaaacgtggaggtctgaggccctttggagcctgtgggacctggggaagaggaacagggcaaacccaggatctgcatcagacaccagggaccctggagatgattctcacaaaaaagagagagcaggtaccccacagagtgaaggcagaagacctgatgttatttcaggccaggggcaggaaactgaaattcaaccctgagtcttgggttgggggatggaaggctgagctccttcaaactgggttgcctgaaatctacactcacaaaatgtccttagtggctgaaatttcttccgacatgtctctttgcaacaggatgtaacagtgaatgctctctcaagctccccttggtattcgccagcccctaaattcctgctgaacttccagctatcacccacccctgggagcaggaccagaaatgcccaagaccttgttttcaggagccttctgccagtttgagctgtccctttgtgcccctacaaaagcttggcctcaacacgcagcactcagacatgggtaattaccagggtagggtctgcctcccacctacaccaccagcaaagggcacagactgggtatggctgagaggatgctcaaaacatgcttattaaatgaataactgaccccgggcccttggccccaagcccctgtggcccctacactggctagctccttgggctcctatgggcctctttatgggaaggaaggagttaagcaccctgacctgccctacctgagctcagctctcaaaccaggaagaggtttggcttggtctaaagacactgcccctggggtctttgggagagccttgggtcacacagttatcaatagttaagttatcaatagttacctgcccctcaggcagggcctgtggggagctccagataccacccaccccccccaagcggcttcatccccagactcagaggcatcctaagacttggtggggaagtaggctggatctctttgatggccctctctggtctcagggcctcagcagattctgcacagctttgtgaatcattctcgaaatgccctgtgtgaaacctggccacttccagagatggtccttgagaatcccagaccaccagtgaggcccctcactgggacacaccagggtggacccggctctgcctgaaggatctggccggccagagcccagctccgacgccctcagtacctcctcccttcctccccaccgcacccgggtcagcaccagctcctcagctacttctcagaccctaagaaacgcccttaggcaggcagggctgaaatgcttctaactcatgttctgaggtcaaaaggcagagagagagacgtctagtttcccttctcccaaccctcacctctcagatactgccccagactgtctccacatgcctcaacagccctgagctgggggcactaggaaggagaggggcttgcccacaaagggggcacctcagaaaagcggccaagactggaaggaattcaaaccccagagacgtccctgcccctggaaggcagagggagaaaggctggcagaagatcgactcgtttagcagtccttgagccgggagtccccgcattccctccctcactttactggggatccctgctgccagccagacgaccctcgggtgtcccagcccaaccagagccatcaggtggggccggaaaagggaggggcagtgccggggtgtccaccccctacccaccgcgcccaggactccggagtcccagaagcctggggcgccctgcagctctgaccttatgccggaattctcgggccacttttcggtccatggctgggccaggtccagctgcgtcgttgcacgacccgttccttcgggtgcccggctgccaggagctggaaagagccgcgaccgcgaccgggccagccgccctcggagctgggggcggggcctgagcgcggaggggcggggccaggcctctgtggggcggggccgctgcgaggctggagtcgaaggtgctgagtcgtcgcctcccactgaagcctgggagcaaatgggccccagtgtgcctatgggcctgaggtggcagtagctgggcttcaagctggtatttctctggaagtggtacctgaacacatgcgtttgaggaagaagatcgtggagacgtagggaggaggtttgggacttttttgtggggaccggaatagagagatacggaaactatttacacgggcggggggcggggcaatctagtccgttttctctggatattctttttttttcccccccgagacggagtctcgctctgtcgcccaggctacagtgcagtggcatgatcttggctcactgcaagctccgcctcccgggttcacgccattctcctgcctcagcctcccgagtagctgggactacaggcgcccgccaccacgcccggctaattttttttttttgtatttttagtagagacggggtttcaccgtgttcgccaggaaggtctcgatctcctgacctcgtgatctgcccacctcggcctcccaaagtgctgggattacaggcgcgggccaccgcgcccggccttctctggatactcttgtcgaggttcatggccctcctggactgtcagcccttgctacgccctcacctccagcgtaccttcagtcctggcttcctcctgcacttttccaccagggagaaatcaatccttgttctgtgaattccttggggacagggctgggttttactgtgggccgcaggggtctgaatcagtgtgtgtgagagtgcccccctcaactgatttcccctcccaccttccctaacacctccacccccaacaaaacaagacaaaacaaaacccaaacccaacacactcacatatccatcgaagcctggcagagcctggcagtgacattttgatctatggctgaccttcacccagggcccagaccctctggttcatttaattcaatttggtcagcatttgcttaactcctaggtctagtgcttggtgcaaagacaatgatgaaccaggcctggaaaggaatgaaaggaaagattcatcaaagacaatgatgaaccaggcctggaaagagatgaaaggaaagaggggctaggagaggggtgataaaaatgtgtaaatcagaggctaagtatggggcttgtgcctgaacttaacccagggaggcacctgagccctttgtgccctgtcaagggcaggggcaaggagatggacagcagcttacatcaggtaaccacttacaattgtaactctggggcacctaaacacccctctgcgtccctctccccaatagctgaagttttacaagcacactatttttgttgcctagtttaagatgtaaatccctcttggagaagaaccttaaaatatgatctgttttctcaccttagcattaactattaagtcagcgataaaatggaaagacttgtgggatttttgaatggtccagaaaaggccacacaaaatgcattcccctccgacttacttcattgattctctacattggaaaagaatgtcatatggctgtttattttgtatttagaatcctggcagaggtgaatgaatgtccttatccaggggaatgctgttcacctgccacaccaatccttattttacattggccattacccccacagactccctccaccttaaaatgccccctgctttgttttgagaatagcattgagacctggttctcctctctcatgaatttttgtttcaagcttccttggagacaatcagtctttgcctgttccttaaccagcattccttaaggctccatccttagctctttcctcttcatcttcctatctgtgcccccagcttcctcctgtgtgaagatagctgtgtttgctttatttaccactatatgcctagaacagtgcatggcatggaatcaatgccaaacaaatttgttgagtgaatgaatgaatgaatgaatgaatgaatgcatctcaaatctatacccttgcctagaagtctactggggccaataccaccacgaccaccaccaccaccatcatcatcatcctctgtaagacctagcatctagttggtgttccctaagtgatgacgaagtgaatgatgtacagattccccaggtgctcagtcccatgtttttgccattttaaaattcctcctgggcagacagtggacctcgttcacacatataaagttgttttgtcaaagtttggccttgatggtggcaataacataggagtatgaaacacttttattattcaatcgtcatttcctgagctcgggcaggagctggtgctgggcattcagaggactaaggcatgatccattccctagaggtgctcaaaactggtcataggatacggatgtggagacccaggtggaagctgaggtggggcatggtgagaacataggctaggactctgcaggctctgttattgaccactgatccctgagtggcatgtcccagggcctcagcatggccctctgtaaaaggagaggatagggccagactcatacctgcatcttgcgtctctggtattgggcttccaggacccaggtaaggggagctggaggttgcataggctgcctctatgcttccctagacaatttagggctgagtaatctgaatccagcctcccctggggaggtgtggccacaggccaagaaaagcagaggctaggctatggacaggcgcctaaattatggtaataagctgggtactcctgtcactctagttcggggaggagctgagagcctgggaggaggggctgagggagccctggggcatgagaacaagagggacctcggctgcggagtggaggtgtgaccctgccttagcccggggaggcacctcgggaggctggccctgcgctcaagtcctccggtcccctcgtgtccctatgggagtcctggcgtctgcgctctgctggctgctttgtgtctggctgccctggggtgagcaggcagccgagtccctgcgggtgcagcgcctcggtgagagggttgtggactcagggaggtcgggggctcgaggaatgagaaacgttaaaggaatgaggaatgggcccgcgcaggttggagagagggaggaaagagaggtttgagggagagcagagggacacccaggaggagcagtcaggggaggagggaccccgaagccaacagaggcaggcctatgaccgcgggggaaagagtccaaagttaggctgggtggaagagacccgaggtggggaactagagagagctgggggccaaagactgagagtaaacagggagatcctggctggagaagggtcatcaggaagggagagaaaggatttgagaaggctgcagggagggagaatgggggaatgctcagtggcgtgggagaggctttctagcagtgggggccaggtggtgggaggccccagtaaagacaagcacaatttgagtggagaataatccccctccccagccgcagcacccgttctgtggggcagtgcagagccacagccagagccagccgggcaacccaggtgagtaggtgtgagctgtggcggccccacccacagctcccatccgtatttctggcatcagcgaccccagggctttagcacttagggtgggataggccaggggactgcggggaggcataacccatcctagccccccatccatgccagactcgtgtttcctccagcagcagccaccaggaggcgacccttgccatgggggacaaggctacagtcgtgggaggccaggtaagggaggtcttgggagggggcttcattgagcaggagctcatgtctatctggatctgaggctggcagggagctctgtaggttacaggaggggtctctggagttgttcagaaaggaacaagcagattcctggtatgtgtctgaggtgtgcaagttcataaaacccttctattctttttaatctcttgggggtctatagtccactcttttttttttttttttttttttttttttttttttttttaggagaggtgggcaccagggctctttcaggagagagctgagctctcccttctggcaggtaaaagtagaaagatggacgtttagaagaatggagttctcttttccctgactggcctgcgaaggccctcaaccctgtcagaggctcctctccataccctgagcggagcctcaagaatgcaggcaagacaaaaactaggccacctggtggaagttgcaaggaaggtttggttgagaagcagagccctgaactcatcctttgagcctttttttttctttttttgagtcggggtcttgctctgtgacacaggctggagtgcagtcgcataatcatagttcactgcagcctcaacttcctgggctcaagtgatcctggtgcctccgttacctgagtagctaggactataggtgtgtgccaccatgcctggttgaatttcaatttttttggtagagacagagtctcactatgttgcccaggctggtcttgaactcctggcctcaagtgatccttctgtgtcagcctcccaaagtgctgggattaggcatgagccactgagcccggcctctatcctttgagtcttgaccattccactgcccatcttcccacggtcctctgtgtttgtgggagaggtggcagttttgttttctccctttgccaaacttctttggtctctggatcaggtgactcaggtctactttctaatcctggcccgcatttgtctccctctttctataactacagatgagctataagttccacccacctgcagctaggtcccccaaagcagctgagcctcagctcaagtgcccctgccccagccccagcggtcagctctggggagccccttgagccagcagattggggagaatcgtttatgacagcaatgagtcccaactcctgccctttggaaatagacatgaagaccccaaggtggagtgaggggggatggtgtgggcgtgcttcttctctgatgtggatttcctggatcttttacttcttctttgcccacacttccaggccctaagatttagaatcacagtcaaatactgcttgagttggaaggtattggagtcatttttttgtaggtagggaaattgaggtgggtggatgacttgtgggggccctgcaatgagcaggtggagcaaagtctactggcagagccaggccgtgcatacaggacttcaggaatccccatgttttagtgggggagatgacccttctccaaacacttcatttccctgtgggtatcctcccgtgctggtttccagggtaggcatcccgccttttccttggggaagggtcataagtgagtggaccaggcaacctggggaggtttctcacgctgctcctcagagcaacgaggaattagaatggcctccctctaaggtgacaggagttggggggtgggggactgaggctcatgtaccagggatacttcaagggctcctgtttggaatgccctcttcatgaagtgggggtgtgccccagaccagtaggcaaccaatcttcatttcaatgctgtcccgcttctacagagctcaaccattttctagagaattgttgtagacaggggtccatggatgggggaaaataaaaacacattgttatttacagaaacctcaatccaactgaaattcagcatccttttcaattattattatagtctacaaaccacaagagtatttgcagtgtttttgactgtcaccaatagacatgacagatattttcctaccacttatagatgttgctgtctcaagatatcatttatgttcatcactacttcaaaattttggcagtgataaggcccactgctagatcttttatttattgagttattaaagaagcacaaatattactaaattacacatttttataaaatattttcataaaatgatattgtgatataagtgatttcctttgtaaccttatcctttattttatgtttttaaaaacattattctgagaaggtgtccacatagggtcactaaattatctaaggggttcgtggcataaaaatgattaagagcgcctgattgattagcccctgaagactaatcatttggacaagatttaagaaatcctttagaaaatggctttgactctttgcatcacaggttgtctcatcctcatgactcatttatctcagaggccacatctgaagtgggagtgaagagtgaggacacgaagactgagtttaattacagctctctggtggctaaaggatgcgagttgtttcctgtgaccctgccctctcctatttcctgtggtctctgagggccccatgagatagattagtacccgggtgggaaacctgactcctggggctggggctgggtcgactgggtaaggattgctcgggagaacccaggaaccaggggccaaagtaggtgaggacaccaaaatctggctaagatgtcaggaagaccatgaagatgaaaggtgtgagcgtaagggacaaggtggccaggctgtgcctgccagggcagggccaagagctggggttggctccagggaccaagggcctgaatatttcctatgttcaagtcctttgctggatgacaatgagggaggctgacatgtgaggtaaatacccacagtgcagtttgtggcttgttggccctatgaacaagcacataagctccaagagggcagggactctgccctgttcactgcatccagcacaatgcttggcacagggttctggggacattgtacaaatgaggaggctgaacctctaagggaggaggagccaactgtgcccaggatgccggttccaggtgacattagacgtctcggactggagttctgagagggctggtgtataagtcatctagtcctgtggtgactgaacacccctgttgttatatagtcctgatttcaggcggtttatgtctggagagaccatgctctgggagttctgtctggaaaatagggtttctaagccacacacttggcctgtctcctccttagacctgaggtatcagggcaggagtcctgactgggagctgagttgtgaggacagtgggtgttgatctgtgggctgctggttttgctgttcttggaagaaccccaaaggaaggttggggtgggggtggctgtgggggtgagatgttcccctgacctggggtgaggggctgcctttgttccttagctctgcctcatgctcgtaatccagacaagggattgtgtgtaaggctgtggaggacataagggtttactgggagagagggaagaaaaggaggctggcaggtattggggcatggaggggaggggctgtgttccagccatgggcctcatggtctgccgcagagatgccacttgggaaggtgagagctaagcctttgttcctctgagcccagggcaggcctaaacattctcctctgcctctcgagggggccaggcgaggaggagtggctggggcactgaggggcaggggctcctccctctgggagatgaacaaagagggctgtggccaccaggaagcctgcctgggaacccgtcctgaggtcagccctcgatgtgttctcttcctcctgtcttcacaagcaggctgaagccccagactccgtggccatgtcttcctgggaaaggcggctccatcgggccaagtgtgcaccatcctgtaagtggcaccttcactgtggtccatgggttgtgcatgggagagccctggcagaggcctgaaagggcagagggcaggtggggcttccctcaggcctccatgacccctttttcctgcttggcatctccttccacccactctggccccggccaccatgccatttggcattctcctccctgcctgaggagagcttcctctctagagtcctgttcctatgaccatggcccgggactgccccctcacaggctgactccagtgagactgtgcttcattatttagtggttgtttccccctccatcccacctggttctgtggcttctttctactttctgtggtattgcccttcatcttgtgttgtctgtagcccccactccctgtcctgtgtccatggtccccctcacctgtcctaggtctgtggcctctcctcccacctgtcctgtgtctgttcctacctcccccacctgtcctgtgtcccccacctgtcctgtgtcccccacctgtcctgtgtctcccacctgtcctgtgtcccccacctgtcctctcacatcatggctcctttcctcgctgccctctgctctgctttgtcttcccttcgtctatggttgttcttgctacaggcctctcctccatcgcctggttacccccgtggcttcttccctgagtgtgtggagcagtgaggaggagcagcagctgcagatctctgggcagtccccctgctcaccccacatgctccccattctcagttctgcctgccttgcttgctagccaggaacagctctagcaactgaaggcccaggtggggctggcctgggggccacttgatgcacatcaaaggcagatgccctgcgaccccaccccaccggcttgccagggagggggcagggctgtggtctgaggcaccagcttgtgctagctgctgaggaatgttggggctggggctgcctgttatgggggtctggatcctgtgaagcctgagagggctgcctccctgggttctgccaatctcagcttgatggggcaatgactctgtgtctcccatgcagacttgttctcctgcttcaatggaggcgagtgtgtgcacccagccttctgtgactgcagacgcttcaatgccactggaccgcgctgccagatgggtgggtctgggctccaccccacccccaggaagggacctgggtgcagggaaagctagggagaaagggagcagcacttccagggctggaacccaccagcctctggcttggtgcccactgtagctacacagagaggttctcttttctctccctcagtgtacaatgccggccctgagagggacagcatttgccgggcgtgggggcagcaccacgtggagacatttgatgggctctactactacctctccggaaagggcagctacaccctggtgggtcgccatgagcccgagggacagagcttctccatccaggtgaggcctcccctgccttgcctgtccaggaatgcttctctaggccctggaggctgcactggcctgggctctacttgtcatagttagagagactggcaccttcctccttgcatcgccccccagctcccacccaggcagtctgcacctggaaggagctggggactccacagctctcgctcacccactcaccctggccattcatttattgagccactcattcatcaagtatttactaagtgcatactgtactcttttctggcataaggtctggtggcgggaggccctgtagacaacaacacaggtataatctttgtcttctcagaacttatagtctaatgaagaaggacatcaaatcagaggactcatttcaggtgcaaatgagtgctatggaggagaaatgccaaatgctaaacgaacatgtcctgaaaacctaatcctgtttattcggaaggatggtgacctgggaaagcttcctggagaaagtcacatttaagttgaggtttaaggaataaattggagttagccaagtgaagagtaggagagtgtgggcagacttgagaacattctggggaaaaagatcattgggtgctaagaaagagactagggcctcagagaaatgatggaggtcctgggtgactcagtttagagtcacctcctctaagaagccaccctggatctcctgaccttccaagctggctgaagagctcctcactgggtaactcaaagttccatattatgacgctgtcattgtatttctcttacaaaggtctggttttgggttggttttctctaccagctgtgagcttcctaggccaggggtcatgtctctctctttgacagtgcctggattggtgctcagtaaaggtttgtgaaatataggaacacgtgtgaaagccactgtcatgcaggcctgattttcatgcctaacctgtgtgctaaactgggagtcaccttcagccacagctcaatacccctccacctggaggaaagtctctttggagaaccagctctgttggagggcaccttggtcagtactgagttagggtcaaggggttgggggtgtggggagaccccagtgttcagtgtctcccctctgctagccatttgtgatccttctgtctcagtcatggacctatgagactgctctaggggccatgccctggatgggcggggaactgcaaccaattttcctctctctgcctcggcctatcacatagcagagattttcatgacctatcatttcatgatggatatgttacaattacttagactaatgcattgccatacactcgtgggttacaaaatcaacttaacgaatcacaaccatcattaaaaaatgagacaaataaaatagaaaatattgtaagagtgtattacgcatgatagagataagtattattttgtaaaatttttagttatatatatttcttattgtaggtcatggtcacaaaagcttgaaaaccctttagttagaccatggggtagctttcacagttcccacttgtagttgaagtggctccagcctgcttaatcacattgaacagtaatctgatggaaggtgccttcctgggaagggtttccacacttggcagggataagctctgggaagctctcccctctaccccaccccgtcctttgggtctatggcctttgaagtctgggttctgtctgaatggcgggggcagagatgtgtgtgtgtgtgtgtgtgtgtgtgtgacagcagcacaggagtgagatgtgtgccgatgggtgtaggggaaagttacaatctgtacctgccaggggcatgggggaaggggagtgtgtgtatagtgtgtgcactgagagtgtcatgggagaaatttatggggtgtgtatagatgtgtgtgtttgtgttctgtatgagtgtgagatggtggagtatgtctgttggccttcaatctgatggtatttcctgggtaggataaagagaaaagttcagaaatacggagatggcatgattgactgggaagagccctggaatctgagccatccagaccggggctagaatcccagctctgggatttcctagttttctgtgtgtggccttagtcacttcacctctctgtgaatccattgcctcccctctgtgatgtatggggactgagcgagatcacagaggaaaggcagttggtatgcaggggacagccatcggcattagtgaaaactcaataaggtgtgaagctcagggtcaggcctgtggcaggagcctgcaaaccagcctctgaactccctactcaggtacacaatgacccgcagtgtggctcttcaccctacacctgctccagggctgtcagcctcttctttgtgggtgagcaggagatccatctggccaaggaggtcacccatggaggcatgaggtaactctaacaccttccacatcgagctgtcctatccctgacactggtggtggtggatgggtgagcatccgctcttctcaagcccaaaggaaattgttttctggggacaaacagcaatttccactatctgggcggaagcatactggcagatcactgggtttcttgccagtggggtttgcagaatgattttttttttcctggaactctcagatattgcagatttccagacagcaggctttcaggaaaatagagttttccagtgagttgagagtttatcatgataagcatgcttacttttccctcccaaaatcttcccaaatggatcatacacagtttctacctcctctcagcagattcggagtacacttccatttctgatgacacagggtcattgtgaatgtcagttatcttgctgggccaacagggatgcttggaggaccaccagaggagtggggaccccttgctcccatactaaaatgccccagactgtggtcctttgtgaaatctttcctgcatctcttcctcactgttctttcctttccttgctgtccactgtcacttcttgttgctgtcatggggtcttcctgtaatgacacttctccctgtcctcatctcctgcttcagatctggaaactgggtgaccaagcaattgttctggggctgagtgtaaaattgatggcctataggtttctcctgtgaatgaagagttggtaaatgggtcttgtggctagttagacagtacttttgtttccctttcctgaaattttgctgggttcaaggttgccaaattccaggttggctaggggtccctgtaccaggaaaactgggaaagtggtcaaggctgctggagcccgccatcttttcttgcactcccagttttcctcctctcttggcttctgtttccacttggttcctgctccccaccaaaaaaataaagcagatgtttgtttatattctatcctgtctgggagaaaggaacttggagtcactcactctaagatttattcctgcccaggaaattgccgtcttaaaaaatttctaaagacaaaagaatccatctctaatggtatacttccaggcacctgggaattctgggaattcatggggaggggaagtgggggccttggatcatggggtagggactggctgttccttcggtgaagagactgggctagtggaggtgttgtggataccctgaagctctgggatgtgccctgcagggtccaactgccacatgtcatggggagcgcgcgtctgcagcagcttgccggctatgtcatcgtgcggcatcagtcagccttcacactggcctgggatggtgcctcggctgtctacatcaagatgagtccagagcttctgggctggacccatgggctgtgtgggaacaacaatgctgaccccaaggatgatctggtgaccagctctggtgagggtcagacaggtggcctctgaggggtgttggtggggatgggggacaggtcaggctgggaggggttggaggggacttggaacagagccctggggtcgtggtcatggtattaaagacccaatggaaggccaaggaccccttcctaacaaatgtgtgtccttgggcatgttcttaaactactgtcaaccccaggttcctaatctgcaaaaatagtcatgataagaattcccactagggttgtgggggatctaatagacactttgcaggtgggattgaccctgcaatgtggggcatggggtaggcagggagcagagggctagagacagccaggaagagaaatggcccagctaaagacacctatggaggagtggtaggaagtgagtgaagcgttcagggccaaatcatggtggctctggccagaagggtcgtgaccccttttgagcacctacaccatactaaacactttacatgcatcatctcaagtagtccttgcaacaatctcactgggagattatgttccctatggcaaatatggggaaactgaggctcagagagacacaggagcttgttcaggctcacacaccagttctctttccggtgcatggtgctgcatcccctgagtttggagccatagggagctactacaggttcctgagcattcttggctattactatcaaacagctttttcaggagaatggctcagttgggaaaccctgattgggatgggagctcaggagaccggattcttcaaaactccttacccatcccttgggatccgctttccctcagagccttctgtccctcccatccacccaaccccatcgctgccccatcatgatgtcagctccctcctccagggaagctgactgacgacgtggttgagtttgtgcacagctggcaggagcaggcccctaaccagcctccagggcccacaacttcctccctgcctcgcccaccgtgcctacagcagaacccaggaaccatgcaggtctggagcttggggagaaactcccctaccctagagcctgacttgctatccaactcttcgaaagccactggctgtggcaccccagaatgtctggtgcccttgaccccatccctctcttctctgccttcctctccctctccccacagctcaagttggggttctgtgtggggctgtgtgtggctttgccagcccctagccctggctcctggtcccttgctctagggcgtgtacgagcagtgtgaggctctactgcggcccccctttgacgcctgccacgcctacgtcagccctctgcccttcacagccagttgtaccagtgatctctgccagtgagtaggggtggtgtgggctatggggaaccctctagtattggggtgagtgctcagcacacgggccatcaaactgggtgatcccaggcactgccagatctgcttcccaaggctctgaaattcttatctgcctaggtgggacagagctgccccattcaactgaggcttggaaatggggccggaccccgttagggtcacataacaagttagtggcaatgctgggactagaatccaggatttatagctcaagtctagggatctgttcacctagatgccttcctgggcagcctttcccagctgggtggagaggagagatgccctgaagccctggcagtgtctatgggatgctggtgggctggtggcactttgggttttgttccagtgtgacccttggtttctctgcacagatcaatgggtgatgtagccacctggtgccgggcactggcggagtatgcccgggcgtgtgcccaggcagggcggcccttgcaaggctggaggacccagctccggcaatgcagtaggtgcagcccagtagtggggcagggaggccttcaggctgtgggtggcattctcaggcctcagctcaatgtcttgtcctgctcagaatcacagttatcagaactctcagccccgaggttttatcgccatgagaaagacgaaaaaactgaggctcagagtgggaggagctagcctgggtgattctcagagcctccccttgcaattccttctccttgtcaatttcctgggcacccaatgctccctctgggactaggaaatcatgaaaatcaaagccctccctcccatcctcactccacggcctggggtaggagctgggtcctggcagagctggggccagtagctgagagaccatggatccctccttcccaagctgtgcactgcaaggagaaggcctttacctacaatgagtgcatcgcctgctgccctgcctcctgccatccccgggcatcctgtgtggacagtgagatcgcctgtgtggacggctgctattgccccaatggtatgctaggggcagacgtaggtgcctggcaccatcttcctggcctggcacagatggccacgaaacaggagttcagaagatacctgtttgtggaaggaaggaaggaaaggagggagggagggagggaggaaggaaaaaaagaaggaaagaaggaagggaagaaggaaggaggaaggaaaaaaggaggaaagaaggaagggaagaaggaaggaaggaaggaagggagagagggagggagggaggaaggaaggaaagaaggaagggagggaaggaaggaaggaaggagcaaacaattaacaaatgaataaatggtttaagggaagtgagggtgaggacagaactgcagcctctcgagagattcatcaggacatttgatttcatagggatatttaaattaatcaggactgcgcttcttaaggtgtgtatgagaacagatcattggtttatgtatacacatacatttgtttaagcattggtccatgtatggggactggttttcagtgtataaatttgcagcacatctatagtgtgcttggctaggaggatggttgagataaaaaatataaaaataaagccattgactttgggaatcagaatctggtttcagagatatcacgctcatatgaccagtctaaggtatgatgtggtgaaagccagctcaggggagttcagataagaaaaaatacaggaattcagaatggggagaggttgtcagggaagtcattcctggaggaggtggtgcctggcacctaagctgtttttgatgcggtgacaggcttttgagaggtggtgaggagaagctcgtgtgcaggttggggatggggttgtgggcagttctctgagcaaaggtctaggggtgggattctttcatcagaaggtgttcacttctggcctgagccaaggatttatagaggagaaagtttggaagtcggttcagagatgaaagaagttagataaggggatctttatcagaggccctggggagccacgaatggtttgtgaacaggggcaaaggtgagttaattggccctttgctgtcactctagggctcatcttcgaggatgggggctgcgtggcaccagctgagtgtccctgtgagtttcacgggactctgtacccacctggctctgtggtgaaggaagactgcaatacttggtctgtgtctgctgccgggaagcagggtgtggggcatggccgctgaggctttccacgagggctgcccatctgggagcactaatggctggcgtcggggcactcacttagtacctttgagtcccaggggagtctcattagatccaatccatgggggaaatctctaccacccattttagagatgggaagactgagggctgtgggccctgcagtttcccagcatctagctcaggcctggaggggtgacctcttgcctccttggtctctgtgttttagcacatgcacctcaggcaagtgggagtgcagcacagctgtctgcccaggtatgtctgccccccaccttgcactaggatcccttctaccagtctgataggttttggggcaaggaatctctgggggccaggcttgctgcgggtggggatgtcactcagttccattggctacgccccgacccctgtttcctcagaatcactttgcctgattaaggtctggctccagcccctgccaggaagggttttccatgaggagaaggggtttccatgggttctgtatatctaaagaccttcccgagctaggggtacttggcctgaggctggtcctcaaggctaggccctggtctcccctccaagggagatccccagggcagggctgtacctctcttcaaggagttctctggggacaagcctgtgtctcccactgcccagggctctcaggggccaggcctcattccttatactgctcttattctggagggcagggtgctgtgtcctcctcatacttggagcttgcagggcagagttcccctggggcggctcccatgggtcagtggcctttttctacctctcagctgagtgctcagtgactggtgacattcacttcacaacctttgatggccgccggtacacgttccccgccacatgtcagtacatcctggccaagagccgctcttcgggcaccttcaccgtgacattgcagaatgccccatgtggcctggtaagagctggggatccccaggcccgatccacccagctactcctgcctactgcccccaagagagactgggacttaggacagggctcaggtcttcccatggcccccacctgctgcctcttctctctggggagaagactggactccagcccaagcacctctgctctctgctgactgagtcacttcccttttctggacctcagtgggtttttggttttaggattttactacctaaaaaaaaaatatatatatatatatatatatatatgtatgtatatgaaagtgtaacactggcacctacttttaaatccattaatttatgaaacaaatctcttgtagaatatgttggcattgaaacagtaggtggagcttgcagtgagccgagatcgtgccactgcactccagcctgggcaacagagcgagactccgtctcaaaaaaaaaaaaaaaaaaaaagaaatgtaatggctatctacaaaaagttagttttgattgttggtttcctcccatattttatgtgtcttcacacttaaagaaaattaaaattttcaaacattttatattccacaatttttgaaaaagtacaccgtttttcactgctatggtctttataaaggacatgacttaaaatttcaaataaaaaagaatgaatgttctaggataactctgtcttttaagagcatctttatacggaacaatttgaactggcattcaggcaacttcttttgttgttgcacacctgtattaggaaaattacacccattttacaaaaaaaaaattccaaactatttactgaaataagctcaaaacaatgttagaaagaccagtgtgaatggcacacaaaaatctcttccttataaattattaactggaattcctgatcatggagtgggcctcagtgtttaaaaaaaaatctctaaaattggtttaatttaactttatcgtctctgcttcattggattgcaccttcaacattcgtccctcccttccttccttctttccttccatccttttgtccttccttctgcaaacattgaatacctatttgtgccagaggctgagctgggtcttggagactgggatgaattagacatggctccacctccctgggccctatagtttggtgggcaaggcaggcaagtgaactgttgtaactgggctacagcagctgtgagaacatggagggcacagggtggatctctacgggggaacttcttgttgttgttgttttacttgggcactgggtgacagaagtgtgaagtggatcaggaagggcttcctggaagacatgacccttgaactgtgtcaatcacctgtgaacataactgagaaaatggccaatgtgcaagtctggggtagatgggggtttgtttgtctctcagcggagactccgttgtccctgggttgatcatgctcagccaaccctggaagccccagtctgggctgtgccaaagctcttccttgtgcatcagagcaggagctcacacccacagccagggcagctgccccacagtcctgcctccctgctggccttgctccagcccccagcactgagggccctgaatgtgagcaggcatcagctgaaggtgtcactccatggccctggggacacaggctgaactgtggatgaggcagaggactggtctttcttctccttttggcctgagtgtgcccctcccttctttctgctagagaatggcccagccctggcttggctgctctctgagtcaggagactgctcttcctcaaaagtggggtcattcccatcacatcctgagggtggcataagacagacaagacacacagacacagcccagctgctccttcccacttacagaatcctgggggctattgggtctcagggtcccttactcagaatccccccctttttttttggagacaggatctcactctgttacccaggctggagtgcagtggcgcaatctcagctcactgcagcctcaacctcccaggctcagtcgctcttcccacctcagcctcccaagtagttggtaccacagacacgtgccaccacacctggctagtttttggtttttttttttttttttttttttggtattgttgaggcttcatcatgtggcccagactagtctcaaactcctgggctcatgtgatttactctcttcagcctcccagtgttggggttataggtgtgagccaccacacctggccatcagcccttctctctaccatgtctctgataggctgtgggtcagccttggcctgagtcaaccctcttctttgtgggacagtgcctcttgacagcaggttctttttaccttgggccagctctcctccttgtgacttcacccacatgatggacccatggagggccagccctgtgccagctctgtgctgggcatggtgaggttacacagagtaatcagaccctgatcctatcttcaggctcttgtggcctgtagggaggtcagcgtgtcctcagacagcttccatacagctacaacatgatcagtgccatcacaggggagttctgtggaagaaatagtcctataggtcagaaaaaaggatcagggaaaacctcatgacagaagtggcatttgggctgagtgacctaaaaagtgagcctaaaaatattcatagaaatcagtatgcctgggtaaggagagggagggagggcactccaagggttgattagattatatgagaaaaacaacgaggttggaatattccaggatccattaaagcagatgcagaaggacttggcaactgactgactgtgtctggtgaagcggggagtgtgtgggagagaagtcaaagatgaagctgcgactgcactcctgggtgcccagcaatggagtggagtggggacattcacagagaggatgataatgacaatgataaaatatttgcacagtgccttgaactttgactaactactttgcaaaaaacatgtactttaagtcttaacataccccatgtggtagttatcattctccccattttaaatatgatgagacaggcctacagaggcttggggcatttttgagaatccacagccagcaggaggcagagctgagcccgacctagggttggatgttatcacagcatctgaacacatccaccccagaatctgtgtagtgtttgcagccctcaaagtgtttttttaaagtagactttatgttttagaacatctttagctttacagaaatattgcaaagatagtacctagagttcctgtctatcttacgcccagtttcccttgacatctttgttaaaaataatgaaccgatgttaatagattatcattagccaaagtgcataccttatttagattctatagttttttacctaatgtcattttctgatccagggtaccagattacatatagtcatcatgtctccttaggcccttcatggatgttacagttcctcagatttcccttgtttatgataatcttcaaagtttgaagagtgctggtcagctgttttggataatgcctctctattggaatttgtctgattctttttctcatggtttgactggggttatggttttttttgggaggaagatcacagaggtaaagtgccatgttcatcacatcttatccgtggtatatactatcaacattgtttatcactgttgattatgaccttgatcatctggtggaggtagtgtttttcaggtttctccactgtaaacttactcctttttccccctttccatactgttctttttggaaggaagtcactatgggcaacccacacttacagagtgggaagttattctccccctccttgaaggcagagaatctacatgcattatttagaacttttctgccagggagatttgtctcttttctcccatttacttatttatatcagcatagactcatggctgtttattttatactttgagttataatccactacacctttatgttcttacttgaattgttccagctttgggcactgggagatcatacagttgactcctgtgtccctttgacataccttcattattgcgtgtgtatatgctagtggtggtggggcttgagtgtgtgtgtgtgctttcatgtctttactttctgggcctattagatgcaccaggcttatcttgtatagttcctgtcccagtgctagtatcattcatttctccaaaaatattaccaggttctcctgattccttttattggacgatggtattagaatcaagatcaggggatgaggtgtgctcattgctactggggtatgacttcctttaggccttctcagctgacagagaaaggaaatacccttattatctgtggggtatttccacagataatgtgggtattatctgtgttccagcaccccactccccacagataccaaaatctgcagatgctcaaattccttatgtaacatggtatatagtatttgcatataacctatgctcatcctcctgtgtaccttaaatccttgctagattacttataatacctaatacaatgtaaatgcttatataaatagttgttatgctatattgtttagggaataatggtaagaaaagtctgtacatgttcagtacagaagcaagcatccatatttttttccaaatattttcaatccatggttggttgaatccatggatgcagaacccctggatatggagagccgactgtatatgcatatccatgtttatcttagtatatacacataagtataaatatttctctataaaaccatctgtatctacatgtgctaaacatgacttcatactgatggtccaattctaatccattccacatggatcattctagcttcctcctcttgcttatctgtaaacactcactctaacagtaagaaacctggccttcaccatacaccatccatttacctaattgttcaattccagcatacatgtatattcctattattaacgcatacctctataggaaataactttatcaactaaagtacaggttttgttctcagtttcttttgcctttagtcttataaattctacttatttacaaagctacttatgtcaacacctttcctcccactctcttcactgagattgtttcatacatttgtaatgcagttagattcttttgttatcatctacatttcatcctgggatcccctcctacgtgatttttagaatttgcctacatcaagtttcactcttagtgaagttctgtgggcttttggaggtaaatgcaacctctaaaatattttatgcacatttaaaaatctgtacccaactgggtaggattgggtacaaccaaatgttgttttatctctgttttgcagaggagagaactgagatatggagaatttaagtgacttctttaaggtctcatagctttcagttacattaggatttgaacctgagacttttgactaaagggtgtgggctttattcccacacaggtgacatgtccagaggggactagaggatgagtgggttgaacaaagaagatgatgttttagatacaatgattttgagctgtttcagggattttctgtactcctgggcaggaactcagaaggatggttgtggctggttgcacaatgtatttctttaaagtttcaagccctgatcattctgtcatttcactgtgtcactctcctggttcactttctcaggttggctgttggacttaagataaagtctaaaaatatttcaaggctctgcctaagctggcctttacctacctcttgaactttttaaaaaattatttttattttttatttttgtagagacagggtctctgtatgttgagcaggctggtcttgaactcctgggcttaagcgatcctcctgcctcagctgccaaaggactggagttacaggcgtaagccactgtgcccagccttgaaccttatcttaaaccactttgcctgatgggttctggtccctctagtcttctttatgcccttgaatgcattaaacgacttcctgtaacagagcttttgtacaagttgttccttttgcctggatgtctccttcttcttcttctctctttgcccaactagcttccatgcatccttcagatttcaacttatatgtcaactttttgtgtgccttggttttctaatctgcaaaatggggatgttagtaacactttcttttcttttcttttcttttcttttttttgagacagagtcccgctttgtcacccaggctggagtgcagtggcgagatctcggctcactgcaagctccgcctcccgggttcacgccattctcctgcctcagcctcccgagtaactgggactacaggcacccgccaccatgcctggctaattttttgtattttcagtggagatggggtttcaccgtgtcagccaggatggtctcgatctcctgacctcgtgatccgcccaccttggcctcccagagtgctgagattacaggcgtgagccaccgcacccggccagtaacactttcttaatcagattgctatgagagttaggcaagtgaatatatatagagagatttgaacagcacctgaacatactaattccacatgaaagttagttgttggttgtaatatcataataatattgtggtattattatgataattttatgttattatcattccctaggaaggcctttcctacctctgcagactaagtctggttcagtcatatgcttttctaacactctacacctgcttacagcactgatcacaattataattgagtaatcaactttgtaattacttatttaatgtctgtgtcccacacaagtatgtaatttccttgaggacagaaactttgtcttatcactgaatccataaagtctgatacagtatgccttgcacatagttggtgctcagttaagtgtttaaatgaatgattgtgtggatgttttcctgtggagggaggtataaaaggggcccagtgtgtgaccatttgagagatagagaacctgaggcccagagaatattacctcatttcctgcctgcctgtcagtggagtgcaggatgtgaacatgaaatgaattataaaaacacccacaaagggatgaaattaaagttctgggttgtgatgaggtgggggaggccagtgtttctcaggctggactctgggccatctgggttccatctctgctctgtgtctttagataacctgagagttgactaccatttttattagtgttatcgcattctgctactaaccttctccaacctgagcctctgcctgcccattcccagacgagggtatttggttggatgatccctgatatctttggggctctgtctgtcattctgaggaaactgtctctcaagctgggctggggtctctgtccctagagggctctgttgtatccagcaggagggtcagaccaacactgccccattgacctttctatctctccagaaccaagatggagcctgtgtccagtcagtgtcagtgattctgcaccaggaccctcggaggcaggtgaccctgacccaggcaggggatgtccttctgtttgaccagtacaagatcatcccgccatacacagatggtacggtttggggtggacaacagacctagttgggaactgagggtttggacctctcttcccaggatcctctggctaaaagcactgctaccctggcaaaaactcatattctagtactgggtagatcaggataggggacactttggttgcaaaaatgtggactccaaaaatgtgtctttgtcccacctcaacaggacagtggacttcctagtagcatgatggcttctcctaacatgaacatatacatgggtgtttcccatcctgactctcataacttgtttattaactacttgttatactgtctgattccacaaggaacttatgtgtagctcataagaaacacatgtaacaaaaatggcaaaacgattaagaaataaaaacctagcaccagaaagaaagaaaaacaacaacaggggctcaaggttgggaggagtggggatgcactgggtgtcaacaggctgcagaaataaatataaaccataaagggtataaaatgttctacaataaaatctaaaatttaaatttgttacacttgaatctaaaattgtatcatgagcttccataataaaactgtgttgtggccactgtgaagagaatgggtagttacagaatcctccttctgctagaggaggaaacgtgtaccagttccttagtgggagcaaagctttaattggcacttgatgctaaaaaaaatttcttagcccaggctgcagtgggaagttatctctgggtcctgatttcatcactgaacagggtttcctcaagcctccccataccagcttcatggcaggcacgcaggcaggcaggcaggcagggggcgaagactgggccgggcgtgggagtctgagcgggccaggcaggtggtggtggtgggcggggtgtgtactggctgccctcccactctctccttttggattctgtgcccagatgcctttgagatccgtaggctgtcctccgtgttcctgcgggtgaggacgaacgtgggcgtgcgggtgctctacgaccgtgaagggctccgactgtacctgcaagtggaccagcgatgggtggaggataccgtgggcctctgcggcaccttcaatggcaacacgcaggatgacttcctgtacgtagccctgccacggaacccgaagaagaggggaaatgggccccttagggctgggtatctagaggcactgcctaaatgtctctcccgtgagccttcactgtgcccagcatgcaccattagttattgatttctctacatttaaatttaattatgtttctttaaagcagcggttcacagtcctctatgtgtggaatcacctcaggagcttgttaaaacactgattcctgagtcccgctccccaggatttagggtggactcaggaatcctatttttgataagcacctctaagattccagtatgggaggtctatgggccacaccttgagaaatgctgttttagaatgaggtcttaaaaccggggacctcagactgactgatttggctcatggttttgtttgttttaattgaggtggacaccacctttaggtgagtgtaagcccctagtgagccaagaacactaacattcccactttctaacccaccaggccagtctaacccttgtgcctttcctacctggtacttgaaggctcttgagtttgcacgccgtgagcctccccatattcagggaaaggctgttttctgtgagctgacatatttgggcacagacgtaggttaggaacttaggaaggttgattttaaaggctggagatcctggccagtccttggagttccacacattaggggatgcagaaggaaacagggaaggcattctttagccaaaacggagaattcagatttgctgtgaagaacaagaacaaaataaagctcagagcttttcaatgcatatatatttaaaactgtggcattctactatgctttgcctagtagggcagatgttagggtagctggccaaatagtagggggagaccttggtttagtgtgtaagctgtttgccactttcctaaatgtaacctttgggtaggaatattgccctacataatatgagtgtactcattgccccagaacaatagttgggcatggtgggtgccaggcagaacctgccccccagagagaccatgacctccctccgctcaacacctacacctgggtttggtgactcttggagacttgtgatgcctaggaaacatgctcatcccccttcctcccttcactgccccttgtatgacggtttcctactgagagagccaaagggcgagccaaggagttttcaggaattgcccatggagaaagggggaggaaaagtcttacccccatggtgtttgatactcttcatgatgtccctgtttctttttctgacctgaagagctgggggtggggaatgaagccatattcattccccgccccaagtggacaatcctagcccattttgagcccttttgggacctgttaaatgttgtgtgtctgcgtgtgtgtgtgtgtgtgcgtgcgcgcacgcatgcatgtgtacatccatgattctatgtgtttgaatgtggctgtgtggaccactttggctatatgcatgtctggcatatatttgtgctctgtgtgtgtgttgagagtgtgtgcgtatacatgttacatatttgggtgagtacacgtgctcctctgagtgtgtgtatatggatgtgtagattatgactatgtgtgtgtatatgagcaagtaggtgttacctggatctatgctatttgtgccccctgagtccacaggggcaagtgtgtgaatatggctgtgacatggctgcaggtctccagtgggtgtacctgagagcaccccacaactttttggcaattcctggaaaacactttctgcttgctccccgctggtctctggctcccctctggacccctgcgatgtgcacctgcaagccggtgagttggtgggggaagaggagaggcatggttgagtggggtggggaggactgctttgagagagatgaaaagggaactccgggcaggagagtgctggccaaatttgtaggagtgataagagaaggaggagcagcagggaggggaaaggagagacagtgagggccaggcaggcaggaagcctcatattcttccactatcagatatacacacacacctttatactggcttctccatctcagggcaaaagcggaagtcggccccatggccccaccaggccccaccctctctgcccatgccccccttctcacctcctactctcaccgccctctgctctgccccagctgccctggcctccttgttctttctacacagtcaggactgctctcctctccaggcctttgcacttggcagttgcctggaatgctgtttctgcagacacacacatgcctcagttcctcacttctttcagatttgtgctcaaacctcattccctcactgaggccttcctgactgcctgaattcaaattgcagttgcccctcctgcctcacctcatacacccatgctgcttcttagctttctctcgcttcttaccttcttcacctttgaagtttctatatgaattttttagtgactgtctcctttgaccagaatgtaagctccagggatttttgtcaagccacgtattcacacccagatgtactaaaccacacccataccttcccagccagctgtacactgaagtagctgcctacatccgtacagcgtgtgcacacacacacacccctgagccatggggagggagagaggctgatcctgggacaccaggtagaccgactcccctgactgcctggctcctgttcttccttccccagcctcctactcagtgcaggcctgcagcgtgctcacgggggagatgtttgcgccctgctctgcgttcctgagccccgtgccctactttgagcagtgccgcagggatgcctgccgctgcgggcagccctgcctgtgcgccacactggcccactacgcccacctgtgccggcgccatgggctccccgttgatttccgcgcccgcctgccagcctgtggtgagtgccccacccatgtgaggctgagctggaggagccagagctccagacctgagtgtcccctgcccctgaaagtctccactgggatgccctccagtctcctccagcctgactgcacccagagcctgcttctcctcctgcaccctccatctctgccaatggcccccatcccctccatcactcaggcataacacctgggacctgtgactcaggactgcttctgtcacgcttacttccagtccatctcaagtcctgtcagtcctgttaatcccaaattcacccacttcttaccacctccgccaccctactcagagccaccttgcgttgcacctttcaaaagaccactggctgttgccctggggtttgagtacacacacaacttcaatatcatgagccagcccctacccgtccctaccctgaccctgggctatgctccttcccatgtcttcatcacctctgtgtccccagctctggcacaaggcctgactctcagtaagcttttagcaaatgtttgttgaataaatgaaaaaggcactgtactgggagtcaggaggcctgagttctattccagccctgcaggtgacttgctgtgtgtccctaggcagggccctgattctctctgagctagtttccccaaaagggattggacaggcccactggttcttaaccctggctgcatattagagttaccataggagctttcaaaagattcacacatctgggccacatcgagtatcaacgaaggcaacatatctggcagtggggcccaggcatcagcattttcagaagctccccaggtggctttgatgtgcagcctgggttgagaacagctgaactggatggtctcagtggatctactggatcccacagagtgtaggagactctggggggagtgggatgctggccacacaaggagagggcagtcttgagtcttgggacaaagggagcaaaacaggctgctagagggagcacagttgatatccacaacctgtgtgtgacacagccaggggagtgagggggtaggagtgtgtgtgtgtgtgtgtccacacacttgggctcatgcatgtgtctatgtgtgagttacggggtgggtgcagggccttagcaggtggtgatctctaccccttccccaatgtcactgcctcagaggaatgccttttggaggaaaggacctgccagtggttttccaggctgaacttggtagaaggacccacctgctgctttgccgttccagtgtattggtaggcagtgggactctggagtcagacctgggttcaaatcctgcctctgaccttgacctgctgtgtgacctcagacaaatgtctgaacttctctggatctccattctcctcatcagaatgacagccccactccacataactgtggggatgagggagacaaagcatgcaccactcccccctcactgcagcactgtcctgtgaggcctccaaggagtatagcccctgcgtggccccgtgtggacgtacctgccaggacctggccagccctgaggcctgtggggttgatggtggcgatgacctgagcagagacgagtgtgtggagggctgtgcctgcccaccggacacctatctggacacccaggctgacctctgtgtcccccggtgagtgggtcagcttgatctctgagttgggtgggaaggtgaggccaggggtctccagggcatctgagactggggaacctggctgggcctcttgtgtccctccttcccctcacagttgcaggccagaccttggtgggtaaggtgggtgggctccctccttggggcctccctcccagatctctcctcagccttggcctttgggccattatagcagcttcctcacaagacacaacaaccccacagagcccaggggccctctctctcctcattcccctctccttccacataatttattgactttctggtatgttccagacatttctagggcttgggaattcagcaatgaacaaagcagagtttagccctcagggagctcacattctagggttgcaagacagacacataaatgaacagacacttaatggacaggtggcaacaagagctgttgagccaagtaaggcagagtgagagcagggagtcccattcctggtgtgttacttgaggtgggcctggaagtaaagcctttctgcggaggtgaggtctgagcagagacctgagggagtgaggaagggggctccaggaagagggggtggctcaaggcccagcttgttctcagtgtagctggagggcagagcagcaggaggatagtgggaggcagcgaccccacgtgatcttggggcgactggcaaggtccttggtcccttccaggcctctgtttctccgtctgtaaaatgatacacatttgattggtggtcttcaaatggtggcagggctggagagaggcccctttagggtaaataggaatcactcataggccttcccaaactacagaatcctcccttgagatccagatgtgtgcctggaggctctcaccccttgatgttgagtgttgccaacgaaaggggtctgtgtggcttatatatagagagggaggtggttgttaagcagcactggagctggaagagtttcggcgtccggtccataactcactgcgctgctccaagacctgcacgtgcctataatcggcaggttctgtgggagctgtgtgaggaggaaacatagcctttgcccttagatgacctgcacaaaagaagaaagacagcataagaatccctaccttacagaacccctgcgaagaatcaatgagattatgtatgcagagggcctggctgggtgtccctggccagaggtcaatgtacttaacaaccagtgcagcacaggcactgagcaattggaatagatgctgggcgtgagtgaccaggacacctgtgtcaggatgcagcaccagctgaatatctgccctgttcctgacatggcatgggctcaggagctgtgctcctgttcttactgcccctcccttccccggtccaaatgaggctggctgcaggagtgtgtggagaccagtgactccttgtctaagcttggtgcatggccctgaatctgggacccagccgtgacctctatccctggtgtcaggctggcttttctgctcactggagatgtgtcacatgtcactgtagataccattacttttccctgtgtccttatgcacctggttggctgagggtggggtccctgtccttggcagtctctgccctagctcctgagcctgctcacctttctttgctcccatttttttataggaaccagtgctcctgccacttccagggagtggactatccccccggagacagtgacatcccatccctgggccactggtgagctccgtaggtagcagccttcttgtcctctctttaaagggaggctgctgactgaagacagtgcagctgatggaactttctgtgaagggacacccagccctgctctgtgcagggagggggaagtgagtgagggtgtctttctgaactctgcagtgacccgagtgcagcaacatggggtgtctgggtcctgcagtgactgggtcggctaaccccagggcccgtctctctctgcagccactgcaaagatggagtcatgagctgtgatagcagagccccaggtaagggtgggtggaggggtggagcccttctgggggctccacatggtaaaggagagtggggagtggagcactgatcaggctgtggcaagcccactccaggttttgccctacattgggccttccgtattccttgccctcttggcaaagactccagcttggagggtggcacctgaagccctgtcccagcctcagccccaccctagtggctgtctctgctgcctgcagaggagaggctgagactttgtcttccttcagggcaatgatctggggcaaccacgttgggtgtctgggcagtttcctgacttcctttgggtcctgatgttttctgtctgagctgtcatgtatctactgaggcggactctgcccaggacaatgctaggtgtggggtcacagaggtaggcaggacagcctgggcttttgagaccctcctaggcaacagagatagggatggggtggaacagtggtcgtgggatgggggtcaacctttgagaggctgtgaggtggagtagggcctgggggctggagcattcagggagggcttcctggggtggaggaagggattggagaataatcatacagtaggtggttaggagcagggcctgcagaatcatccagcctgggttcaaatcttccctggcactcactagctgtgcagccctgggcaacccactttacctctctgggccttcatttcctctttggcatataacctagtttcctgcatcctccccatgttttgtgtataatcctggaagcgcttttcctttggtcacttctggctttggatttctggctctttgggacttttatctcacctcctgtgcctatgcctttctctctggttcatcccagcctgggcatggaactcagctcctttttattaattttcctaaaaaagatcactcacgcagtgtgaatgtgcggggcagaccttatggaaggctgagggagagggggtgcattcatgtcacagaaatagtggtaacaggaccgtgactctccttgtcattcagagtcctctggccccctgccacactgattggtcatcctctttctagccctgctcctggtccctctggggcacttctcactttatggtgactttggggaggaggagaagtggcttcactccattatttgggaaaatgggggacaataatacttcctagagttgttgcaggattcaatatgatgatgcaggggaagcacctggagtagtctggtatggaggacgtgcagagatgggtcctggtggccgcagtcttattgtgtgacagacagcacacatctacccctccctctgtgaggcgtatctgggaaaccaagcaatgcccaggagcgaccagggagggaggagacttccgagcccgtctctccctccatcctccagctgctgcccctgtagcccaggagcccatactgaggccccagggcctccgctcccatcttcttctcttccagctgctgcctgcccagcaggccaggtcttcgtgaactgcagcgacctgcacacggacctggagctgagcagggagaggacgtgtgagcagcaactgctgaacctgagcgtgtcagcccgtggcccctgcctctcgggctgcgcctgtccccaggggtaagtacccatggtgtcgtgggcccgtgatcctgaaggctggcagaaccaagggccacagggtggagtgggggcagggaaaacatcacatggccttgtaggaaggcactggcccaggctggccagccacagctgtaatggccagagaggagtctgggaaagaggagaggctggggatccagcctggagtgtgggctggaggagggagagccctggccgctcatctgtgaaatggaaccatcatcaggcctaccaccttaacaggctactgtgaggaatcagtgagctcactcagtggaagcactgagtggggtgtctggcacgctgggcactgcagtgcgttggaggccactggagagaaaactcaagttcagctctcaacctcttcctctgcactgttctgaccagagccctcaggaggagggctagtgcccctaaaatattaaaaaaagaagaccccacccagagaaaactgtctcattcccaggtccccagaaccctgccattaaagccgtgagagctgcgtgagtcaggctctgtgggcatgccttgtgtgggctctgtacaccgacgtggcccagggcctgacacccagctctgcccattctcattcccaggtctgggctgagaagacagctggcaccttatcccatggcttggcaacagccggctgtgcccttcagcttatgcagagattagtggtcacccgggagtcgtggcccaggcgtgaaagcctagggaaatgacatgggggtcagggcttctagggtaggaaggggaggggacagtcagttggagctttactgcttctaagacactttcatgttattacctccttcagtctcagagcatccatggcagagaggaggggaggaccatgattcccattttgcaggtgaagaaactgaggccaggggaagggtggagggaagtggtgcccaaagagccaggactcaaacccaagtctccttactccaagcccagccgctggcccagagcacatgaggtccgtgatggtcacctatatagatatcataatgtgggttgtaagcctgccccttccaggcaagtgtctgaaagagaacctgcaagcaaccctaggcctgaccacctgctgccacttgggccccggagtggcatttgaagagtatctttgtcactgaaggccgcttgtgacaccatcctgggtgcacagcctgcctctcagcctgaggtcaggaaaagccagggtgtctggggtcaggaaccgagggtcactcactgccaagagtagtagcaaggccacagagacacagtggaaggggcgctggactggagaccgggagaccgggctctgggctcagtttggccaatgacccattgcgtgctgtatcaaaggccctctaaggagcttacacacatgcctcaggggcttgtcaaagtgaaattggtacagtctcaatttgtaagggaagggcaggcatttcctaccatcctggaacatcctcttgctgggatagggctcccaaagatgcccaaccatccttaacaacccctgcctaggacccttgggacccatgatcacctctgtgcatgagagttccgactgtctggccaccatgcccttctcaatgatgtatctaagaatctccaaagaacggtctgtggctgtctgtgtgcctccatatttctttgaatctggggtctggccaagggccctggggccactaggcagtgaggcacaatgagcacagactcaggagtcaagcttgaaccctggttcttccacttcctaactgagttaattaattaccctgaacctcagctccttcatttgtaaaatggcacagagtaaacactctatgtgagcagatagcattgtttcttctcatctggatcccatgcatttgcaaataacctccctgaggggtccctggagtgagaaggtcccctacaaggtaaagagagggtactttgcaaattgaaggcaccttgaggaccgaggccaaagccttgagtccttgcatgctcttccccatgatgggcacacagcaggtgctcagagatgcagacaggtctgctaagagcaaggagggagtaatggatggtgggcaacagagaagacccctcaagaagtggctggagacaaggcttggggctgaagaaggaaggcagtgagccagcccttcactggtgtctgatgcaattatgggggagagaggggcaagaaaccaatatttattgtgtttctactaggtgataggcagtgtgcccaggcctgtaagattctcataatgaccttgggaggaaggtgtcattattcctgttttaagcacaaaaacagaggcttagaagggttaagtggcttcaggtaaaacgtagtgaattaagcatgtgcttttttttctttcctgcttcctcccacaaccacagtgaaatgataatggggtaaaaaggtataaatccccagggacaaagagagaagagtggaagatcagtagtttttgaagaaggaacgtgggtggatgtgtagaaactggccttgcagaggggaaggccaaggagaaacaaatagtacatgcattttggaaaatagtttggcagtttcttatataaacatgaatctacctgagcacccagcagttcaccctgaagtgttcatccaagaggaataaatagaagggggcgtcgggggagggagacaggaggttgggttgcaagtctgtgcaaggaggagttcagcctccagatcccctattgctcctgctggggtcacaccactgctccagccccatccagcaggagaaaggagagtttcaagagaaaccaaatcagagactttggccttgtaggcaccaggaggggtgagatgcatcgtggaaacagggagattcagtgaaaagcaagtggaatcccagcaaatggagacattcgcctcccagctcagagatgacagagatttcttcccttgaaaattggctgggccaatagaaaaatacaacagaaactgacatcttgggagtttctcaacaaaatggttggtcctccttaaatagggagcctccagtcagcttttgatgcctcactcttttttctttttttccttttaggaagtgttgcgtaatttatatacagtaaattacatggatcctaagtataccgtgtgttaggctttgacaaattgatacctgcttgtaacccacactcctgtgaagatatagaacatttctgtcactcagaaaattccctaatgttggcgccctatatattccctaatgtgaatatataatgtttatctattctagatacaagtcttctgtcagtcctttccagccggttccgcccccaccagcattgctgtgcttcacaccagcatagataggttctgcctgttctagaacttcatgtaaatagaatcatacactatatacccttttgggcctggcttctcttccttaactcttgaggttgacctaccttgttgcatctatcagtagtgtgttcctttttctatcccggtagtattccattgtatgaatatacaattatttatctgcaaaggtgttatatataataaaatgtacctacttttagtgtatggtttgatgaattttgacatctatgtatatatcatcataattaagatatataacatttctatcaccaacaaagtttccctcatactccgttgtagtcaatcctacccctgtgagtgctaggcaaacactggccggctttttgtcactatatagtagttattcctgttctagaactttacataaaaagatccatatatatacaaacacacacacatacacactcacaaaccattttgatctggattctttagctcagcaataaagctttcaagattcaaaaaagaaaacagttatttatctgctcaagcattgatggacatttgggttgttttcagtttgggactattttgactaaggttgctatttatttcccttggatgaacatttcagggtggaattgctgggtcctagggtagattcatatttatataagaaattgtcaagctgttttccaaagtgattggacaattttacacgtccagtatatgagaatctgactgttccacatcctcactaacacttggtgttttcagtcttttccatttttgttatttcagcaagtacatggtcctatctcattatggctttgatttgtatttccctaatgactgtgagtaatttttcatatacttattggccattcgtgtatctttctttgtgaagtgtctgttctggtcttttgcccatttttaaatttggtctttttttatttgattgagttgtaaaaattttttatgtattttagatacaagtcctttgtcaggcatatgtattgcaaatattttctcccaatgtgtgtttacctatttatttacttaacatgccttgaagtatctaaaaacttctgatgagaagtttttaattttgataatgtctaatttttttcttttaaaaatctccttcatttctgatgaggtctaatttatcatttttttctttatagttagtcctcaaggttgcaaagatattctcctatgtttttttctaggagctttacaattaaatgtaatggattaaataattaatttattattattatttttttttacagacaaggtcttgctctgctgctcaggcaggagtgcagtggtgccatcacggctcacagcagccttgaactccttagctcaagcgattctcccgcctcagcctcctgagtagctaagactacaggtgtgcaccactatacctggcaaattttttaaattttttgtagagatgggggctttgctatgttgcccaggctgatcttgaactcctggcctcaagaaatcctcccaaaatgctaggattacaggtgggagccactgcaactggccagctttacaattttagcttttacatttaagcctatgacctatttaaaattattatattttacacatgtttcaaaatggagtcaaggtatgttttattttattttatttttgatggacatccagtgattgtagccctattttttaaaaaacactttcttctccccatgtaattgctttggcatttttgtgaaaaattaattgactgtatacacgtgggtatatttcaggactcttttctgttccattgatctatttgtctgtcttcatgccaatatccactctcttgatttatggagctttatagtaagccttgaaatcaggaagtgagagttcttcaacttttatcttttctttcaaaaagttgttctaggtctttgcatttccgagtaaatttaggatcagcttatcaatttctaccaaaaaaaaagcccctgagattttgaatgaaactgtgttgaatttatagatcaatttggggagaattggcatcttaacaccagtaagtcctccaaaccacaaatatggtattattttcttatttattggtcttcattaatttctcttagcaatatttcatagttttcatgtgaaggtttacacatttttcattgaatttttcataggtatttgctgtttttgttgatgttataaacggtattattttattaattttccattttttaattgccacaatatagaaatacagtcgattttcacatactgaccttgtattctgcaatcttgctaaattcatttatgagttctagtggcttttctttgggtagattctttagaatttcagtaagtgatcatgtcatctgtgaataaagatagttttacttctttattttaaatttttacatctcccatgtttcttgccttattgtgctgtattggacttacagtatacttttgaatagaagtgatggaagtaaaaatcattgccttcgtcttgttttggataaagcagtcaatcttctaccattaattctaacatttgctgtagttttttttgcaaatgatctttatcagattggggaagtttctttttatttctattatgctgcaaatttttttataataaatgggtattgaattgtcatttgatttttttttttttgaaacagagtctcaatctgtcgcccaggctggagtgcagtgcctcaatcttgactcactgcaacctccacctcccaggtctaactgacttttatgcctaaatctccagagtagctgggattacaggcatgggccatcacgtctggctaattttcatatttttagtagagaagggggtttgccatgttggccaggatggtcttgaactcatggcctcaggtgattctcccaccttggccttccaaagtgctgggattataaacatgagccaccgcaccaagcctgtcaattgattttatttattggagtatcatatgatattttccctttattttataaatgttgcaaattacattggttgatttttaaaatcttaaaccagtcttacattcctgggataaaccccagttgtgactgacgtattatttaatattctgtggtctgtggttttccatacttgcaacgtttttgtctggttttggtatcagattaatgctggtcttataaaatgagttgggaagtatgatttccttttcaatttttggaagagtttgtttaaaacttgtattatttcttccttaagtgcctggtagaatttaccaatcttggaagaattttaacttcaaatttaatttctttaaagatattgggctaattcagtttacctattccttcttggctaaatatttatagtttgtgtcttttaagaaatttgtccattccatctaagttgtcaaatttattcacttaacatcgtacatcatatttccttattttccttttactatcagtagagtctgtagcaatatctcctctttgttccagatattggtaatttgagtattcctgtccccctttttatcattcagtttagacaggggtttgtcaattttattggtcttttcaaagaaccagcatctggtttcactgatttttctctattgttctgttttttatttcactaatttctcctcttatattcatttctttcctactacttactttggatttagtttgctcttgtatttctaatttagaactttgactttaatcccttctatttcacatcctgacctggatatgctggccacttcagaagccctcaaccccattttctgtctgctcccctcagtgatgcatcgtgccatgcttgggttccatcatcctgtactatagtccagaaagtgcttccaggcagaaaatctggatacaggagcaactaacaagggactcctttgagtataatgcctgtagcaccctttcttttcacctctttaacccatgtgcttgtattcttttgaaaaataaaataggaaggttaagtaacttgtttcaggtagatcctggatttgaacaaaaaattatttattgccaaagtttgtattcttagccctgccccaggctgtatcctgttgatgcctgatctagcgtgatgctatggcctgagatctttaataagtgccctgagacatccttggctccggcctgggagtgctcagatttcatggaaaccagactagaagacagcagcactgctgctttggggcctgtggtctgagagctccatgaacaacctgggtaggagggtcatcgcccatatccatgacctgttcattagtatacaactagtgcctgaggagcaactggcatccacctggtcagtagggctgtggctggtagagataagccttgcttcttgatggatgacagagactcaggctgggcctagtctgttactggtttttccagttaccaaggtccctctgaacctcactgagcagcagcaggatggggagtgaatacacagtcagtctcttctagggtaaatgctgggagccacctccgagcatccagattgaggcagggtcctccacagatggcagctatgggaagagtgctctcctgaccgcctgcttgctgtgtctctacagtctgctcagacacggggatgcatgtttcctgccagaggagtgcccctgcacttggaaggggaaggagtatttccctggggaccaggtgatgtctccttgccatacctggtaagtgagggtcccaagcaggctttgcttttttgctgggagggggcatggatatgggtgcataatcaagagtatagtctagcattcccatttcattatgtttgtattcatgttgtgcgtttgtgtgttgtgtgtggtataggggtttgtgtacacataggagtatatgcatacaaaggaatatttttgtttttacatgagtatgtttgttcagtcatgtatatgaatgtgtatacatgcatatttgtaaccatggcaatttgtttgcatatttatatgaacatatgagtgtgagtgcaaatccaaaatgcacatgtgcatatgtgaacatgcatgtacatggatgtatataaaaaggcaggcattcacaaatctcaatatgtcagtgaatatgtacaattagaaatttgtttatgtagacaggtgtgtttatatatatttttgtgcatatggatccatttaaaatgtgtgcacatgtatgtgcaaagtgtgtggatgtatgtttttaatggctatacatatttgtattcacatgtgagtgtaaatgtctgtgtaaatgtgcattgtgtttgcctgtgaataggtacattcttgtgtatgaaagtacgtgtgagggtatttgtttagtaatgtaagtgtgcatatgtgggagtgtgtgcccctggattggattctgtggaaacagactcggggttagttctgcagggcctgttctgggccacacagaggtgggtaggcagtgggtagactcagctttctgatagagagaatgctgggggacggggtgaggaacgatgaatgtgccctgatgctggagagcaaacccagtcactgttccaatttggagaaccagctaggggtggcctgaggtgagcaggaagcccctggcactggaacttcagggcccagcagagaagctcagagaggttctatctcagagacccatctggctagctggagcatggcccccagtccctgtcccatgctgggactgaaaccaccctgtttctctggcctagaggaaggccatagtgtttctttctgtgttagaagcagggtcacggtcaagcccatctgctccaaggccggtttctccagatacatcagagtgtacttgtagggtcagagccctggctgtctgaccccagaagtccctgggtataatgttaagacacagacctctgcacaggctgtgtgctcattttttttcttgagattttgtgactgtggtgagccagagctcaccagggatgccaggcacatgaggtgggagactggggatggctggcctggatttgcccaggggtgctcaggccctgagatggattcacttccatcacttccctggactccagcccctgtagcagcaccctcaccctcaggcaggggatagctgagttacattgaatcctctcctgtgagtgcattgtgctcagaaatcagatccaaggcagaggtggtaaggagtctggagccaaggccgaagagctgggattatttaggatttggaaccctgacatgaggaggcatctgccttcataggagaggctgactggccatagggtggatgtcctctcttccatagaaaactaggagatagatgggcaagtttttactttttaactcagttgtaaaaattctacctcctaatacagggacaaaccttaacatttgccctcgaaggacctgccactgtggcccagattccagctgctctcccgtggggaggcaggtgctggagatgtgttgcgctggtgtgactcgagcatttgctgggatctctttaccaggatggagcctggctacccatcccttcccagctctgtgttccgtgtcaccatggtcggcagcatggtcggcagcatggtcaggcacagtgggagtatttccagcagttatgcatttatggctgagttgtaggtcatgtaggtgggtgaatgacaggatggatacataggcttaggaagccacgtggagtcagtgcatgactgagcctgtccctcattgttgctgtcagacacagagccctgggtcatgcccctttacttctaaagattttggcactgagctctgtgactcttgccaaccctactccttccctaattcttggagattttagtatctgtttagaggtgcttctagtatctcccgacatctcagattcttcatcctctctcttccaaagatctttctccaccctagtggagtgaggagtcatcttgtagatcttgccgttcccaacaactcacccagcccatatcccaatgcgtctcacctcaccttctgtctttctactccactccctctcataccctgactccctcaatcctgcaaccccacagggatttctcatccatgatccctaccacctctctgctgcctctcaccccctcgatgtctccccttcccttttacctcaacctgtggtccagaaccataatcacttccttgagtttagccccacttctgttcctcctcctgctttgccctacttgtttggcaaaaccacaaccctggtgacatccacacctttacttcctttgtacctgcacccatgcagctgaatgtgactggagggatgtgcaaaacccggcttccagctctcgttttaaattcatgggctcagaagggtcgaaaaggcccttagagctgatgggctctcggattgtatttcccgggtctcctttgctctttcatcccactagataactattccactctttctcctctctcctcaaagccctgacacctcctcccctcttattctcagctgatgatactgcttcctgtttccctgaggaaattaaagccatgagaagagaactttccaggctctgtacccatgtattttgcccgtacaacagatgaactaagtgtccgtgttcctatctaaagtgaagttccttcacttgtcctttgggtcctagctcctcacttgtccacctaagggaaccactgcagcatctctccctcttttctcccatataaacaatttgcattctctactggctcatccctattgcataaaaatatatcgtttgaaaaacttccaacctcctaggaactgctccatttctctgctcgccttttattgcaaaactccctgaacactttttctatacttgctgtttcaactttctgttctcccgttcccctttaagccctttcggtcaggcattttccccatcattccttcgaaactattcctactaaggtcaccagtaacttcatattgccatatccagttagcctttctcagtcctcaccttcctagacctgtgggcagcatttgacacagttgatcacttttccattattccctccttcttgatactttcattcatgtggcttttgggacaccacctcctcttgcttttcctccgacctctcttcctgttccttctccgcttccttcattggttcttcctcttctccaacctcttgatattggagcaacccaagagacctctcctcctctctatttatacttactcccttggtgaactctcccaatctcatggctacaaggcccatccataggcagaggactaccagatttctacctgtagtccaatccatgcttctcaactctaggctcacacatccaactgcctacttgacatcaccatacgtatgtctaatggaggtctcaaattcaacatgtccagaacagcacatctgatcttccccctcaaacttgcttctccctcagccttccccatctgagttgatgaagacttcattctcccagttgctcaggccaaaaaacctggagtcaacctcgagtcttgtctttcactacctatatccaacctctctgcaaatccctttggttctaccttcaaaatacatccagaatctgacaacttctcactctttccactgctgttaccctgctccaggctgccatgatctcttccctgatgtgctgcagtagccactcagctggtctttctgcttccccttgaccgccttgagcttaggctcggtgcggcagccagagtggaacataaatcacacagtgtcattcccatgatcaagtcttccaatgcccaccaccccccattcctagcaggagctaaccttcctacagtggccttattggacccatgtcacctgaccgtccgtcgcccctctgaattcctcttctactctcttgcccttgccctctccattctagccatgttgtctcccgagtgttccccacagactttggagagactgtaccctttatttgaaatacccttcttacagatgcccatggagttaactctgtcacctcctttatgtctctactcacacatgccccaaccaccctatttaaaattgtaacccactccacccacattcccagtgacctgtatcctgctcccccataacactcattgccttctaatgcactatagtacatacttgcactgccttattattttttatttagtgtatctcttctccctctagaataaacattcccagaggcagacggttttctttttgttttattcactgatgtatcacaaaattttggaagaatgcctgagatatggtaggcacctaatatttgtagaatgaatgggtaagtgaatgaatggagtggtaaagggagtgtagactttggagttaaatagatctgggttaaatgtcaggcccattatttattggctgtgtttcataacctctctgagcccctgtgtctcctgcatgaaatcacaatcctgccctccaggctcctgttagaggttggtgtttgttgacctctttgccgagggacacagtgcacatgcattcgataagccatggctctgtcatgagtattcaggtatggggtgggtgtgccctgtgatctggtctgggcatgtgtttttcagtgtgtgccagcggggctcattccagtgcaccctgcacccttgcgcctccacctgcactgcctatggggaccggcattaccgcacgtttgatgggctcccgtttgacttcgtgggggcatgcaaagtgcacctggtcaaggtgagttcccggatgtttctgcccagttggctccatgcacagctgtcagggcactctggtgctctggactccagtttgatgcagaattgggtgatcggggatctaagccctgaggtggggctatctagagactggaagaagtgctgaggcacaagctcagggctggatggagctcaccagtcctgagataccacactgcctgtctgctcaccattataatcttgctctgttgggtcccagtgcttttttctgtctataatagcaagagctaatgctttttgagctttattatgtacctaggggcatattgagccatattttgtggattatttcacttaaatatcacagcagctttacaaggtaaagtttatggatcctatgttatagatgtaacaattcaggctaagggaagttaggtaacttgcccaaggtcacacagcagtcagtggtagagctggggtcaagtttgaccaagaaatctgactggagagttggtgtgcttaaaggagtcacaggttataattttcggctcacctggaggaagaaaactggtgatgtggggggcacagtgaaggcaggatccctaccccaggaggaatgggcactgatgtggtggaggagtgtcacccaggggaccttgggtttgctaatagcctatctcatcttataagagtaacatcaataataaaaataacatgtaataataacaatgacaaaaccttttatggaaggaatcctacctatagggcaggcactgtactggggtctttcacataattgcagtaactctacaagatgaagataattgacctcattttatttaaaaagttttaaaggttaatgcagtgtatattaaaaacagatattccccttcccaattcttctgttcctatctcctgttaaataaccactccagtcagggatgaatcctgcaagaacttttttctgtgagacatggacacacacacacacacactttgtttagtttatgtgaataagattctacaatgtgctttttttacttaagaggatacctcggacttgatttcatatagttggtacacacttttttcttttgaacagctgtgtagaattctacagaaataatgccctcgagtttgctttattttttccccatcgatggacatttaggttgtctccaatatttaaatgcagcagtgaatacctgtgtggatgtatccccaggttcttagaagtagaattgctgtataaaaagctacatacatttaaaatattcaatgccagcaaattcccctgcaaaaagcttacactagcatcaaggatgtatgtgagacagtgcctcttccccataccctatcaacacaatcatccctattatatatttattaatacattcattcatcagatattttggggagtcactacatgttaaacaccgcactaggcatccaaaaccagaacagcttcagagaacagaagtcgcccaaagtcacacagctcagctaacacaaagtagaagtggactgaaagccactccagagagcgtgttcctccacctctgtacctcttggcaggatctcctttctcccttgttttattggactcacttattctctcctcagagcacatcagatgtcagcttctctgtgattgtagagaatgtgaactgctacagctctggcatgatctgcaggaaatttatttccatcaacgttgggaactcactcattgtctttgatgatgactccggaaatcctgtaaggctcagtgcctgtgaaggttgtgtagacaatttacaggttaccagggttggggcagaagagggctgaggactggcttccttaccatagcagtttctcttggagagccactgagttaggagcccagactgaattcctcttggccagggtcaggaacacagaggccaatgtcagggtatgagggaggcagaggcattggtgagggcctggctgcaggcatagctgacctgggcgctagggggcacttgggctcaggactgaccatctctgtccctctagagtccagagagcttcctggatgacaagcaggaggtccacacatggcgagtgggatttttcacactggtgcatttcccacaggagcacatcaccctcttgtgggaccagagaaccacagtgcacgtccaggctgggcctcagtggcaggtacttacatgagcagtgacattctgctcctgcctggggctaagccaagccctgggtgtccttgggtgagctgtaccctccctgaggagccaagaagagcatgcctctgttctctcctccgccctgctctgggccccttctcctctgacattgctccatccctcttcaaactgtgacctcagcagtggcttctaggtctatgatagactcctgggctcatggtgacccctctgcccgtggctcacctctggcaggcctgcaactgaccatggtgtcctctctcctttcagggccagctggcgggcctctgtgggaactttgacttaaaaaccatcaatgagatgaggaccccggagaacctagagctaactaacccccaggagtttggcagcagttgggctgcagttgaggtaaagcctctcttccaggctggcttatgcccctcactcagatgggcgctgccagcactgaacccggcccaaggtcagggaagagggatgctggtgtgaggtttctcctgcaatgttctctcagcctctgactgcatccctagccctagactctgtcctatggcccaaagatcatgcatagtcttgtctcacaaatccagctgcccaccctaccctggaccaagccctggtagggtggtggagggttgggaaggtgacaaagtctgtcccaggagagatggtcactcatgatgatgcttcccagtgcctggcactaggtctggcacagagaagagaccaagagagactgaggtgggttgaggcaatcagggaaggcttcctgaaggagatgagagtggtgctggcacttaaaggctgggccatgcttaaatagatgaatatatcagagataaggtctctgagaggaagggcaacactagcagagatagaaatgagggggtctgcccaaaggacagtctgcgagatgtctaactgaggctgccaatctgtgagctgtgggggaaacagcactgagttgagagcagtagacctgggttcttgtcttgggtcatccattgactttctgggtgaccttgagtaagtcccattcctctgcagagaggggactgggccaagagagggctgatgaatagatttcacttcatgtgacaactctgattggtcaaaacagactgcttgggagctatgttgagaaacatccaagatctgtgtcaagctcagctggaaggaggactgtgatcgattatttatgtctgccataggagcagcagtggagagtggtgatatgagcgttacatatttgcctctcctggacttagtgatcttaatgccctgctgggaagtacacggagatgagcctatgtagactggggtaagggaagcagtcgtgcatggcctggagttcaactgctccaggtggggcagggctgttcccacagcctctgaaatcctgaggtgggacaagggttcccacagcctctgaaaagtgcgccctaacacacccccattttagagaagctcagtgggtgactaacccttgttctccccacacccccatgtacatcatatttctctcttgctaatcccattcggcataccatggggttccccagtgaaaatgtagtctaaggaaggagattcagcagacatcggaaacatctgtattagttatctactgctatataaaaattttatgagacttagtggcattaaacaacacacatgtattatttcagtttctgtgggccaggagtcaggacacggcctgacttggttccctgcttagtgtctcacaaggctgcaatcaaggtgtcagctagggctgggctctcatctggaggctctactggggaaggaactgcatcctcatctgctcacatggttgttgattacattcagctccttgcaactgtagggctgggagcttccatattttgggctggcttttggccagagaccaccctcagctccaagagaccactgacacttccatccatgtggggtcccccagcatggctgcttgcttcctcacagccagcaagggagagactccagcaagatgggctctgggatctcatgttgggaatcatgtgatcacatacacatggccacgtccatcccatcacctgggccatattctgttggtttgaggcaaggtataggtcccttctacactcaaggggaggagattttacaaggacctgaatatcagggggcaaggatcatggcggccaccctaaaatctgtctgtcatgtcaggcaacaggcatttggcaagtagggaggtcaacagccctgcctttgcccctcagtgcccagacaccctcgatcctcgggatatgtgtgtcctgaatcctctccgagaaccatttgccaagaaggagtgcagcatcctgctcagtgaggtgtttgagatctgccaccctgtggtgagtgtaccccagcctcggctcctcccgagtgccccctccactgtcctgggatcccttcagctctcagactcccccatgtctcagaggagacagctcagatctccagggaagatctgcctctgccattcccctgcctccagccagctcagatgagtccgtcctatttccccagatgaccaggcacagacagccaggaaaacagagcttgtgcccttttcaagcccatcttgatctggcccttcctccttatcatgaagttcttctaaatggtggacccaaagccctcatgctgaggcaccacctattgcctgttttgcttcagtgcacacagaggaggctggggctcagcactgcatggcaccctgcaggccttgaaggctgctgtcagattggccttggctgtctctggccctggctaggcagttcaggctctactcctgttcagccattcttggctcctggatcaaacagcccagactaaggagagaagagagcttagttctcaaaagtggacatctgcctggaccatggagttctcgcttccttgtccttctcccttcacacctcatgagacaggatagctcaccctatcccgtggtcccttcatgttggtgctggtcgtcatcagctgaaaagatgcagatctgacatttgggatctgtcctctgacctctaacttctgaccttctccaggttgatgtcacttggttttactcaaactgcctgacagacacatgtggctgcagccagggtggtgactgtgagtgcttctgtgccagcgtctccgcttatgcccaccagtgttgccagcatggggtggctgttgactggcgaaccccccgcctctgccgtgagtgtcccagacaatcacctgaggggacagagtagagtgtcacctgtgggcatgccctaggggtactggcagtctgtctagcatttactgagtacttagaatgtaccaagcaccaactgctttgggcgtgttattcattgaattcttacaactaccctttgaaacagggctatatatttcctattttacagttgaagaaacagcctagagagagagatcaagtaacatgctcaaggttagtggaggagccagggttcatccctagagagtccaatgcgaacccgagctcatagccactttgttagaagagtcaggagcctagacccagagctaccactcgcaagctatgtgacttcaaacaactcacccaacctctctagggctcaattttcttgtgtgagaagcaggaatagacctgcccccaaggttgactctgaggaccaaactgggtgatgaatatagaagtcctttgtcagctgaggtttgcaggtcccatcagaggcagcacagatgatcagtttattcagagtaatggtggtctgcagatgcttttcattgcacacacctatcaagtaaaatcattttgtgcacatacatatgcgtacatagatatgcatccatagatatactcctcaagtaaaatatgtaaacaaatttaaaaattaatatttaaaagatgaaagaaaatataaagaaggctaaattcttcattgattattttttatttattcccacgcaccaaaggattttcctcgtgcaagcacctcaccttggggtgcgatggccattacacagccttgcgctctggggtcagactgactgagtttggccccaagctccactgagttggcctgggacatattcctcacactctgagtctcttcgtctgtaatagaagggtgaagataactgcttctaccttgtagggtactgtgaggtttaaacaaggcattgcatgtacagcacttggcacagtgccctgtgctaatgtgggggttgttgtcattttttcatggacacccggtactgacatgtccagagccctgaggcctgcaggcaagacgccaaaggaagaaggtggagcagaaggacacttgctgagggtccactgtgtgccaggccttgtgcctatgtgcattacttcatttaatatgcaagactagggggaggtgattgaggtgcttacctggggtacaaagtttcagggggcaccaaaaatgcagtaatcaagagaaataatgtttcaatataatatttctgtaaaataaaaattgctgtaaaaatactgtgatgaacaaactatcaaaggatcaatagtattaatgtttccttttgtctcagtctctactctggctcagtgggagactgttaatgatcttgtctttatttttaaattgtaatattttatttatcatggatatttttgcattaattttgatgttttaaaaatattgcattaagatagtatttatcttgattactgagatttttggtagccccttaaatttcacatccaagatgagcactttgccttaccctggtccaggccctggcaggtctatggggcagatgtacgtagcggtcccaccttagaggagggcactaaatttcactgacgttaagtaatttggtccagtatgcacagctgatgagtgagggaggtgggatttgaactcaggtctgactctagagagctggctttttaatgactcttctcggctaccaccccttgactgggtataccctggaaaccagaaacttggagattttctaattttctggttcagccttctgagtctgcagatggagggagaggcaggcacgtgcccctagccacatggcgggcctgtctcctgactcctagtgttctttctggagggtgaccccagatgcattgaccttgtggtctggggtgtgcagtgagtcggtggctctcttcagaccgtgcctatgtgtgaagcatgctgctcctaagctttatcccaggtctatccgcctggctcctcatggctttgctgctggctttaggggtctcctgcaaggtcccaggcacacctcagtggactgagaatctgcagctgaggggctaggggaacagggtgtggtgctggggatgaccactagagggcaagctgagctcacgcttgcgggagcttctcacagctcggctggtggaagcgcctctgcagtgcaaggggcttgaagaagccggggatgctgggggctcccggtccccttcccaccgaaggctcttggaagaccagcctccatcttgtgcttgcattcctctgggggccttccgcaacatttctgattaaaactcccactccttggttctaatcctgctctttggcgccacacaaaatacacctgcttcttttcaacattcattcgtttgttcatttacttgacacatcgctgaggtgcctactgtgtgccagtctttgagcctcgtgctgtcggcccagagaggagccattctctttcctccacttaagacatctgcatccatgaccattcccaaatcttgacatgtgggaggcaggccaggcccagcacttggggaagaagggaggctgggatgctgggagccttggctctgtctgtctgttccaggctctgggctggctctcaggaagttcctgttctctctctttcagcgtatgactgtgacttctttaacaaaggtaagcccctcctccccacgcagagtctcaggggctcaggcactgccagccctgtcctgacgccacacagcatcagccatcccgaggcgctgctggccctggaagagccgtgacccggaatgggagggcccccatcatgcagagagagccctgacagtgaagggcccaggggtgtcctgcacctctatcctcagcagttcctgcagcccctgtccggggcccaggcaggccagctcccggggactgtgctcggcagggcagccccaccaggaaggaaaaaccccattctcacttatgtgccagctcctccgccttcataatctagctcatcaggcccacagaacatcaccttgggttccccgaagattagcttttggcaaaagcagacacaaactgccctttctgactatgggtggaacaaaacatgtggcctgccacattcatcttcaaactcagccaaggttgcagggttccgggagatgctctgacatttagattaacgagggtgaaaacacaggtcataaccaaagacccaggggaggttaatgtccagtttagagccaattcatcaatttaatcactgggattgggtgggtggggtagagaagggctgcccaggagtagtttttagcaccgaacttcatccagttgggccagggtcagaccttggtagagtgagatgctcatctggtcctcagtgctgttcgcctttgacttccaatccccgaccctcctccagggactgtgctgccaggagcaggcctatgtgggcagaggcccagactttttgtcctcagttgcctgcattatcagattttggcttgactgtggtgggtgaagtggaaaggagagactggagacaggataccatctgggggcctgcgagatgacggccggaccagggtgtagcatgagcatccgcaggactgcagttctgccaaaatgctagtccccaggggctcttgacagccccagaccttcaattggtaaaggaatgagcctgcaatgggggaactgtggtccctggggcagacaggatctgtctgacatcaggcaaggcatttcagcaagatggagctgtttcgttttctctcttccatggcattttgggtggcagtaactggcaaaggacaagctgtttctagcatcttccacctacccacccacccactcacccatccttgctccgttctactagcatttgctctggtccgggcccgccaggtgttgggaagtcagtggtccctgagtcctgccacagcggtgtgtggagcaggctcacgccgcctctctagcacctattgtgtttctaactccacattcagttggtagtttccagttgacccctggtgggagtgtttacgccatggaaatccagaagccctacaaaccacttttttttgtttgagatctcattgttagccatttgccagcacagccagcactgcttgtctcccatctagtgggggtgacagatgtgggcctcccatccagatcctcatccgaagagctgtaactggtgtgtgccatgctccaagagctggtggggcacagaggaggagggacaacatttgcatgtggcaggagagggtgcagggagagcttcacaaggaggtgacatttgagctgggccccagaggttgagtaggcgtttgtcaggcacaaaacggggaggactactctgagtgggtggaacggtgtgatgagatgtgagctgggaaataacaccactgctccttccaggaagagcaagagaagttcagcatggcaggagccagggcgtggggggagtgggggaggtgggcaggggctgagggctgaagggcttctgaattcaagctgggctctttagattctgtcctgagggccatggagagccactggtgcgtcccaccagggggcgtggctgggagggcagctcagcagccgtggggaggaggcattggggtggggggtgggcacagcagaggcaggaagatccttacaaggtgattgtccaggaagcccatgctctgtgccaacctatactgacaaccacaggaattctaaagactcaacagtgacacgtgtttgaaataattagataaacactaacaggtttattgtccctcaggcctggggtgggcagaaaccgggtctgacgtcttcttccagaggggaccttgaatagagcagtggctgtaatggtgaagtttcaggcagtgggaaggctgtggagagacaatggggggcccaggtgctccctgtgggtcgccttcttccttggctccctgtgaagtgactcaggcactgtgcagtgggtctgttcctttcaggggctggcagcctgggaatcctgtcccttccttctcagggtcatcaaggtccctgagatctgggatgaaggacaccatcaagagttcctccttggtagcttgccctcccaccccactgctgccaaggggtggggcaggaggtatgggaggtgggcaggccatggggccaggttgctgatggggcctcttctctccagtgctaggtaagggcccctatcagctatccagcttggcagccggtggtgctctggtgggcatgaaggcggtgggcgatgacatagtcctagtgaggacagaggatgtggcgccagcagacattgtgagcttcctgctgacagctgctctgtacaaggccaaggcccatggtaaggcccatcccagtcccactccagctcttctgggaggcaggagggtgctagaggaggggagggtgctgaggccctaagtatctgtagtggccggagaaataggggctccgacaagtgcccctctcccagttgagatggtgcttctgggtcagcttcttctcctctgcagagatgctctccatctgctcccctaaccgccagggcagccaaggcccaggtgtgcctctgtaccttgctgtatgcaatagctgtgttccagaaaagccaagtggcagctctccctcctcatgctcctcctcctccttcctctcttcctatctcaccctccctccctctctcccttcttccctcctctcttccctttctccctctacctctcttcttgcctcccaccctttcactgagccctaatcccatgccaagcacagagccaggtactgggaaatcagggatacaagagacaaggtccctgcccatcagaagcccacagtcccatcgaggagacagacgtgcccaaaggcggaacacgggggagggggcccccaactcagtcttagagtcaggagagccttgttaaaatagaggatgttcccctaagagtaagaaggagtcaggaagggaaacttctttcttacttagtaagctaagctcaggatttgggactttatcctgagggcaatggggagccatggaagggctttgtggaggggaagggacgtcctggctcctgcccagccccaggcacagccaacatccctagctataggtgatgttcacggtggtgtgagcctgggtgaggtaggtggtacctggcagaatcacgtagttgcacaaggaggcctgggagtgaggagtcaggcactgggccgcaggacagctagaagcaccacccccaaagacagcacttcctccctaaacatttctgatccccagatccatgcattcctgcctgacgaagggtgtctcaccaccttccagatgtggcaggccatctgcttagtgaggcttttctgttctccatccagtattttaatctagtaggtaatgtgtagtccagagggggtgttgcctttccactaggtttatgggcatgctaagcagaaccccggagtcacctggccttagagaacgtcactgggggcaggatgccagaggggctccagtccaggctccgtctcagagtcaggcctgggtctcatgggcccagtggggacccaagctcctccctctcccttcccatactgcttctcctgggctgtgcccagggtcctgggcagccaaggaaaggtgccttccaggtgggacctagggtggctgcatggaggaggtgtcccttgagttgggccttaaaggatgggaaagatggttatgcgaagaagtggagagcaggaaacatcacagaggggaggactcagcagtcactgaggcccaggcttcccgctctggggagtcaccaccacagcctgacacaggtcaccggggtgctagtgttacctgaagatttttgtggtggggaggttacttatttattaataatcatacgttgcccttctgtaggacttctcatgtgccggcactgttctaagcgcttcatgtatagcaactcatttaatcctcatgacaatcttaggaggtagggactattattttcccaatctacagatgagggaactgaggcccagagagattaagtgatttacccaagggtgcagtgcttgttagtgacaggcgccagccgtttggctccagagtctttcattcaaactcctctgccatgctgccttccaaaccgaggcattaaacaagaaatacagaggatggcaggcgaagtcactcgaatatttacagtacagccccggactctgcatctcaaggtctctgccctgttaggaggactgcagggaaaacagtggagaagccttgatccgggccaaccccgccttcttgaaggaggaagccaaggcccagggaggagaagtgacttgcctgaggtcacgcatccagtggagcgggctggggctgggactcagtgccctaccatgctgggctgcccatgcccacgcctgcatcccatgggtggggccagccatgtggtggtgaagatagctgggctctggtctcagcctgcctgcatccagccctgcctccctcatccgccgtcagtgtgactctgggcctctcttccctcctctgtaaaatgggaattgtaatatcaccaccttttaacctctcatagaaatttattctctctccaccccacagcccccaggatggtgagctccatgagggcaagaattttcatcattttgctccctattgtggcctcagtgcctagaacagggcctggcccacagcaggcactcagtaaatatttgctgctgaatgaagatatttttcacttcacagggttctcgtaggaatttcaaaacctgcaggtaaccagcttgcttagcacagtgcctggcacgtagcgagtcatgtgtaaacagcagctgtgattattaacatggatgaagccagtctctgttacctgccatcttctcgcagcttcccagggaggtgtgacagggacactatcgtccctcctggggacacaggggacacatggaaggggctgaagatgcacccacccagcaccaggctgtgccaggcgcttcacacacacctcgttgatgatccctccaacagcccaggcatgaatgcgcttgcccacatcacagccagggtggtgagctgggattcccgccccatgctcactccctgtgcctgcttgtggatttgggacttgaggagacccataaggccctgggcaggggaaactgcccaccaggcatcaagcccccatgccctagaactgggcagttatggagaccagagagagaggacagagacaagctttgggtctctgggcaagctcctttctctctctctctgggaccctctccctatctatgagttggatgaagggttgccaatgctggccctgtggaattctgtgaggagcaggaccaagctggggaccctatagcttggcaaatcaccaaccttcagcgtgccccacatgtctaatgcaatgcaaccccatcagggcagttgcctctattgtattcactgatggatcctgcgtatctagaatagtgcctggtacattgagggcactcaaacatgtttgcagaaggagggaagaatggaaagaggggtgcaaaggggagggaaggagatagttcaattaccttcccgaggcttagcagctggggggtctctaagcctccgctcgccctcaggcagagatggtgtgaggggcagctggcaggcagagtaggtgggctgggggctggtgtagggggcagggcctgctggtctgcaggcgtgctgccatccagagtcgctgagagagcagatgtgtgccaggatgctgttcccgcagccacctggacctctgcctgtactgactctccccatgtggttctctgcagacccagatgtggtgtccctggaggcagcagacagacccaacttcttccttcacgtcacagccaacgggtctctggagctggctaagtggcagggccgtgacaccttccaacagcatgcctccttcttgctgcaccgggggacacggcaggcaggcctggtggccctggagtccctggccaagcccagctccttcctctatgtgtcgggcgcggtgctggccctgcggctgtacgaacacacagaggtgttccgccggggcacactcttccgccttctgggtaggcgaccccctgccattgccctcggccctttggccctctcagtccactgctcttcccaccctgtccccacttcacccttccaattacccctaagaagcagaatcctccttctcctggcacaggggccacatgggtgccaccctgagatgagaggtggcccagcctccatgttgacagcttagggagccacggacagtgtgcttggggtccagccaatttcctgggtcctgccttctgccacaggccaattacactgtctaaaaatatagcagcctttgtggaagtgaggggaggtgtgatcctggctgcaacatgcgtagccgctggctcagttttcttgctgatgaggtcacatgtctgccccatgagttcaaagactgcacaagggggataggtctgggggccagcaacctcctctctcaatggaaggcccaagcccctggacagggatggggcaactccccgaccttccaccaacgccaaggggatccagggcctgccctgccaggtgtgtctgtccccaaaatattgttctctgcctaaaccctggagaaggcgatcataatttcttcactgttttctctgtcttgcatggggcttgggggtacctgtgtctgtgggtggatccatttgcatgtacacgtatgtaaatgtgtcttcagccagcctccttatttcatcacccaccccacccaagccagggctgggtgagctcattcttcccttcagcggtcagttatcgagtctgcccttaaacttgacatgggacagatttatcactggccatgatgacaagacttgctcatgatgggagtatttgtgtccctctccggaagacactagggcagagtggcatgagcccaggctttgaagctggacagccttgagttcaaatcctgaccctggtcctagacccttggaggagaaccctcatctccttgacttggtttcttcacctgtagaatggggatatttgtctcggaagtgtgctgtgaggactggctgtgtctcgcgggctttgccttgtgctggcacatagtaggtgctccccaaatgtaagttagacttttggaaaagcaggtttctttacagctggcagcagtgttcaggttagggcgtctggaggagctgccggtgggggatgctccctggagcctgcttcggagcctacccacacctccctgttcaggctgtgtgttcagaaactggtcacttgtgccaaggtagcctggggtctacttgtctgcctccaagccccccataggctgcagacttttccctcatttgccaaggtgctagccacagggcctcttttgagaacatctcctctgaaaacctttcactttctcagcatcatctgtgcctgggtttcctcttctctaaagtgggggtaataatagcgcctacttcctaggacgatgatgaggttgaatgagtaaatccgtgtgagatattttgggtagcgcccagtgctgtttaagagttagcccagccgccagggcagtgagggtggtgctcacacgacctgcactctcaggcccttcaggggccctctgggaacagagagggctgagtcgggggaataacacctcccttgcaagctctctggggctaggtgcccaggaacgctttgggctagaggggaagggatcccccagtgcctcccctcaccctgcaaaggagagcctcttgcctccatggaggtctgcaatagccctgctagagacaaggcaaggaggaggttactgtgtcctgggatgcagggcaagcctgagcaccagggtcccagaggggcagggtgggtggcagggcatcccaagggagagatcaggggtccaggcctcttcttcggtcacccttcgaaacctcactccaactgccggggccagagcttccctgtcctcagttcttccctgtcctcagtccttccctgtcctcagtcctgcattcagctcccagagccccgtccccaggatcccccaggcactcaccccaaccaccatgaacgcagtttctccttagtgtggttttttccccatttgctttccctgcatgggtccatttgtcccctccacaggatggggggcagggctgagctctgggactccctctgtgtcttcacctgacccagagttgctgccccatctcactttctagatgccaagccctcgggggctgcctaccccatctgcgagtggcgctacgatgcctgtgccagcccctgcttccaaacctgccgggacccacgggcagccagctgccgggacgtacccaggtgagatgccaggggctgtgggcatggagccaaggtgtgtgcactagtgtgtgtgtgcactcacatacacttgtgtatgagtgtttcatatgttgagtgtatggggatgtgtgtaccacggtaactgtgtctttccgtatatgcacatatgtcagcatatgtgactatctatttgtgcatgatgtgcatgcagcagagccttgcgtgtgtttgtgcgtgtactactacaactgtgcattcgttgtacacagctgcatgtatgcaggtgttgtgtgcagctgtgtgcatgtgtgagggtgtattcactgatttttgtgggagtctctgtggatgtgtttgcatgtatatgtaaaaattttggagtcctgcagggttggagggggtacatgaggccatgtgagaatgtgcccaggcagagacacatgtgaacatgtacatgagtgtgtgcagaagtgtaccttgctcgtgtgtgtgtttccctctcggtctgaggggtagaagtgtgcaggagtgtgccgcatacacattgggtgtgtgtgctcctgtacatgtgtgacagcatctctatggagggtcatgtgtgtgtacacgtaataagcacatgtgtgcacgcacatgtgtcataagaaaggataaggcctgtgctcaatcgagagaaaaagagatggccctgcctgtatttcaggcctttaaactgctccctgctctgtcctcagggtagaaggctgtgtccctgtgtgccccaccccccaggtcctggatgaagtcacacagagatgtgtctacttggaggactgtaagtggcccagacttctcatccttccctcagatttcctctaagtccctagggtctcactgagcagtcatgcctcaaagctcccaggtcccagagaagcaagatcagcacagggacctttggaaagaggcacaggcacaggggatgcagaggcctcatccggtctattcgccccatttcacagagaggagaaatgaggcccagagtggggtcacatggtgagaaggtggtgcagccagacttagacctgaggtctcttggttctggggtcagggtctgacgtctggggcggagtccagacctgctgacatctggccgttagaagctgccctcaccccatcaccgagagtgccagtcctcaagcctcacaccacagccctgcccagcaatgacccccggggcagcagtcaccccgccttctgaacctcttcttttgtctccgcaggtgtggagccagcagtttgggttcccacagaggcccttggcaatgagaccctccctcccagtcaagggttgcccactcccagtgatgaggagccacagctgtcacaggaaagccccaggacccccacccacaggccagccctcaccccagctgccccactcaccacagccctgaacccaccagtgacagccactgaggagccagtggtgtctccaggccccacccagaccaccctgcagcagccactggagctcactgcatctcaactccccgccggccccacggagtccccagccagcaagggagtgactgccagcctcctggccatcccccatacaccagagtcctcatccctccctgttgcactgcagacacccacacctggcatggtgtcaggtgccatggagacaacaagggtgactgtgatctttgcaggaagccctaacatcacagtctcctcccggtcgccccctgcccctcgcttcccgctcatgaccaaggctgtgacagtccgaggccatggctccttgcctgttaggacgacacccccacagccctccttgacagcaagtccctcctccagacctgtggcttcccctggagccatctccaggtcccccacctcctcgggatcccacaaggctgtgctgacacctgcagtaactaaggtcataagcaggacaggggtcccccagcccacccaggcccagagtgcttcaagtcccagcacccctctaactgtggctggaacagcagcagaacaggttcctgtcagtccccttgcaaccaggagcttggagatagtgctatccacagagaagggcgaagccgggcacagccagcccatgggctcgcctgcctccccacagccacacccactcccctctgcaccaccccgcccagcccagcataccaccatggccaccaggtctccagctctgcccccagagaccccagctgccgccagcctgtcaacagccactgatgggctggcagccacacccttcatgtcccttgagtcaactcgtccctcccagctcctctctggcctgcctcccgacaccagcctgcccctggccaaggtgggcacatctgccccagtggccacacccggccccaaagcctctgtcatcaccactccactccagccacaggccacgactctgcctgctcagacacttagcccagtactgcctttcactccagcagcaatgacccaggcgcacccacccactcacatagcacccccagcagcaggcacagctccaggcctgctgctgggagccacattgccaacctctggagtcctgcctgtggctgagggcacggcctccatggtatctgttgtcccacgaaagagcaccacagggaaggtggccatcctatccaagcaagtgtctctgcccacttccatgtatggttctgcagagggtgggcccacagagctcacgcctgctacgagccaccctctcacgcccttggtggctgagcccgagggagcccaggcaggcacagctctgccagtgcccacatcctatgccctgagccgtgtctcagccaggacggccccccaagacagcatgctggttctgttgcctcagctggctgaggcccatggaacctcggcagggcctcacctggcagcagagccggtggacgaggccaccacagaaccatctgggcgctcagccccagccctgagcatcgtagagggtttggcggaggctttggcaactaccactgaggccaatacatccaccacctgtgttgtgagtgatttgccagggttctggccacccgtatgtgacccttcccttcatcccttcctcttccctgctagatggagttttagtcgctatcctcatacctgccccatgctcctggtccctgaaaaattcttcagtctcctattggcccctgatgccatagcagggttccgcctggcccatctaggccctggggggctgattggatggcctagtgtgatgcccaggtgacaatgtgtgtgtgctagtgtgtgcctgtgtgagactgctgtgtgtgtttgtgttcacatgtgtgagaaaatatgagcgctcctgtatctgcatgtgctcttgtgtgtgtgaggaatggtgtttgagacatcctcatgtgcatctttgtgcctttgtgagaaactgtgtgtgtgtgtgtgtgtgtttgtgtgtataggcttgtgcaagtatgctagggtttctgtgagtgtgagctagtgtgtatacatgcctgtgtacccagacctctcagcgcaggccaggcagatctgcagaggtctcagggaataggtccctgacccccgagctcacactaagtgcatcgccaggccccacatggcttgtggtgggtagggggtgagggcctctttccctagaaggtcccctgccccgctaggacctacatgtgggaaggatctggtgccatcacagcttgcagggtgggctgtagctccttgatggtcactcacacttcctccactctgtacccagccaatcgccgagcaggactgcgtccgccacatctgcctggagggccagctgattcgcgtgaatcagtcccagcactgtccccagggtgctgctccccctcgctgtgggatcctgggcctcgccgtgcgggtgggtggggaccgctgctgcccactctgggagtgtgcctgtgagtcatgggatcagcggagcctcctgcatcctccctgtatccttaccccagcatgaccgccatccctgatctgtgtgtcccagactcccctcctgtgggaccccgacctggcagatttcctacgcttgtgacctctgatctgtgtgatgcgtggtctgagccaccctccagaccccaggcctctgcatccatccaggaaaagggccaggaacctgccccatcttcctaggcggccttggtcttggaggcatccacctattcttcttgtgccctgcccctcccccaggccggtgctcaatcttccctgacctgagcttcgtgaccttcgatgggagccacgtagctctgttcaaggaggccatctacatcctcagccagagcccagatgaaatgctcaccgtccatgtactggactgcaaaagtgccaacctggtgcctgccccatacctccctccctgctggggactaggaatgggactaggataagaggggagacggagcagtgagccagggtaccagaggcaaagacagatgtggaagcccccctgagctccctctgtctccaggaatgggcagggcctcccaggtgatggctcccttggaggctggggaaagaattgagtggagtgtgccacctcctggccccagcctgtcccattcccagcttgtgccagcttcctgccatgtaggagggatggcacagtagtgcagaggagctgggatgccactgcaatggtgtggcccgaggtcatgggtgctggctgcagggaatctcctactaggatgtccccataagtcaggtggaaagaggtagcttctttctcttctcttctcccttttctttctttctttctttctttcttttctttctttctttctttctttctttctttctttctttctttctttctttctttctttctttctttctttctctctctgtctgtctttctccttctttcttctctcttctttccctccctctctgccctgcccttccttccttccttccttccttccttccttccttccttccttccctccttccttccttccttccttcctttttttctgttttggtctgggcttgcatgaggtcagatggagccgcaacagttccatgcaatcctgggcaccatcagcccagcctgatgggagcccctggcatagtgcagggggtagtcaggggagactgtactcacatttgctgtgcccactcacttggagggggacagaggacagggctccaagttgatgagggctgggttctctctgcaggggcacctgaactggcccccgttctgtctggtgatgttgaacatgactcacttggcccatcaggtcactattgatcgcttcaaccgaaaggtgagtgcatcaaacagccagcctccagggcagggccacagtcagctgagggacagggcatccaggggtggaggggctgtgaggctgaatcatgattcagggcaggggtggggaggggacctttttttagaaaataatgcaaaattaggtatatttggaagtgattataattagaatgcttgtggccacaccaatgtcaggggaggaagtataccaggaggaatgggatattgttgtgacagagaaaaagtcggaaaggcaaagagacagtgggtttaaatatttatggctaaaatatctcacttttgcaattttcacaaaaacctatgaccacatgaacacattactaccaggacccctaccaggaagtgaggagccgtgaatttaagcttcactggcttcactaagttcacctctgtcaaggaggccggggtatccaacaacagcccacccccatatgggcatcctctccagagggcccacctttgctcctcccaacaggtgggcaaagggtactgatctgtctcctcctcaggtcccaaagttgtgagtctgcccccaattcctgagccttgatctgcagccttccttttggaatctgcccttgaacacagggtgcggcacatttgtggtgctcttaggagcggggtttcggacagtaggtttcctatgggatggaggcttgaacagaaaactccctgagtttcgtttcttagtttataaaatttttccattaaaaaattaacatataatctacatgcagtaaaatttaccgtatttagtatacaattctacaagttgcaacaagcacccacagtcatgtaactaccacctccaaccaggatatagaacagttttaccatcccaaacactacctcctgcctcttcattgtcaacccctcccccctcctgctgacaaccattgcccgctgcccctatagttatgccttttccagaatgtcatataaattgaccagagtatatggtgacattcatccacattgttgcacagatcagtagttcaatcctttttattgatgaatagtattccattgtatgtatgtaccatagtttatttatccattaaccagttgaaagatatttgagttgtttccagtttggtacaataacaaataaagtggctataaacagttacatacaggttttgtgtagataaagcccccaggagtagattcccgtgttgaacaggaaggatgtatttagctttacaatacttgccaaactgtattccagagcaggcatttagcattcccaccagcaatggatgagagctccaggagctttgcatccttgccagcacttggtggcacgtgtttgtttgtttgtttagtcattctaataagtgtcaaatagaacctcattttggttttaatttgcgtttttctgcttactgatgatgttgagcatctttccatgggtttattttccatggtatatgctctttggcaaagtatctgttcaagtcttttgcacattttaaagatcatgttgttctattgagttttgagaacttttcctgtgtattttggacacaagccttttatcacatataaatctaattttccagtctgtagagtgtttttccattcacctactagtgtctttcgaaagacagaagtttttttattttgatggtgtccagtttatcagttttttcttttatgaatcatgatactggtgttgtacttgatgaaccttgcccaaagtcacacagaatctctcttatgttttcttctagaagttttatagttttaggtattacttttatgtgtatgttgcattttaggttaatttttgtaaatggtacaaagtatgagttgaggtacatttttcaaatgtgaatactcaatttttccagcaccatttttcgaagagactattctgtctccattgaattgtctttgaacctttatttaaaaaccaactggccaggcacagtggctcatgcctgtaatctcagcagtttgggaggccgaggtgggcggatctcaaggtcaggagtttgagaccagcctgaccaacatggagaaaccccttctctactaaaaatacaaaataagctgggcgtggtggcacgcacctataatcccagctactcgggaggctgaggcaggaaaatcacttgaacctgggaggcggaggttgcggtgagctgagattgcaccattgcactccagcctgggcaacaagagtgaaactgtctcaaaaaaaaaaattaatgtttgggataatttatatgctttttattttgtcctattaatctatcctttcactgatgctacagtgtcttgattaccattacttattattaaaccttaaaattaggtggtattgttttgtctgttcttttttttagagacagggtctttccctatcatctagactagagtgtggtggtgcaatgatagcttactgcagcctcgatctcctgggctcagcaatccccccacctcagcctcccaagtagaggacaacaagtgtatgccaccatgcctagctaattttttaattttgtatagagatggggtctcactatgttgcccaggctggtctcaaactcctggcctcaagagatcctcttgcctcagcctcccaaagtgctagaattacaggcgtgagccaccgtgcctggcctagctattctaattcctttaacttttcatagaaatttagaatcagctttttgatttctaccaaatgtcttcctggaattttgagttgcattcaatatatagattatttgggagaagaataaatcttaacactggtgagtcttccagtgcatgaacatggttcatctctatttttttatggcttctttgatttttttatttgtgttttgtagtttttagtgtaaggatcctatacatatttgataggcttattcctaagtagtttatattttttggtgctattgtaagtaattgtgttgtttttgtttcactttccaattgcttattactaatgcaaatacagcttatttttgcatattgagcttgtatcttgcaacgttactaagctcagttattagttcttaaattctttgggtttttctacatagacaattatgtcttctccaaacagagacagttttatttcttcctttccaatgagtatgcttttaatttattttctctcacctattgcactggctaggacctctagtgtgatgctgaataagaaaggttgagagcaatcatccttgtctgatcttagggagaaggcattcagtctttcactgtaaggcatgatgttagttgtaggcttttcacagatgtcctttatcaggttaagaacattttcttttattcctagttttctgagagattttattaccaggagtagatgttgaattttgtcaaatgcttttttctgcacctatttggataatcacattgtttttctttttcacattattaatttgatgaattacattgatttttgtgtgttaacccagtcttgccttcctggaatttacttcatttgttatattatcctttttatatattgttgtatccttatgataggtattagtctaaattttcttttcttgtaatatgatagtttactattggtagcagagtaatgctggcctcacataatgagttggaaagtattctcccctttttaattttctggaaaattatatgtagacttggtaatatttattccttaaacatttggtagaattcaacagtgaagccatctgagcctggatttttctctggggagattttaaaacacacgttcaatttctttagtaggtgtagagctattttgtttatatatttcttctttggtaaatttgggtagtttgcatctttcatagaatttgtccatttcatccaagttgttaaatttataaacattaagttgttcatcatatattcttgctatacttttaatttctgtaggatctgaatctatgtgccatatctaattcctgacattagttatttgtgtcttctctcttttccctgactagcctggctagaggcttatcaaacttactgtccttctcaaagaatggctttattggttttctctattatttttatattttctatttcattgatttctgctatctttattattttctttcttctgcttactttaggtttaatttactcttctttttctagtttgttaaggaagaagcctatgtcattaatttgagaactttcttcttcttctatttttttttttttgagacagagtctcactctgtcgcccaggctggagtgtagtggtgtgatttcggctcactgcaagctctgcctccctggttcacaccattctcctgcctcagccacccgagtagctgggactacaggcaccagccaattttttttgtatttttagtagagacggggtttcaccgtgttagccaggatggtcgcgatctcctgatctcgtgatccacccgccttggcctcccaaagtgctgggattacaggcgtgagccaccatgcctggcctctttttctaatataagcatttagtgctacaattttccctgtacgtattgatttaactgcatcctacaagttttgatatgctatgttttctttttcaatcagttcaaaatacttttaaatatcccttttgatttttatttgacccatgaattaagggttttgtttaatcttcaaatattttatgattttccagatgcctttctgttacagatttctaatttaatttcattgtgttcataagacataatttgtctaacttgaattcttttacatttagtaagatttattttatgtccgagaatatgctctaagtaagtgtgtattttattattgggtggagtgttctatgaatgttaattaggtcaaattggctgatagtgttgttcaagccttctaaattcttactaattttctatctgtttattctcagttactgagagaatgttgaaatatctgactgtaattgtttatttgtctatttctctttggagttttatcagtttttttattcacatatattgaaattctgttatttaggtgcataacatgcaggattgttatgtccttttgatgaattaactcttttattcttaggaaatggccattttatcctggtaaaactctttgttctgaattccactttgtctgacttgcctgtaataacttctccagctttgttttgattggttttagcgtgtatacctaatatgtatatctaagatgtatcttttttaatccttttactttaacctgtttgtggctttttatttaaagtgggatttttggccggcatgtaggctcatgcctgtaatttcactttgggaggttgaagcaggtggactgcttgagcccaggagttcgagaccagcctgggcaatatggcaaaacacaatccctactaaaaatatatatattaaaaaattagccaagcatggtggcacatgcctgtagttccagctatgcaggaggctgaggtgggagaatcacctgggcccaggaagttgaggctgcagtgagccgtgattgcacgactgcactccagcctgggtgacaggagtgaggccctgtctcaacaaacaaacaaacaaataaaagtgggacttttgcagggggtaaatagttgagccttcagtttttaaagatccaatctgacaatctcttccttttaattggggatgtttataccatttatgtttaatttggtcctcaacatagtgatgtttatatattgttgctatttattttctatttgtgacatctgttctttgttccctccttcctttttttgccttctttggattgtttttaatgactccatttcatctccaatgttggattattgtctgtactttttttttctccttcagtggttgctttagatattacagtatgtaattttactttgtcacagactagctacaaataatattatattgcatcatatataccataagaactttataacagtatactgctatttcctttcaccaagcctttgtgttattgtcataaaatttacttctataattattataaactccacagtaaattgttattatttttccttaagcagttatcttctaaagagatttttaaaacaaggaaagtttatatttaaccacatatttaccattttgtgctttttattcctttgtgtaaatctagatttgcatctggtatcatttttcttctgctcgaaagacttcctttaacacttatgtagtacagatctactggtgataaattctttcagcttttgtttgtcagaaaaagtcttggtctttccttcatttttaagagatactttcactgggtatagaattataggctgatatttttttctttcagtactttataagacgttgctcctgtcttttttttattgaggagaaattgacaaaacataaaattaagcattttaaagtgaacaattcaatggcatttagtacattcacaatattgtgcaaccattgcctctgtatagctccaaaacattttcatcaccccaaaaggcaaccccatacccattaagcagtttcttcatagtcacctctccccacagcccctgccaactaccaatctgcctgttgcctctggatttacctattctgaatatttcatataagtggagtcagacaatatctgaccttttgtgtctggcttcttttactgagctccatgttttgggggttcatccacattgaagcatgtatcaatgcttcatttatttttatggctggaataatattccattgtatgtatataccacagtttgtttatccattcattattgatgggcatttaagctatttccatatttttggctattttgaatagtgctgttatgaagttccactatcttttatcttgcttatttctggtaagaaatctgctgtcattctttgttccttcatacataatgtagtttttttctacccctttttgctgcttttatgattttccttctatagttgtttttaagcaatttggttatgataggcctggtaattcatttctcttttggggacttcaattacatgtgttttaggatacttgaagtggacccacagatcacttatgctctctgctcatcattctcttgggtcttttttaattctgtgcttcatttcagatagtatttattgctctaagttcattaatcttttcatttatagtgtctaaacatattaattccattcagtggttttcatctcagacatgatatttttcatctgcacaagtttgatttgggtctttttatatcatgaacatctcaccttcttctgttttcctctatttcttgagcacatatagttaaaacaattttaaaaataattgtttgtatttccttgtctaccgtgtgtgtcatttctcagtcagttctgattgattttttctttcattataggttgtattttcctgcttctttgcatgcctgacaatgtttttaaattgaattccagacattgtgagttttgccttgttggatgctggatattctttcattttatttttgaaaatattcttgagctttgtagtagttatgctacttggaaacagtttgatccttctgaggcttgcctttaagctttgttaggtaaagccaaagtagcctttattctgagtgtgattttattctttatcctacataccaattccctgctactaaagcaacacccttctgcataccctaccctatactctacatattaggaggtttttctactattctcagccctgtgctagctctgtggatttttctgtctgtttctctcaggtggttctttccctagtctcaggtagttttctcacctgcatacattgatcaatattcagctgaaaattcaggacagggtcaggacagggttggagggggattctgcaaagcttcagagctctctctctctctctctctgtctgccatgcaaactctagctaccttggcctttgtgaatgtctatctcttgtcttctaaactctaggaaaccaccaggctctacctgggttcctgctccctgcactgcagcccctaaactctctaagtaataaccttggacaatcataaggcttgcctcatttgtttccattttttgttttcagggatcactctcctgcattgccaactgttcacgttggaaaactgttgttttatatattttgtcagtttgtttgatcatttaaggcaagagggtaaatccagttcctattactccaccttggttagaaatggaattctaagtccttcgtttttaaccttttattctttgtccttgcatggagtcctatgaatgcaggcgaggctcctctctgggcttcaggtatgtatgtttactcccagaactcagagactgctcatggatcatgaagcccaatcctctgtctgtacaaataggaaggctcaggctaggagagccaggggctttcctagggtcacaaagttttctttgtgactcctgggctgaggctccctctacataatagttcatgtgctgcataatttgctgcataaaacagtctaatccttttttaatttttaatttttatgggtagatagtaggtatatatatttgtggggtacataagagattttgacacaggcattcaatgtgtaataatcacatcacgtaaaatgggatatccctcccctcaaacatttatcctttgtgttacgaacaatctaattatatactcatttatttatctttaaatgtataattaaattactattgactgtagtcaccctgttgtgctatcaaacactaagtcttactcattctttttaatttttctttttactcattaatcattcccatctcttcctcaacccctccactacccttcccctgtgtccgtgagttcaattgtcttggtttttagatcccacacttgagtgagaacatgttaggtttgtctttctgtgcctgcttatttcatttaacataatgacctccattttcacccatgtttttgtaaatgacagaatctcatattattgtggctgaatagtactccattgtgtataagtaccacattttctttatccattcatctgctgatggacatttacattgcttccaaatcttagctatcgtgaacagtgctgcaacaaacatgggagtgcagatatcacttcgatatacggatttcctttcttttgggtgtatacccagattgctggatcatatggtagctctatttttagtgttttgaggaacctccaaactgttctccatagtggagaactaatttacattcccaccaaaagtgtgagggttcccttttctccacatcctcaccagcatttgttatttcctgtcttttggataaaagccattttaagtggagcgagatgatttctcattatagttttgatttgcatttctctgatgatccatgtaagaacattttcatatgcctgtttgccatttggatgtcttattttttattttattttataacttttaagttcaggggtacatgtgcaggtttcttatatagataaactcatatcgcaggagtttgttgtacagattattttgtcacccaggtattaagcctagtactcattagttattttttgatattctctttcctcccacctgacaccctccagtacaccccagtatctgttgttcccctctacctgtccatgtgctctcatcatttagctcccacttatcagtgagaacatgcagtatttggttttctgtttttgcattagtttgctaaggataatggcctccatctccatccatgtttctgcagaggacatgatctcattcttttttatggctgcatagtattccatggtgtgtatatactacattttctttatccagtctaccattgatggacatttaggttgattccatgtctttgctattgtgagtagtgctaccatgaatatatgtgtgcaggtgtgtttatgatagaataatttatattcctctgggtatatacccagtaatgggattgctgggtcaaatggtagttgtgtttttaggtctttgaggaatcatcacactgttttccacaatggttgaactaatttatactctcaccaacaatgtgtaagtgttcctttttctctacaaccttgctagcacctgttattttttggctttttagtaatagccattctgactggtgtgagatggtatctcattgctgttttgatttgcatttttctaatgatcagtgatgttgagcttttttcatatgcttattggctgaatgtatgtcttctcttgagaagtgtctgttcatgtcctttgcccagtttttaatggggtagtttgtttgttgttgttttcttataaatttgtttaagttccttatagatactggatgtaagatctttgtcagatgtatagtttgcaaaaatttttcccattctgtaggttatctgtttactctgttgatagtttcttttgctgtgtagaagctctttagtttaattagatcccatttgtcaatttttgcttttgttgcaatttcttttggtatcattgccatgaaatctttgccgtttctgtgtccagaatggtattgcctaggttatcttccatgatttttatagttttggctcttacatttaagtctttaatctatcttaagttaatatttgtatatggcgtaaggaaggggtcccatttcaatcttctgcatatggctagccatttatcccagtagcatctattgaatagagagtactttacctattgcttgtttttggtgactttgtagaagatcagacagctgtaggtgtctggccttatttctgggctctgtattctgttccattggtctatgtgcctgttcttgtaccagtactatgctgttttagttactgtagccgtgaagtatagtttgaagttgagtagcatgatgcctccagctttgttctttttgcttaggattgccttggctattcgggctcatttttggttccatatgaattttaaaatagtttttttttctagttctgtgaagaatgtcattggtagtttgataggaagagcattgaatctatcaattgctttgggcagtatggccattttaacaatattgattctccctatcaatgagcatggacagtttttccatttgtttgtgtcatctgtgatttatttgagcagtgttttgtagttctccttgtaaagatctttcacctccctggttagctgtattcctaggtattggattcttttcgtggcaattgtgaataagattgccttcctgatttggctctcggcttagctattgttggtatataggaatactagtgatttctatacattgattttgtatcttgagactttgctgaagttgtttatcagctgaaggagcttttgggttggaactatggggttttctagatataggatcatgttgtctgcaaacagggatagtttgacttcctctctccctatttggaggtcctttatttctttctcttgcctgattgctctggccaggacttccaatactatgttgaataggagtggtgagagcgggcatccttgtcttgtgccagttttcaagtggaatgcttccaggttttgtccattcagtgttgttggctgtgggtttgtcatagacggctcttattattttgaggtatgttcctttaacacgtagtttattgagagttttaaatatgaagcggtgttgagttttaccaaaagccttttctgcacctattgagataattcttggtttttgtctttagttctgtttatgtgatgaatcatatttactgatttgtatatgttgaaccaacattgcctcccagagataaagcctacttgatcgtggtgaataagctttttgatatgccactggatccagtttgccaatattttattgaggatttttgcatcactgttcatgtcttcttttgagaaatgtctatttcaaattttttgtgcatttttaaatcagattattagatttttttcctatagagttgtttgaggtccttatatattctaattattaatccctcatcagatgtatggtttgcaaatattttctcccattctatgggttgtctcttcactttgtcgattgtttcctttgctgtgcagaagctttttaacttgatgtgatcccatttgtccattttgctttggttgcctgtgcttttggggtattattcaagaaatttttgcccaaaccaatgtcctggagagtttccccagtgctttcttgtagtggttttatagtttgaggtcttagatttaagtctttaatccattttgatttgattctcatatatggtgagagataggggtctagttttattcttctgcatacagatatccagtttccccagcaccacttattgaaaagactgtcttttccccaatgtatgttcttggcacttttgtcgaaaatgagttcactgaaggtgtatgaatttgtttctgggttctctattctgttccattagtctatatgtctgtttctttgtttgtttgtttttgtttttcagacagagtctcactctgtcgcccaggctggagtgcagtggcacgatcttggctcactgctacctctgtctcccaggttcaagtgattctcctgcctcagcttgccaagtagctggggttacaggtgtacaccatcacacctggctaatttttgtgttttcagaagagacagggtttcaccatgttggccaggctggtctcaaactcctgacctcaggtgatctgcccaccttggcctcctaaagtgctgggattacaggcatgagccactgcacccagcctatatgcctatttttacgccagtaccatgctgctttggttactataactctgtagtataatttgaagtcaggtaatgtaattcttctagttttgtcctttttgctcagaatagctttggctattctgggtcttttataattccatgtatattttagggttgttttttctatttctgtgaagaatgtcattaatattttgatagggattacattgaatctgtaggtttctttgggtaatatgtacattttaacaacattgattcttctaatccatgagcatgggctatctttccatttgtgtcttgttcaatttctttcagcagtgttttatcattttcatcataaagctctttcacttctttggttaagttaattcttagataatttaattttacttgtggctattgtaaatgggattactttttaaatttatttttcagattgttcactgttggcatatagaaatgctactgatttttctatgttgattttgtaatctgcaactttactgaattttaaaatcagttctagtagttttttggtggaatctttagtttttttccaaatataagattatatcgtctgcaaacaggataatttaacttcttccattccaatttcaatgcccttcatttctttctcttgtctgattgctctaggtaggacttctaatactatgttggataacagtggtgaaagtgggcatccttgtcatgttccatatcttagaggaaaggcttttcattttcccccattcaatatgatactagctgtggttctgtcatatatggcttctattactttgaggtatgttccttttatactcatttttttttaggatttttattgtgaagggatgttgaattttattgaatgcattttcagcatcatttgaaatgatcatatggtttttttgtcctttattctgttgatatgatgtatcactttgatttgcgtatgttgaatcccacttggtcacaattaatgatctttttgatgtattgttgaattcatcttgctagtatttttttgaggatttttgcatcaatatttttcagaaataacaacttgcagtctttttttgatatgtcctggtctggtttttgtatcagagtaacactggcctcatagaatgagtttggaagtattccctccttctctaatagtgtgagtaggattggtattaactcttcttcaaatgtttggtagaagtcagcagtgaagccatcggatcccaggcttttccttactgggagactttttattacagcttcttctcattacttgttattagtgttttcagattttttatttctttgtggttcaatcttgaggttgtatgtgtctaggaatttatccatttcctctagattttctcttctactggcatatagcttctcatagtagctgctaatgatcctttgaatttctgcagtatcagttgtgatgcctcttttttcatctctgattttattagagtcttctttcttttttcttagttaggctaaaggtttgtcaattttgtttatcttttcaaacaaacttttagtttcattgatcttttgtatttttttatttcaaatttatttctgttctgatctttattatttcttttcttctactaattttggattcgatttgctcttgcttttttagttctttaagatacattgttaggttacatatttgaagtttttcttcttttttgatataggcactgatagctataaatttcccccttagtgctgcttttgctgtatcctgtaggttttggtatgttgtgtttccattatcatttgtttcaagaaaagtttcagtttttttcataatttttttattgacccacttgacattcaggagcatataaaacagtctaatcttgaagggaggaggttaattcattataaatactttaaaatcttaatctttttatattccatttttttcagtgtaaaactattgtaataacccatggtacatccaaatttaaccttgttaatacgtagaagaggttgtagccttgaatttaaagtgtttgtgagaattagagtgtgttgcatatttaacaaatattgattgagcccctatttatgttaggctcaaaggcaggtgttggggattcaaaggtaaatcaggcatagtatctgcccttaagaaactcagttcactggatatcttgatgtggaaacagatacttaatggccagcacagagatgaggaaagcccagagcaggggtatgtagccccaaggctgggaatttagggagactctcccagaagaaatgatctgaacagaatcaggaaagactcccagaagaagtgatctgaacagaatcaggaaagaagagagtgattggaagggctcaggatttgtgtttatttgggcattaagatgcagcttgcctcctgttgttgcatttcttgtttcattgtatttttccaataaagatattttcagaaacctcacatgccactttcgacggtgatttggctgcatgtgcctgaaacagagcctggcacatagcagatgcctaataaatgtttgtcagatgatgggtggatggatggatggatgaatggatggacggacagatggatggatggatggatgaatgaatggatggacaagctgtgctcacactgaattccctcccaaggtgactgtggacttgcagcctgtgtggccaccggtgagcaggtatggattcagaattgaggacacaggccacatgtacatgatcctgactccctcagacatccagatccagtggctccacagctcaggactcatgatcgtggaggccagcaaaaccagcaaggcccagggccatggcctgtgcggtgaggtggaacccagcttgcggggaggggatgcttcccaggtccacctctgcccccacacataattcctcctggagcaggaaaggctgggacagaataccaggccagaggttggagcagcagagctgtcagggcagggaggcctaacgtcttgtgtcctggggccaaagctgccagtagggagatagtagagggctctggactcagccagttgtcacttcagccgggattgtctgtcagcttccctgacagccttctaatgtcggataatcctttccatctgcatgagcctgggcatttcacaaagtacttccacagtctatctcacttattcctggtcatccacacaacagcactgagagatggccattagtatccccactgaactaaagaagaaagggggctcagagagattaaggggcttacccaagggcacacagcagagctgccacaatacacagaactaatgctcttcagaccatagcacaattgcagagcatgccctaaaagattgaatgtattctcataaggaaaagagatatgggacaagcctggatgtgggccgctgctcattgccggggcataagcacatggacactcatggggcactccgtgacagactaccatgattgtgacgatgggtgagataaaaacacttacacacacacacacacatacacacacacaccctccatcctccacctgcaccccggtgatcattcacacattcccattcatgcccctctgcatccaaattccctctacacatgcactaacacatgcagttcagctccatgctcattttttcctttgtgcaacacatattgccatgtaccagtcgctggggacaaaacagtgaacaaaacagacaaaatccctgttttatggtgcttccattcttaaacacttcttacacacatgccaccatccccaccaccaccaacaccatcaccatcaccatcactaccaccatctttttctcatcatttcttccttctcctctgttcattgccagcaaagagcactgtggtcagcagtagcctggtgagccaacccctccctaggatacctttgggacacccctcactgacttaaagccaagacccaaagtgtgaccatgggaaccattaataatatattaataagagtttgcctttaatcatgctttatattcacagaatcatggttagaggtgttagaacagaagtcagatcatttatatctccattttatttgaatgaacatttgacagctgggcaccctgctagacaaacttaggggagtgctgagataattgagaatctaaaagaaaatgagtctttgcactcagagagctacaatcttttgtgaaaggctgacctgcaagccaatgactgttacacagactttggaatgtcatggatagtgcatctgaggcgtccttgaaggaaggacatctgagaaagtatttcaggcagaggaagcagcttgagcaaagttgtgggcaggaaagtgtgtgtctggagcatatagatggtatgtgggagatgaaaccagaagtttaggtcacattaaaagctaggacagataaacttcacccttgcccccatctcagtgccttaacacaacagaagcttatttcctgcatacataagttcccaaatggatagcaatgattcagagacccagagtccttccatcttctggttctgccatgtcaacatgagtttccaaattcacaggagaggagacaggtgggaagtttttatgaactaggcctggaggtggtactcgtcaccttcactcatatgccattggctgggactcaatcggatgatctcacccagctgcaagggcatctgggaaaaatacactgactgcccaggaaaaagaaggaacagttgttataatcagctagcaatcactggtaaagcagacttttggggggtagctttttattttggtgtaatatagcaaagcttataaaaatttagaacttgcaaagacagtataaagtagtgtacaccttttacccagatttgccccatttgcttctctccttctctctctctctctctctctctgtgtgtgtgtgggggggggtatacatttttatatgcacatgcaatacatatatatatatatgcatttttcggaaccattagaaaataacttcaagacattgtatccttttacccctaaatacatgtgtatttcctaagtacaaagacattttcttttgtagcaggtttcctagcttcccttcacctaatttccctcacctataaaatggggataatggtattattgacctcaaagaactgtgaggaatacaaaaagtgagagctgacgacatgggagtggtagtgatgatcgtggctgttgggattgtttggcccctttcaggtatctgtgatggagatgcagccaatgaccttaccctgaaggatggctcagtggtgggtggggctgaggaccctgctccctttctggacagctggcaggtgcccagctccctgacctcagtgggccagacccgcttccgcccagacagctgcgccacaactgactgctcgccctgccttcgcatggtgtccaaccgcaccttcagtgcctgccaccgctttgtatgtgccaactgggtccagcactggggacacctcctgggctggctggggatggcagcacctacctgcagaggctcattgttccttttgggcagggaggggaggagctgggcactgggatatgtgccatccgagtaaccagcactgcctgatgcatatgtccaggtgcctccggagtcattctgtgagctgtggatccgggacaccaagtacgtgcagcagccctgcgtggccctgactgtgtacgtggccatgtgccacaaatttcatgtgtgcatcgagtggcggcgctctgactactgccgtgagtttgcggggcagggggaccctccattgtgactattgttcccatcccctgttaaagtgggaaaaggctcccggccccaagttcatgtatgctttcccagctttaatcattcatggatttatgtacattagtaaatttataaatatttcatatgtttaatttatatttaatttttatattatataaaagtacattttatactaatgaacacatttattatgattcatatgaacatattaacacatagtaattgtattgttattttagtatttgctttctttgcgtctcttctctgtaagtggagactgtaaccatcgcccccgcccagggtggttttgaggatgtgggggaatgtgttccgagtgctcacatagacctgccccacggacaccgtccagcacaccttaattccctctgcttcctttttgctcacgtttctcttcttccagagtttcccttccttcctgcaggaaggaaatgagatctgcctcctcctcccccaattaggtttgactggtagggtcgacaggggtggcctgggctagggtagcttgatttataaatgtgaacctgtccagaaaggctgggattggctcacaggaagtccacacccacaatatgacaagtaaaagaggaaaagacaaaagtcctcttgggtcgtgttcttcaaactgtggatcccaactcagcgggtatgaaatcaatttagggggtcagcaccagcattttaaaaaatacaatagaatagaaaataccagtgtgtattgctcatagaaagtttaggtatgattttgtaaaagagattttttattttatatagaagcgattttcaatcctaaataccctttgaaatcactcagacaacttgaaaatgcatgggccccacaatcagagattcaattggcctggggtgggttccccacaatgatacctcaaaaactcccaaaggattcttttgtagtcgagtttgaggaccactgttctacatgcttgtattaggccacaatgtaaaatctactttttacaatcaagaaagtttgaaaacactgatctagagcaaggggttggcaaaccttttcggtaaagagccagaaagtaagtatttgatgacttgtgtgccatatggtctcagtcataagtcctcaactctaccttttttggtacaaaaacagcctgagacagaatataaatgaacaggcatggctgtgttccaataaaactttatttgtgaaaacagacagtgggctgggtttgggctgtgggctgtactttgctgagtcctgatctaaggaaggaggtgatgtcaccaagccctttaacttatgcactctctgctgaggtgctgatgacactctgagccctctcctcatcccctcctgttctttcggccctcagtggggagccctgcctggggtctgaggtaggcctggtgcccactgtgcccctgcagccttcctgtgctccagcgactccacataccaggcatgtgtgacagcctgtgagccacccaagacatgccaggatgggatactagggcctctggacccagagcactgccaggtgctgggcgagggctgcgtctgctccgagggcaccatcttacaccggcgccactctgcactctgcatcccggaggccaagtgcggtaggttcctcccctccctgagtggggggcctccaaagccagcctcagcctcgcctcctgctgtccacagctgagtcccatctgcatcctttcaggtctgcttaggggtggccagtaaaccagggagagtctagcctgggaaggtctgggctcaccttcctcagtccctcgcaccctgccattcccctctgcagcctgcactgacagcatgggggtgccgagggccctgggggagacctggaacagctccctcagcggctgctgccagcaccagtgccaagccccagacaccattgtcccggtggatctgggctgccccagtccccgccctgagagctgcctgcgattcggggaggtggccttgctcctacccaccaaggacccctgctgcctggggactgtctgtggtgagtgtccaccttcacttccttggacgtcaactgtaaaacagttaaaaggttccagccctgcacaccaaccctgatggataggacaaggcctaggaaaagcaaagtgtcttgtagggggtgagcttggaggaggggagaaccctccctgggggcaggggcagaggctcaggagtcagtgcagggagtgctgtggagccaggcagcctggccactcttcctcccccacctgtagccttgtggcctcgggcaaattatttcacatcctctgtgccttggttcattctcctgggacatgagctgaagatcgatcgggcccatctttggggttgctgtgagatggggtgcgtgtcaatggatgttagctcttgctgatcttctgtcccagccctgaaccctcgtgtgaccctcaatgacctcatctaggagtatgggtcctgggggctggggggaggagtggggccaggcgtccaggggttgggcagttgtccagtgttctccactggagagcagtggggacatccggccccgaggtgacaggccctgtggtccccggggccagtgtgtaaccagactctgtgtgagggtctcgcccccacatgccgcccaggccaccgcctcctcacccacttccaggaggactcctgctgccccagctacagctgtggtgagaggcccggggtggggagggtgggggacggactgagggcagtggggggaggacagctctgggggcaggggcccaggggtggccaggcaggttcctctcccagcacctaaattcagccttttccccagagtgtgacccagatctctgtgaggcagagctggtccccagctgccgacaggaccagatcctgatcacgggccgcctgggggactcctgctgcacctcctacttctgcggtgggtcgccgccaccagacgccagcgcacacagcctgatcacagtccgccggcctcacccctgtgtccttgggcagctgggaggaaaggctgggggtcttcagatggggtgggcaaagggagaaggacaagctcactgtccaggaaacagtgtgggaggaagaggacaccgaccccgtgttccccctagattactaagcacgaggaaactggtgcttgttctgtgtaagcctttgggtggacatgagggagaacttccagattctgattccagaacggatcacgtgagaccatgcgatgctgccattagttagctcctgccacacctgggttgttgaggaggccccacccccagcaacgtgctgtgtgccaggcccctatgagaggactgctgtgacagcattgaccctcttccccctcagcctgtggtgactgtccagactccatccccgaatgtcaagaaggggaggcgctcactgtgcacaggaataccacggaactctgctgccctctgtaccagtgtggtgagtcctggctgggcacatggcgggctgcggcaggaaggggcccttcacagagttcccaccccggaccaatgggggttgacagggagcaacagagcgcccccaggtggtgagctctggaggggccgagcagctgaatccaggacgagtgcaggcccacctgaagaagctgggtcaggctgtcaggctggagggtgggaggtccaggcctgtcccctccatggaggcccccaagggccagacagaggctagggttgaaggacaaatacttgggtccctccatcccccacagcactgataagaagtcctcattccctgactgacccaaggctccccttcagggtccctttcgccactgtgtcgccatagtgcccgctcctggaggctgtatcacagaaggccctgtgttgcaaaacctctgaagctcttttattttgtaattataaataaaagtatgctttttccaatatttttatagggcctggtacctgtatgtatgatactgtatatacatgtagacatgtatagtatgtgcatatcatgtactgtgttcatagtaccttgatatagaatgcactatgtacatagtacctcaatagtaactgttaagcatagtgcagccagcattacggattgtaagcaaacctaatggatgaaaatgaacaaaatggttctatttaaatattattcaatttacaaaaattgctttgcacactgataataggagaagcatgaggttttttcttacacagaacagagtaggagaggggcttccaccaggacacccaagggcttctctgattggttcaatgtgaagagccacctccgaaacaatgtaggctcccatcccatgagagttgcccagatgacctggccgcacctgaccaggagcttgttggcccacttgccacagtatttgcaagactgatgtgaggacagattcactatcctttctccttctcttctgtctttctctttctatcattacccctccccctcagccctcctcctgtattcacgtttctttccatgtttctcggggggcagcctagtcctatggatggagtatgggcatagtcagttggtttctgagcctcagttgggctgtctaccagctgtgcagcccagggcaagttccttactctctgagccaaggttgctcatttgtaaaatagcgatgctagtatctgccttgaggggctgttgtggaaattagagataatttttgtgaaggaccaaatggtccttggtatgcagtaggtgctccaaaacagaggctgttgatattatcactttctcccagtcttcgtcatacttttgctattacaaaagcactgtatatgcattgtagaaagtacgaattccaagtaaatgcaagaaaatgaaaataccaccttcctacctgctagataattccactgccaatgctttagtggatacatatccttccagattctctctatggctttatatagatgtgtgtggtttaccaaaatcagctcatcctggacatactctttttttttaaactggctgttttcattgaacaatcactacctttccatgttaatacattttcaactcatctcatgcccagtctgtttcttcctgtttgtccaatccaggatccagtcctggaccatgcattataatgacatgcctcacatctctcatcctagcacaggtcccttttcctgtatgacctcccactgtagagtccatgccatgaccctgcagagagttcccgcttctggacttcaccagttgctttcttttggagctgcttaccttgttccctgggcctctgtgcttcctaaaactgaaatttccatctaaggattgatgggttcaagttaaaaatttggggctagacagtgcgtgcatgagcttcatagcacatcacttcgggtgccacacactatctggctgagtcacaagaattgatgttaacgttggcccagattagggtgatgaccgtaatcctaagatctctccatcttacatttttcctcttccaaccagaaaataacctattactttgacaccataaaaatgccctccctcataattttttggaacaccatttgataatccttgcttgtgccaataactttattagtaaatcaagtaactcttacagttttcagatcctcacctttagtgctgaccctcgcccctcccctatccaccaaaacgttgcacccagggagttccctcaccccttgccttgttctcccagcaaatgagaatggctgaggaatcctgaactgagaaaagtcagcctaaagactaggaagaaaggaagtgcgggccctgcagggtagcatcagctgaagcagggcatgctcaggtgggccccaagtggatgaagtttccacagggtgggaaaggttgtgttagacagagcgggatgttccccatcagcagaccttaccctaatggctggctctccctggaccacctcttgcagggtgactgcagattgaggaggcccaatttaatgagcttgaggttctgaccctgtcatgtcaccagtgcctcacagacacagcaccaggacctgaagtagctccctggggagacttcgggtgcccagactcttccctggggctctgaggacagtgggggtcactaaggaggagctgggggtagcctctctttagccagtgttgcccttctgaggattcacatccccaggtgcctgtgactgacgtgtcaactgcctctccttccccacagtgtgtgagaacttccgctgtccccaagtgcagtgtggcctgggcactgccctggtggaggtgtggagccccgaccgctgctgcccctacaaatcctgtggtgagtccgtggtcaggacagcctccccgctgggagatccagtggccctgctgaggagggattgagggagcccggcctaccaccgtccactcctctcagatctgtcccctgcagggtctctagaggaagccaccagaatcaccttccttctgcatccgcactccaagtgctgagcattcctacagccttttctctctaggataaaagaaggaaaaagcaagtttcccattccaaagagggtttccgtcttaaaaagtccttactgcggccgggcacggtggctcacacctgtaatcccagcactttgagaggccaaggcgggtggatcatgaggtcaggagttcaagaccagcctggccaagacggtgaaaccctgtgtctactgaaaatacaagaaaatcagccgggcacggtgataggtgcctttaagagggtggacgttgcagtgagtcaagatagcgccactgcactccagcctgggcgacagagtgagactccatctcaaagaaaaataaaataaaataaataaaaagaataggctctggaccaggtgaagggattaatccaggtgacaaaaggaaacctgtgattggcccatctgcctatttatccttgctccatacccagtggagagcttggtgttcagaacccatcactgcccacctacctaatcagcagagctgcaggccttctcctgcccccagggatggaaggaggctgagatttgggcctcttcctctcctctcccaggcctggcctggagctgggtcttcagaagacgggttgtgccagcagtgagaggtccagggtacccaggggattcctacctggacatccctgatgaagtggggcctggccccttgtgtttttcagaatgtgactgtgacacaatcccggtgccccggtgccatctggtatggagacgctcctcccccaacactccctggtctgctcccctttcctttcctctctatcccctcctctagagaatctgctcctttaatctagtgcaaggaacccggggttgcaagtcagcattcttttcccaagctctgccactggctttctgggtatggtgccctcctttgtaaagtggacataatcatgctttagagttgtggtaaggattaagtacaatgaagatgaaaattatcatgaagatgataatgatgatgctgatggtagtgatgatggtggggacagtgaggaggatggtggtggtgacgatggtgatagtgcagtgattatggtaataatgcaatgatggtggtggtggggatggtgaggatgatggtggtggtgatggtgataatgcaatggtgatggtggtggtgatggtgaggatgatggtggtggtgatggtgaggatggtggtggtggtgatggtgataatgcaatgatggtggtggtggggacagtgagggtgatggtgataatgcagtgacgatggtgatggtggtgataatgcaatgacaatggtggtagtggggaaggtgaggatgatggtggtggtgaagatgataatggcaatgatgatgatgatgttgatgacaatcatgacggtagctaatgtttactgagagcttactaaatgccaggaactttcctggggctttcatgtgtattatttattctcacaacaaccctgtgaggttgtttctgttgttttctcaatcctgcaaacaaggaagctaaggttaaggtcatgaagctagtatatcatggagccagggctgacaccaaggaaatctgtctccagagatcatgctcttagccaccaggctgcatggccactgagggaagtgaaaatactttaagaaatgtgaagtcgtgtttacagtccttttctgaattatatgtaaccctccccaccccagcacacatttcctctcactctgtcccccatttcctccctccttaacattgctgaaggaaggtgagaagtagtgtgagccacccggggctctgtccctcgctgtgaaaggagaggacactggacagtgctcctcattggggaggcctggtagccacactgggactgagcttccaggctgctgaggggccccaggcctgccagcccccctcctgcccaccacagggagggactgacgtagagaggggcccaggtggcagactgctcctgagggccaggctggcccccaacccagggtgctgactgcctctgccccacccagtgggagaaatcccagctggatgaggagttcatgcacagcgtggagaatgtgtgtggctgcgccaagtacgagtgtggtgagtgggggaagcctcggggcagagccatgcaggaggggcatgggtgcctgggctctggatgactgttgccgccctgcatgcccatccagtgaaggccccggtgtgtctgagccgcgagctgggtgtgatgcagcccggccagacagtggtggagctctcagcagatggcgtgtgccacacctcccgctgcaccaccgtgctcgaccctctcaccaacttctaccagatcaacaccacctccgtgctctgtgacatccactgtgaggcggtagggtgcagcccagggcggggtgggtggggttgggagggcttgcctggcagaccttgggtgctccaggagccagaggggcccttgaagctgccctaaacccccaggacaagtcagaggggccctcagaaacctctgtagaaagtgccaagaaagggactaggttgggagaggccagaaggggaacagaagggacggatttagtgcctggaaagagtgggtgttgacagacacagcacacatttattaggtgcctatggaatgcctggcacattccctgtccctttggtttgcgtgcttgtgttgctactatttggtgagcacttcttcatgcctagtacttaggatggtgactggcttctagtaagggctaaataaatattacttggataaagaaggttagaattattcccatttttcagaggagaaaactgaggcttagggagactctgtcatttgtcaaaagtcctacaggaactaagactcaaatggaggtctgtctggaataaaaactggcatccttacttagcagaaatggcttggaaagggtggagatgctctttgctgtaagggaggctcagggtagatacagggatgattagctgcctgtgacagaaggaggctgggagcgcctcttctcgagcacttacagagggtccttccaggctctgggatccctcacagataaccaggcagtgggagagccagggtggaggtgggcatctggctgaggcccaccccgccctggcctgtagaaccaggagtacgagcacccgcgggacctcgctgcctgctgcggctcctgcaggaacgtgtcctgtctcttcaccttccccaatggcaccacctccctgttcttggtaagcagccccctcgctgcccacttaggagggtgtcccagaaggggacaccaggactagggccctctctggcttgcaggccagggctgggtacaaacaggctcccagaccctatgggtttgcgcaggctgtccatctggccacagctcccattacctacttctgtgccctccagcccggggcatcctggatcgcagactgcgcccgccaccactgcagcagcacgcccctgggtgccgtgctggtccgctctcccataagctgcccaccgctcaatgagactgagtgtgccaaggtcagtgcctccttctccactgaggctgtaggccaggggcatcagctgtctcactggtggtggggtggaggtcctgtgtgcaggagtgcaggaagaagggctccctggagcctgtgcctgcactgccaccccaaatccatatgtctctctgcatttctttttgccctgaccacatcacaccctgcctcttcacacatcacatgaccacatgcagatgtgcacaaacacacactgttacatgttctaggcacattcagccagacaccaacacaggtcaccagtcactcacacaccacacactccagggacattcacatcagcatgccaatgcacacaccacgcgtcatcacacctcaaggcactcacataagcacactcttgcacacacatgccacgcagatgcagttcagtcctgtgatggctggcaggtgtccagcactagcatggacaactgtcagtatgggcgcacctcagagaaaaggatttcctggaaggcttggggttattgttgaattattaaagtccctgagattaatagtggacatttgaagatttccgactcttccctagaaaacaaatatacacagacactcaatgacactcatacacacacccacacatgcaaaatcacacatgtacacacagatgctcatgtatgtgctcacaaaatcacacacacatactgagacctgccccccaacacacacacttatgtacaaagaactgtcccatccattgttttacccatttcattatagaggaggagggttttaacggatacttgcccccattttagagatgggaaaattaagcctagaggaagaggatgatttgtccagggctgaggtagagcccaggccactgaccaaagtgggtgacccctgcgcccctcccctcccttatcctctgtgctgggaagcactggcagtggggtaggcaatggaagacatgaggggaactgccccaggaaagatgggaggccctgtaccatcttgacccaggctcctgccgcaagggggctacgtgcagccttagtggcagcttagcccccgtggctctcctatggcctggcaaggggcctatgctcctgccctggggcatcacggggagagaagagtcaagactcctgtactctgcctgtttctgggatcttggctcccggcctggacaggggtctccacacctacctacctcccccgacttcctctctctaggttgggggttccgtggtaccttccttggaaggatgctgcaggacctgtgagtgagcatggtgggggcccaggggtggggggctctgatgggggcacagggtgtcatgtcaggggacagaggaccaggttcctggcctggcacctaaaatgatagctcttctgggctgagtagatgaagggataacacccacaccacagggctcacggcactgacgcaaatatgcagatggctggaggccatgtttatgtccttgttcccatacaaaacctctgcttcttgtcacagccagaggacattggggcatagcattcaggaggtcagtagctcaccagttacttcgcctcctcctgcccctgccaaggcccccagcccagatgctcccacataaattctcccgtagtcagacgccctggtcttggaggagcctcctgggtgggattcaggcctccagggtccctgacagtccccgttagtcccgcctctcctccacgggttagtgtccactgtcgcccaggtactcctctcggaagcccactgcactggaggcaggcagccgcattgctatgtccagcaatgtcccttctgctagatggcctgatctctgggggcaagggagggggagggcccctgctccccacgtctggcacaggctattgggcctgcagtgcatgctgggtagtgagctgtatcccctgggcttgcatgggaaagcttcagcagggcccgctcacctggcacccaccaatgcctcggactgccactgctttgctcttgctggtcactcagccagtcttagtccagggcccagagggccatgtcaggacagcccttagttctcctgcctcctggagcagagagggaagacaaagtggacttagctatggccagaagccatctagctggtgcagtaggaaacctctgtggtgaggctcagagaccagaagaaaagattccattccatttctaaagggattcctggggttacagagtgagtgcacgtacctggcaaatatttgtggagcgccaactatgtgccagacactgttctaggcactgtagagccttgtggagctgatatttagtgggagagacagaataacaagtataaaaatatataccaggatggaagcattgagttttgtggggcctgacttatgcaatgtggggggcttcaacaagaagaagaatacaaaatgtacaaattcacattaaagtgtgaaaggaaatatttatttaaaatgcacaaagaacttacaacaaattctggaaggggcctgtgcaaaagaaggccataaagcttatgattcacatcgtaattaccgatgtgtctctgacaagacagtgattgtcccctcgacaaatataagcaagggaggggtcagggagggaggactgagtagaggcagtgagttgcaactttaagaaggggaatcaggtaatgcctgggagaggagatattgcagccaattgctaaaggaggtgagggcgtgaatgagccacaagactggttgtctgtgagaggcatggtccaggcagaggaaacccacactggttagtttccatccctgtaacagctctgtgagatgggtgaatccctggtccagtttgatagctatggaaaccaaacaaagcatcccattagaatgaagcgtcccactagagattggagtttctattcatttaggaaattgcataatcttaatgctagaagccctctcaggatgggaaaactgaagctcagagaggggtaagggtaaagtggccaacacagcttagaaataggcattagggctggggtggggaggcagcctcactctgtccccagatgcttctctgccctagcacagagtcctcaagggggccctgctggccttcctgcctcacttgctcacactgctctgtttctgccttcctgactccgcctccttccagggcattgggttaaaaggctttccctggatggggaggggcactaatgcatgggtgctaatgctggaagagagaccctccagcatgacactaactgccctgggctggcccatcctgctgccccgaagaagcctggtcttggccacagctgcctcatccccctgtccccccaggtaaggaggatgggcgctcctgcaagaaggtgaccatccgcatgaccatccgcaagaatgaatgcaggagcagcacccctgtgcgtggtgcccacaaggcagtggggcagcaaaaaatgggatggagggggtttgggggtgtgagcaccacagactgcctcactggcctgcccgttccaggtgaacctagtgtcctgcgatgggaggtgcccatccgccagcatctacaactacaacatcaacacctatgcccgattctgcaagtgctgccgtgaggtgggcctgcagcggcgctctgtgcagctcttctgtgccaccaatgccacctgggtgccctatacagtgcaggagcccaccgactgtgcctgccagtggtcctgaggcctgggggcccgggctagctggaccacctctgccagccccactttctgtttccagctggcccaatgtgaatgggggtattaaaggtggtagaaatctggcacgtgttgagcatggaatggtgggaagaggtcacaggagtaaccagaaagggtcacccctgcccatcctggctccctttctgggctccccattttccgcacatgggaaagtgccacagttgagggctcagggagctcacctctgtccctggtttgagatggaaaatgggctttaggtccaggggcagcagcctctgaacctctgtgaccctggccacagctcttggtggagggggtgagagctgtgggaagatgggaaggtgcatggtgcttacatgggaaccacagctggacccaagaccaagcacaggggcaggatgcagtggcccattctcttggcctttttgactacacaagaaaccagacacagtaaaaggaaagagggctatacctgcaacactcaggcctgcagatggctgcccagaaggagttcccaaagacaaagatggtggattctagggcccaggttgtctcaccaagatctgtgaaatcagagtgagctcagtgaccttcgcatctcctgtagtccaaagaaaggtgcctggtgtcctggtattgatatggtaattcaggaaaggatttggaagacctaagcctgtacccttaccccaaggcaaccttcccagcaggcaggccggccttgtgaggcggtgctgggggagtgaaaccctcagtgagggcccagcactacttatctaggatgctggttgacagcccatgccttcaaggccctaggttgctgagggggtaccttcagcctgcaaatgcagctccaggctttgcagtgtgccttttctccaaggccatgacagagtcgggctcagaggagcctgattatgggttgtgtggctcagccagtgccagtctctgtgctccatgggactgtttagcaagagagtgtctgttggtgtcagtggaaaacacagccccagcctccctgagcacttgtgagatccttgtcactgaaccagagcgtcccctaaagccagggccagcgtccccttccacaccccactctgcaagtctcccaccccctgtgccactttgtgccacgtggaaccgaagggcatgaacataaggttgtgcaggccccagcactgccctgtgtgtctgaagatgtggctggatgccccttgaggtgaggaggctgtgccaagatggaccctgctgtttccaagcctctttgtgcccatgtttgtgttctgtttattcatcaataaaccacaggatgacttcaggcctctgagcatctctgagggagccaggtttacttcgaacttgaaggagtgtccactgtgaagagaagactctattttgtggccctgaacatcagcactgcttctgccccatccgtcccagcactatgccccactcacagcagaaccattggtgggtgtctgctggttggaattgaatggactggagactggcttctagaggaaggggatgaggagaaggaagaggacattgggagctggggagctggcacccaggagagggactgaggagtgatcctggttctgtgggcccagagacagacgcttcttacaggagatgtgggtggggcagacccagagagtaggtttcatattggcctcttaacatttctgtatttctttccttgttgttctcccaatgagctcagtatgtttttgcagccatgtcagctgtggtaggattaaggagcacccagggacaggctctcagtgacacttcacctgcgaaggactgttggtacacctaaggagcaaatgggagggtgctttcctgggttgtcccatgtgggaaggagaaggaggggggctaggaaagtacccctcagtaatagggcaaactcctagaggagtcagtgcttacagtgcaagagcttcaccctgcctagagagggtagaacatctttttttgaacgaacacttggaaggcttggcttttatttcataagtaagctcttcttatggtgcatctgtctgctaacatggaccctgagtcttttcctaatgaagctttatggctttgtaagcagcacatttctaaataatcaatggctcaaataagaaatcagaaaggaaattggacaacattttgatctgggtgattttgaaattatgacacattaacctgtgagatgcagctaatgcagtacttagagaaacatttatagtcttaaatgcatacatcacacttcttaatttctcattattacagccagagatggggtgggacaaggcttccaaacttctctatcagggatgatgatccatggcttgtagtcagttatctccttagctatacacactccctaaatcaatagttttcagaattttgaactctgatttcagcagaacatgactttaaacagaacatggctgttaaagtgaactaggttcaaaatcctggttctattatatggcaagatgttttgactaagacataaggaagtttttatagccattgctggctatatagtatccctggctgttcattcctcacctcatcacccttcccatctgtttgtgtccagttacgggaaagcagcttttgaacaggccactcctcatcagctgttgcatagacagaggcagagggcaccaggttaagtcagccagccttggcctaaatgtctttctgcagtctcaattcgggagggtggctccaggctttcagacacctgttccccacatctgacccattgttggtgacacagtttcagtagcctggccctccttggctccagttggcagcagttctccagccctcctgctgtactcccactgtgtcctctcagatggccatagctcctggtgatcacaccctactgtgggagtcccagcatgcctggatgttccccccggccacctcacctccactcccgctcagacaacccccccgcctactcctactggaagccaacttctcactctaaatttttggtcaaaattcccagttctattttcctagatccctcctgaagatactgacttttttttctttcagggtaagacaatttagtgaaagattaatgagaggaaaatctccaaccctgtcttgcaatgtagggaaggcaggaaacagtgaagactttgaaccttaattagtgttgtccattgccctccaaaaagccagtgccagcagtgttaatgcgagtgttcatatcaaatagatacaatttgtagatggtgatttaaatgtaaaatacacatctcctttaactaagtcatcctatttctaggtagctatggaaggctgaatagtggtcctccaaagatgtacaagtcctaatttctggatcttgcgaatatttatattacattacatggtaaaagggactctgcagacgtgattaaggatcttgagataagaggattatcctgggtcatccaggtgggcccggtgtaatcacaagcgtccttatataagagaggcagccaggtcagagtcagagagaggagacgggatgacagaagcgaggttggagtgatgtactttgaagttagtgtaaggggccactggtcaagaaatccaggcagcctctggaagctggaaaatcaaggaactggattctctcctagagcccccagaaggaacacaggctggctggccccttgattttagcttagtgaagctgatttcatacttctgacctctacaactgtaagagaataaatgtgtgtgttttaagccactaaatgtgtggcaatttgttacaggagcaataggaaacagatagcatcaaaagaaagaattcctgcagaggcatgcgccaggatgtttattgcggcattgtcctgagtgttaaaaattagtaacaactgcaaatgcctgtcagtagggaaggattaagcaacctggtacagccacactcgtgaatattatgtagcccttttgggtactgacatgctgagctctccaggatatgttaaatgatgacaggaaattgtgggttgtttcacacagaatgatccctcctttatgcacctgtgtgggtaatacacacacacatacaacacaacacaacacacacacacacacacacacacgtctcattcccttgaagagttttcaagattgaggaaggtccttcctggctgttgagccaccaactagttcagtggcaactttggtcctagaatagccttttcagatcccaggagatcatcagaagagactagaatagactgaaggccctagggacatctgtggcatctcccccattcctgtttcctcccacactctgtgcattacttaaagcttgaggcaactccagtggccacacacagctgaggaaacagaaagccaggaccagcagagccactgagagattggtggccgagcagggtggctgcccagcttgcagccccctgtgacgtatttgcaaacacgaggagttttgagctgcagaaccatcccattctccgtggtgcaggctcaagttcccgccctgattttctgggcttaatcctcttcctgtggaaatcaataaggacattgtgatggaatgattcacgttcaaggtcaggccggagcaaattggaggcgacatgctgattttactaccctcactgtgaggagagccaatcctgctcacagacccccttaaccctttccttgtcactgtggtaagcactgtctgcacaggccccctccccaggcccagatccccctggcctcacccacgtgtggcgcttttgtttacattttcccaagcctctgaccacacaaggccttggagtcttgcacacttgtcatggtggtttggggaaggcagacgacaggttcaggaacagcttcaaattggaagtcaaacgctacatatctaacttcagcttcatgggtaacatcctgttcctctcccttcaccagagctgttccccttccaaccctcttttctgagttccagacccctcttccctgcttttctgggttgtcccacatggggaggtagaggagaggggaccaaattcctcatttatttttttcacacacagcaaggctcaaacatgatagaagcttattccttcctcctatttaaaaaaaacactcaaaataagtaggtagctagagctttgtgtccagaatgatttagggatcctggctcctctgtcttgaggttctaccaccttcagcacgggcctcccagagtctctgtgatctcaggcatcagccagccgaggtgcagggagagcatgtgcgggaagcttgcagggcccaggactgaaagtggctcactcccttccactcggattccactggcctgaactggccacatctcagtgcaagaaaggctggggaacgtagtccagctgtgtgcccaggaagatgggtctggtgggcagtgctgtctctgtgaggaagcggagagagtgaggaggacaatgctagaaagtgtgactggaaaagaagagatagagcatgagttaggggaggacttgaggtaggcagtgatttgactgtatgccctggagaagccagtggaaacagaaaagctttgctgtggagaaaagtcagggtctcagagggccatagctggcatgaggagggacagtgatgacacagatacctctggctgggcagaccccaccttaggtctttctttatctctgtttccaacatggaacactgaggacactggagaataagtgtgaacatacctctaagcttgaaggtgaggagcccagacaacaaagagttaaagggtgcaggggtgggcagaaccggggagccaggtgctccctaacatactgtgcggtgccagttaatcccctgcagcaggcaggaggcctgcacagctgtctctcccgagctgggattgcatgcttccccctccctctgccacctccctgatgcccccggccccttgcccagagaacacagcaccccagggattgggtgggggtgggtggagatgggcaggcagcatgctgggtaactggtccagcccctgaacccttggacaactctttctctagagataaaccattctctaggcttgtttctcactggccatgaagaccgtacctctcccaagccagccaaacccaaaccttatagctggtcctcctacacagtgtccattcctgcctctgtgtctttgcctcacctggagtgtccttttcctcctctccctcgacagtccctgcctagcctgcagagcagctacaacacagcagcacctaggagccctccctttggcctctagccccccagccctagtttctgcttgactggggcttcccatgccagcctgtgcctgtgctctgcccagggaggggagatgcaggtctggctccagcagtcattcatttattcccacgacatcttcattcataacagatgaggctgctaaggctcagagagggtaagtgacttgcacagcttgagagtggaggaattaggactcaagctcacaactgtttaactccagagcccacactcacactttctttctcagcccagaaagagactaagaagattgctgggtgcctgggagctcttcctccctgttactccaggctccttcttcctggaagccagagggagcagtggaaagaaggttctagtttctctttggccagttagcagttgtagaacattggcaaattttaagcctcagttccccatggtgaggagaagcaataggttctgcgacagagttggcaagagggtcaagtgagatcatggatgggaaagggctggacaactgcagaggctgtgctcatatgtgaggctgctgggctgagccagggaatcccagcccagctgggaccagagcaagagaaaagcaggctcaaagagccggactcagtcccagcccaccctccatccagcagactcagggctcactgctaagcctttgcctctgtgtgccctatccagctatgccatcttgcctctgttccactgaaccagatcaccatttacggatccttggagctgatcttcgggatctagtaaagggcctagattgtggggtaggttctatctctgaacagctgtatgatttacactctccaagtctcagtttcctcatcaccaaaatggaaatgagagtctggcaaagtgatggtgagaatgtttatagatagagtcctggcctatggtaggcatttaataaatggagctattgtttccactatgaaccttctttcctaaacctttaggaatatctttaaactcctccttttcaggattaggaaactgatcccagggaatgacagtgactcacccagagtctcactgcaaagtgagcaatggtggaggcagcgccagactccaaaccgagtgcccattccattgcctctgccagagaatcttccctgagctccaacctagggtgggcctccctgtgctgaccttacagcctctactatctgagtcgcccactaggccttccaaaagccctgtctctatctgagacaggaagttcccaggtaggacccaagccccccagcagaaactatcacctagctggatccttttcaaggtgtagatacccagctagggaagcttatttctcaaggggtttcccgggacttggctaagctgggtgacatcaacttcccaatggaggggagaaagaaataagagagggaagggttaaggctcagcagctgggacaggcagcctgcagacggcccagcccagtgctggggggcctgcaccattccattcctttgcagatcagttacacccagctgtctccctccccactgccagcacccctcggattaggcgggaaaggctccccggcctgcggcctgcacacggcccatggggaacagcgcctgcagcccacgcctccacgacagctgctgagtgtcaggcaagaacatagatcagtgggatcctggcagaggtgccctaagcccaagccctgcccccagcatgtgcaggaggggctgcccgagaagaaagggggtctgtgagggatttgggaggtacagggcagaaattgctcccaaaaatatctcctctgcccatgtgtcactgtgcctcaaattccaccattaaacatcttaaaagtttggggcttccagagacaccaattaaaaactacaccccatggagtagctggcattttgatgcactgttgataggaatgtatttgtaaaatttatgaacatttaattttattttacaaagtatatatgaagtccctcaaaaatatcttttcctttttctcagttgtcccactgagggctttaacttaaagaggaacttaacttaaggacatagtttataatatggaaagaatgtgggctggagtcttaagattaagagaaaacacaaactaaggtcatgaatactctcaaaatactcacaaaagccagatgaaaaaaacaaaagaaattttaacactagaaaatatctgtgcctgtaccggaaaacatgaaacagttccaccaataggtcagaaataggaaatttcttgaagttataaagcaaatgggaggcagcatagtgtataggtagaaagatggtccagactctaatcctggttgctttactcacgagttctgtgatgttagcaaattactgaacctccctgaatttcagtttcctcaactgtaaagttggaacagtaattacaataactgtgagaaatacatgaagattagaggagatcatttttggtaaatatccctgtgattccaccatcagaggaccgtgaccatagaaatcaccatcaactatgagtgaatggttatggtatgtctcctccagccacttgcctacatagctgctaagaaaaccctcacagtaccaattctaattaatccagaattttattatacatattaccagccagttaaaactcattatttgaaaagaatggacaatggcaaaatggtgcccaagttgaaatggcagggtaacttaccctcaatgaaaagtcaatcaattcaaggaagaggaaaagcatgaacagtattctaattaatattcccaggatgatccatgaggatattgtatctaaaaaataggaggctaataaagtacaatcagaaaaaaaagtttctagaaattaaaaccatatataacttctacttccatcacacagagtacctggtattcaacctaccctgcaattataaacaactagaaaattggtgaaaatacatgacatacatgtttccagacgtgggcaacaggcagtgcaaggctaggatcccgcagagaagggaaataggtgaagaattaataaatcttactagaaagttccaaattctgcctggataattttctggaacaagagacagggaagggcatgtcccagcagagcagggtggtctcgctgagttgaagacagatcaaattcaggcagtctgaggcaactgaaatatgtggggcagaataccagagatgagggagccatgtagaaaaagaactccagaaagttgcatatattaaggctgtggttgaacattaaggtgcacatgtgtaggctgaatatccataaagacaggtgaagaaccagtgggtaattgtaaactgagaaattcttggagcttttgcagagctgagagacattacatttcttaccagccaaagtgaaaagacctcactgaacatcccgggacttaattgagcttccagaaatggtcatactttagaagaaggattaaactacacctagagtaaaggctaccctaaagaagccctaattaagctttgaaaaaagcctcaaattgaccatgctgacacacagtagctataagacataagaaagtctaaatattctttaagggaaaaaatacagacattcagcaacatactattaataatgcctagaatccaattaaaattactagacatgcaaagcatctggaaaacgtgacccataacaaggagaaaaaaacagtcaatagaaacagacctagaaatgacaaagatgatgatat

SEQ ID NO: 469 - DNA, 66859 bp, Homo sapiens
tcctaactctgtcaactttttgggaaacactaaatgttttattaacattctgaatatttgaaacccttctgttgtgacttgtagaggctgaaattttcttctttttaatggtatcccaaagactcctctgcaaaaataaggaaaatataccaattaagtttgtagctattgaatattaaataagcaatattacttcaagcctgttatcaaaataagttttatttattattaaacaatttcttagagtaaatcacagaatggttaaaacattacctttttctttttctgctcttctgcatttcctagtaatatagcttggtgtttcagaacatcatttacaagaaatgtcataatctctcttactcggccttctttgagtggtgtccagttaacagaaataacaattttctctttaggctataatcaaaacaatacattatataattacaatagtaattacataataaccaaaacaccttatatacaacttacaatatagtagggcttaataattgttaaccaacactctatatactaaacatttaataaatcaaatatatttctcctaccctatctgcttaattataagaaaaaaagtcactaaaaataacagggttcacaacaaaataaataataaaatcttaactgtattaaagcaatagaacagatagtctctaaatcattttgtttgagtggtttcaaaagatttaattgtacatttctaatttttagatgtgtagagtacttctacttcaaacacaaggaccctgcattatgaagactttatttaaaaagaaatgtaaagatgatcagctaaattccttcttccttacaaattcctctaaggtccacatcatcatactgagatttcttaaacaggtattattgttccaggcataagtgcaggtatcctgtaaaactcatttaatgctaacatccctaggaagcaggtattatgattatgcacattttacagatgaagtaactaacatccagaaaagtctgccaaagtcacgcaggtacctattagaacccaggcagtctaatgccagagtttggactttaacatctacaccccacaccctggcaggtagacagaatctgccaaatttaaacgctgacatgacaaaacaaattttgtttttcaggagaaacagacaagtttctgttttaaaggagaaataatataacatcataaacaactaattttaaaaaataagaatggtgcatttttactctataaaatagtttattctaaaaataccacaaaatttagttccacattataacaaaaaagagtaagttgaagtattatgtggatagaaaagaaatctgtctttccaaagaaaggaaagcaggcagtgattcatgaaacagaggggcggggtgggtaggttctgaagtgtagatagatgaaccattggtgacacacaagttaagggacctcagattagaatctcttttttctgcctaatgaagtggttattagcctactagttcagacctcctcggctaacggttttcatacttttggtgattctactcaatggaaaggtcacagcagtcaaaataaaaacataaattctccagtctttggtgaaggggattggagcattactcttgcaaatgcaatgcagtaaaagaaagctacaggagttcttgaaacaacatttataaaattaaatttgatgcagcattaaaattacacttaacagcaaagaaaaaaaggactaaaatactaaagtgtgcatacatactacacgtatatattgaaaacaactctgaataggtttttttggtttttattgtaggcatttagccagaacaaagctcactatttcaccggaaaaaaaaaccagttacctcgactctaagggtacatatggaaactaaaatgcatattaagatggctgatagaaattttaaaaaaagctgctttaaccaaccaaggtactcctgtcaatcttaaaaaagtgttaaaaaagtgcattgtctattaatttagaacggcaaggctatttcacaacgccttaagtctagtaaaagtgcttgtcaatttaacagagaagtctatataacttgctcctaaagatgctaagtgcgcgcgcgtttatgtgttgtccccgcccaagttagcgtctatcctagccttcaattagagaatatatatatatatatatatataatattgacacatatatatatactcacacacatgtgtatgcgtcaagggcccacccacagttattgaaaaggaactgacttcactctctaagggtcttttctgatttcttttccaagagccacccacagttattgagtgaaagggaactgactttattctctaagggtcttttctgatttcttctccaatcgtcaaccttcctgaggagggtggcaggaaagatagcggagaagcagaacaccggcctggagcacgctcctcctgagacctacctgcaacacgaaacagcgctgcgacacactgaagcccaggtccgcggccgggaagtgggagatcttcacttctgccacctcctcgttagggttgtctagggccagagacagcgtccgtgaggctcccaggagaacgtccccgaagcaaaggaaaggagacctgcagaagtggctgagagacaggaccggcggggaagacgcctcctcctcggccgcggggccccgcagccccgcgggcggcctccgctcggtcgggctcacttcccagcagcctcgccccactcgccggttcgccatggcagattcgagacccctcctggatctccttgccccgctcccacgaggcggctccggagcggggatccgggacttacgctgaccgcttcccctcaggggcggctgtagaggtcgtgggagtgaattcggccctttttcttttccactaacctactccctagaaaacagaaaacaagcccaataaactcgcaaattaaaaagaggagccaaacaagtatggcgttttgactctgtttaaacttgccgcctccaccaatgaggacctccgggcaccgccctcctcgtcacgggaccaatcggtgagcagcatcccctggccaatgagacggcggcgcttcatttgaatgattgcatccggccgccaatcgctatctgcggaggaggtgagaacggtagcggaatcctggccaccgtctaaaacccggggcttagaattgaaattcgtctttatatttttggttgtgctgaagggaagggagtcacagcatttccacaatacatgtagtaatcattgcggtttccaggaacaatcatagataaaactgttacgtaggcaaaaattggtttatgccactcctctcatatgcataccccgcccagaattatattaactttactgtcgcggtttccagggctgaatggtagagatgtaaagataattagtttgtatgaacatgcttattttagtgacaacatagcagggactcagtacatttacatgctgttaattacctcgggacgctgggagcaaaaccaggtaaacaaatgaaacctgagattaccagtaattcataaatgattgttttgactggcaatgcccttcacaaatatcttattagtttttatttcaattgtagggatctaataataattatagcttacatattagggattttttaaattatttatttattttgagatggagtctcgctctgtctcccaggctggagtgcagtgacgtgatcttggttcactgcaacctccgcctcccgggttcaagcgattctcctgcctcagcctcccaagtagctggaattagaggcgcgcctcaccacgactggctaatttttgtatttttggtagagaggggagttcgccatgttggccaggctggtctggaactcctggcctcaagtgatccgcctgcctccgcctcggcctcccaaagtgctgggattacaggcctgagcggcgcccgaccctaggctagggattttttaaaaatcctttacctatttatctcaacctttgccttaaacctacgaggtatctcttagggcgtaggtaccattatttgtatcttacagatgaggaatacaggtcatacagctaagtaggaagtggcataacccagataggtacacatgcctgtaatcccagcagtttggccctagtcttgctcttacccactacactatattgcctctaaaggcagtagaaaacttaaaaaataaaaataatgtctggatgtatgtatggttacacaaaacatgtaaaaagagaagtcaatgggaaatcaaaataaggaagatgagacatgaaattatattcaatggtgtccaatttcacctgaagttggaccttaacaatatttaaacgaaatttttccactgggcacggtggctcaagcctgtaacccagcactttgggaggctgaggcaggcggattcttgaggtcaggggtttgagaccagcctggccaacatggcgaaatgccgtctccactaaaaataaaaaaattagccaggcgtggtggagcatgcctgtaatcccacctaccccggaggctgagacagaagaatcgcttgaacctggggtggggggtgggggcaaggttgcagtgagccgagatcatggcactgaactccagcttgggcaagagagcaagacgctgtcaaaaaaaaaaaaaaaaaaaaaaaaaattctttcatagaggcttaaaaaaaaaaacaacaaaacaaaaccctggagcagagcctcacaagtcatttccagttctcctcagcatctaccccccacgacctctccattagcttagttaggctccaaaaaataaaacttggacggaggagagtgcaagatatgctgtgggagggaggaaacagcctatacagcaaagagttaaaagattttgacagtctaaggtggaatgtaatggtgttagaccaagaggacaaatcataaggaacaataaggccaaatttattgtcatgggtgcactttacccatttaattaatacaatgtccgaagtacctgggaatggctttaatagtttaataggttcactaattgaaaactgaactcagtagtggtttacagtcaggtaggtcaaggccaggcacggtagctcatgcctgtaattccagcactttgggaggctgagacaggaagatcgcttgagcccaggagttaaaaaccagcaacaaagtgagacatggtctttataaaaacaaaaacaaaacaggcagttaggtcaaaatgctcaaactacctggcattctgtacacgaaggagtccaaaagctcaggaagataggaatgttggagaaaatctacatgtgcaacctgcttggccaagtcacatctaaacatgcacaccctccacccattctccttttaccaaggtgttgataaatgcattaactaataaaaaggactccagcatccatgaaaagacctgggtgactattttttataggccagaaatgatgatagaggatcaataatgaaaataggttctctgatctccatgtgaattatatgatccacaagtggtcaaagtcgattggcacttaatagacaaggtggtatagttcttaccacaatatgctaatggcagaattgtaattagaggcagggatctgtggcaatggccagtttctcaagggccctataaataagatgagctatatactatggtgctgcctaacatatataggcagagaaataccacatatgcaaagcaaaaaacctaactgaagccaatgttgtggcagttatgccttttacccactttccaaacttaagacagttcatacacccaaagctccttgactagaaagaaccctgcaacacgaataccataaatcttctctcaacaattccccagagggaactgcagtcatttacccacatgaatatggattgggggcaggaacttgacttcctaagggttattagataatgagataatagctctgcctttctgctatactccagaatcctaaaatgtcactgtggaccaccagacatagtgagagcttctcaagaaccggtgacagatggcatctaagtcagaatctgtcttaccaagtgtcctttggatccacccatttccagaatataaaataggaacacttactgaccacattctcacactggttcctagatccaaggaacaagggcaattattggagaaagggccaagtggaagcccctgaaaatcaccattttcccaccacggcaattcagagattattctgaatacctgagagatgttgggatagtgattttgtccatatacccactttctccacttatttggccagtgcaaaagccagatagattctggaaaatgatagtagattatagcaattaggtgatgatgccaattattacactacagtttcagatgtgttatttttatacacaaatcaacatacctttgtcagctggtttgcagctatgaatcaagcaaaatgcatttttcttgtttttccccattcatccagtattgaaaaaccgaagcactttgtacttaagtagtggtacaatgctgtagcattactgtcctgcctcagggctcgtcaaatttcctacctatactgtaatattgttcagagagacctggatcttagtatcacactggtccattatattgatgacatttgctaattaaacctggtgagcaagaagtacttgtcaagaattgtgtgagtctgagattttatccctcttgcaagctaaagagttagcgtgccagtttcataaaggccagcagaaaatatgacagttttgggttagagacaagactttattattcacagaaaaaacagtagctagagtgtcagcatgttcattcacattgattcctcctgcttcctaagtctcatgggaccatacaaagggcccttgatggatgcctgcacacacagtgggttgtattacaggaaaggaagagcgaattggagatttgactgtttttatagtactatgcctgggcagggagacatcctatcgtccctcaagatttctgcaaacacaatcctgagaaatggcctatgtagaaattaataagggcttcacattcttagcatagccagcaagaatgtgtaggcctgctcagagcccatggtaagttgcatctctcaacaggagcaagcactgtggatgccaataataaaacaaatgtaaaccagatgggacaaagttcagggtcctatcacatctgtaaagtttttagggatccaatggtctgagacatgtcaggctatctcttctaaaataagaggcaacttgtactttgtatcatttgtaaagcctctttagattttggaggcaatgcatgcattattaagacacatctcaccaaaccatttacctagtaaactctaagactgacatttttgagttaggcctggaacaagtaagatctctgcagtaggtctgggctgcaatggcccaaaacactcattccatgacaatccaagatgtggaatagaagctctggcaagtttccagagaagtatcacagtacaaaattccaggtttggagaataagactatgccttcctctgcagaaaatcatctatcatttgaaaaacagatcctaattatgctattaggtatggtagagactgaatgcctcatcaaaggactataagtgactgtgatacaaactgtttattatcaactattacctaatccagggatcagcaaactatggcctaagggctgaatctgacccattggcttttttttttttttttttttttggcaaataaagttttactggagcaaggccataagcatttatttacatattgtctatgccttcacactgcaatggcagaatagctgtgatagaaaacatatagcttgtatagcctaaaatatttagtgtctggccctttacgaaatatttgctgacctgggatctaatctcaaggaccataaaatttgatgtgaagagcaacattgcactatcaaacaaaagcagaatctacaagaccagggctaagcaggccccaaatacacaagtaagtgatacaaacaggtgattcagattttagtaagtatcttttactacttctactactttgccacttccctctctctcaaactacacaggaaaaactgggtatctcttaatgataatttcacaagaaaaaaggcctgatttatgaatgaagctgtatagtaggtcagacataaacagacttacattacagcttctccttaggggtggatgggaatactctcagtgagaattctggatggtatgtttggtagtccacttcataaggaagagaacatggcctaaggtaaagctctgtgctgattcatggataatggctgacaggttggccagctggtcaaacctttggagaaaacaaaatggaaaattggtgacagcttggtctggggaggagcggtatataaaagggcttctcaaaataggtataggaagttaaatttgtgttccatgtaaatgcccatcagagaatatccatggctgagaaggagctcaaaaatcaggtaaaaaggacaatctatcctgtggaggtcagcttcttcccccagagatccatttgcttgcgcgttgaacccatttagaaagtggctatggcagcagtggtggaggataagaatgggctcaaggtggtttcccttgccaaagctgatgtgataagcccctgtggagtgcttaacctactgaaagaggctgatgctgaacatccagtctaattccattctccagtgggaccagctaactacctgtggcatgtggttacattgaacgctttctattatggaagatgcaatattcttcctctctgggataaatatatttttctgagtatagattactgtacctgcccccattatatatatatttacagaaagctttatctataaaccaatgaatatgtaatggttttcacatatgtccaaaaatttgttgctatcctctcttcaagagagggagtttaatttgtgtcccttgcatgtggactagaattagtgacaatagaatacagaagtgatactatatcacttccaagattaggttataaaaagacaacaactgaaatcctgggtacgctctcttttttggattgctttcaggaaagtggtgtgtgtgtggaggggtggggggaaggcggggcaggcagttgccatatcactaggcagccctgtggagaggccatgtgatgaactaaggccaaagaccacgagtgagcttggaagtaaagccatccccagtgaagcctctagagatggcaactgacttaacagcttgatttcaatctcatgaaagaccctgagctaaaaccacccagctaaatccggcctagattccttacccacagaaacttggaggtaataaaagtttgttgttttaagccactaagttcggtataatgtattagacagcaatagtaaactaagtatcacacacgacattggctataatcagaaaactcattttgcagaaatgtgctcatgcctatagaatttactggtcttctaacactcagaagcagctgctgagataaaatagagaaagtctattggaggctcacttatggtgccagatagggataacaacttgcaagtttgggggtaccatcctatagcctacagtttatgctttcaaccaacaaccatttctcccatagccagaatgtatgtttctgggagtgagggggattagaggtaagagtggcccctctcaatattatacagaataactcatttcactaatgaattttactacacttcagacttctctctaaaaaacagcataatatgactacttcaagcataaaagtcatcactaatatttgaatttatattacacttaaaattagtttaatggtttatacatttaatatataaaatatttcaaaacatatagcttatgagaaaatgttttaaaatgtgctgcaagttacttggtttcagagtactgcattcccatcctgtgaaaatgtggttcaataaaacctagatatgctgtattaggaccaaagaactttatatttattttaaatatcaaagtaacacaaagaactagttcaatatacagtacacttcctactcttcacagagaactgaaattttctataaagacatttatacttaggaaacatcagacaaccaaagtatgtataaaactcacaagatattttacacacagttcacaataattaattctgatattttagatttttctgtcattgcttttaaagtatccttaattaaaaacaaaaattattatttgagactgaaaacaagtgcaaaagcatttctactttaatatacactgtaaatccccataatcaaaacatttactacacaatgtggaacagctaaatgcccagttttgtattattttctggcagccacactcatcaattgtaatacagttttatcaatagggataagaagagttcaatcgttagaaggaataaaaattttgtaattacatcacagtacattgtccagctttaatgcaagcaggaataccaagcaaaaaaatacgcagtaacaatgagatgtgtacatcctcttcattcaatacatcttttagaatctccaacagcaatgcaagcattgattacttttctttacctaagaatttgaccaaacaaggttatattctttgtataacctctgtgctctaaatataatccttaatttctcctctgaatataatccttaatttctctttatgtaattggctgcataggctaaatttaaattgttttaggatttttctcaagatcatagatttatgatcatacacagcaagttgaaacatgagtaaacaaaacataagcactctctctacaaaaaccttctttttctcatcttccacacatcttaatcctattacatctatcttattaatgctacttccaaagagaaagagcagaaagcatgctaagattatagggaaaaggtatcttaagtaaaaacaattttagaggaaataaggaggggattccctctaccctcaaaacaaacaaacaaacaaaaaaccccacattagagaaatgtggaaaagggtaggatataaggaagaactgtctagtttctagaagtcgtttagaaaattattctcacattatccattattcactctaacagcaagtagcatttactataacactacttaaagttttagaaatgctacttgtagaatacatttctaggcattttaaatttggcactgaatcttagaatatccaaatacaaccttctttaaagtcctaatttttcctgagttgatcaactcattatatattggttgggatgttgctgctcctaatgagaaactcatctcaaaccatcacctcttgttcagttttaggcaaactgaaataaggtcattcagtgcagggctgtgtagttatggttactggttatttaaaagacagagaaacagagacacagatgcagacacactactcattttattttacttgtcagattcctctaataagcatatagagacaggcccaagagtggcttcacagtaactataaaggccacaacagagatttttaaaatgatatataaatcataaaaacaaatattcacactaacacttagtgccaatttgcctatataaacataaagcaacctaaaaaaaaaaagttgcccaaccagcaggcaacacaatcataacacccataaccaaaaaaaaataaaaataaaaatctattaatcagtacaatctagccagcagaatcaactctaagcaactacaacacatcgaaaaggcacaaagcattcaatgcagaaaagactgggtataaaaggacactgtcaaagagctactgctcaaaatctgacatttcatcactgatatatgagagtgatatggtaggaagaaaactcaagcttataaacatattagtttaactgtgtttttaatttgtttgcaattatattgaaaagcaaccaatgataattacttattaacccttaattagcagtttagagtcaccctacaaagatgctttgacactttttaaggttgatagaaaattattagtgtacctatttcatgacctgccatcgcctaaaaggaagtcacctaataaagcaccaatttaaaaccatatttttgctactcctattctcccagcaataaatgccttaattacttaaatgtatgcaaagactactatctttacagttggttaaatcttgctggcataaggaccaacccctaaccttaaatgggattttaggctgcaaaaaaaataggttgggtttcttacaaaaataacctcaacttgacttaaaaaaattcgaaggcaaaaattattttgatagtgtagtgtaaaaaataggcttatttagcatttagtagtgttctctaaaaaacataacattgtattaattaaactaaggaaaacagtattctcacttataattggtttgtcagtatgactattcccagagtattttcttttgctcctatttttatacatataaacacaataatcaatctcagtattcaaactaacaactttttttttttaaaaaaatccattattctaggacttcaactgtgcttctttggacaaatagttattcaagcaagaaagaatttaaagtcttttaaactatttaatacctactaaaaatctttggtgcatttaagtcaaaacccattagattaacacattcctgcacttgataaattattcaatttacagattaagtgctaactgctatctgctaaaaaattaatttaaaacaataaattatgctcacaaaataaaaaaattctgaatgaggctaaacttagttgcaagattcaaaattttaagtacagttacaaaataaatggattagagttatagagcatttgtccaaaatactctaaatcaaatattacaaaaggtcaactgaaaagaataggcctccttttatactttttgtgccaacttttgtcaaaagcctatatacattcagtttgcccaaatccatgaggttttcacaattgtaaaatttcttacatttttggaaattagaggcagcagattagtttcattttgtttttgttgttgttgttttcaatcatccactgaaactattacttcaccagaattatattacgcatctcccagactaggttaagattaaatgacaggatgtagtacctggcacatagtaagcattcattaatgctagctttcttctttccctactagtagctctgccacctactgaccatgtgagcttaaatgagtccttttatcttaacctcaaattctttataaagtgggaatatagcttgtttttactatttcagggctggttatgaggttcaaatgagataacatatatgaaagcattttataaaacagtaaatcactactcaagtttaagttatctacaatagtaactaaatacaattatattattatatttcactttactaagagatgtattccaaaaaagttctgtgtaaaccaattcctacaattaaatcatatatttaaagcattaggacggacattattattaaaagaaccctaaagtaaataccttcaaaaatcaaagtattcttttcaatgtgaaaatgcagtatcttctttttctgccaccaaatgtataatataccatatacatacatgtatataaatatatatatactatctgcctttttataagtctaaacttttctacattagcttatatgtaaggcaggctacatttttatgtatgatttctttcattatagtaagatttttagttataatattgccagtctttatgatgaaaatcataaagatatgtatttttaaaagtcaatttgaaagactaacagactaacagtacctcatatagtcaacctcaatcatgtaagtaccccagatataacatttccacacaaagaaataagaatactttaaaaaggagaacatagtaagtatgtccactagtcttaagacaattacaaccaaaccttgacaaatgaggctaaactcagattggttttattatttatatgagctactttggttaactgcctcagttttcaatatttcttttgttttacctccgctagtatggcgaatgttgctgtaaagtacctttatttcttaagtgcttcagcgacagtttccgccattactaattgattaaactttattcattaaaacttcactgttttatttgtgattttttttttcacaagggctgggctagactttacagtttacacacacaaaaaaagtgcttaaagcaattaggagtgtaaacaaaactgaaatagaaaacttttaaaactgctattttctactagtttatgtacaaatgacatgctaataataaatcaaccctgtctagtctaatcttcaagcaactctactaggaaacattatcttagtttttagttaaaattgacttgaaaatatggaaagtgcatgtctttaaaggtattttataattttgactttttcctcaattgtaatcactgaggttttgctgtaactgctatttcctttcaccaagtcctcaacttttgtctcatacagaaataaaaattaaaggttaattacagacattaggcttttgtgaaggcaaaattaaagatctggattgcatgtaaatctgtatataagtagtggttccatttaattaaacaatgttaagttaaattaggcacaaatttcataatctgtttggcaccttttctaacaattgaacacaaaatatctaggttctgtttcccagagtttctatcagccaagtaaatgaaatcaaaagtagcatgtttaattaaatttcattgagttacaactgctcttttcttagtgagatgaagacatatgctatgttgtattgtcaacatttctgaaataaatagtaaagtacaaaaggtgaacttaccttgaaaaacatctagttaaaactctcatatttttcttgtaacacattttcagtttgtataatttaatgcccagacctatgtttgcctttcttattcataacaattgaagtataggcaaaaaccaattatctggattattatttcagtcctacaaataatagctaatcttacattagttaagctttctggctttgagtatatcaaaagtccaaaggataatgataacctaaaattatgtatgaatggaaagacaacacagaaatatccaaggcattcttgtaaattcaaattcctaatttcaattttaaaaatttgtataacgtaatattgaatcttaggataagaaacagttgcaattatcagtgtactcttaattccttcttaaaggctacatggtcctcaaacttgtttgtaagaagggctaggaagaagaaggagaggaatgagactaaagaagaataaaaatttccactgatgattaaaaaaaatacttccataatatcagcagctaataattgcaaaaaatttaagaaaccattaaaagttagcactaaataatctttaaaaatcacaaaaatgtgcacttcaaatattatgccagaaattttgtccaaatattcatgttcagtaaacagagacacatagttttcttgatttgaaactgttctgaggacttgagaaactagagaaaacaagaaaatagcagccccacaaatttaaaagctatcatctctaccattagcatataaccatccaaaaatctgtggaatgtttagatttactcatgaatgatgctcattcgtagaaatattttgaacaccagtagtgctatcaaggcccagtaatgttccaagataagattgttctctaggatctagcatttgttcaggtcgaactgggtgaactatatttgcaggttgaggagtaagagtatatttttccagaaaagctaaatccgctgctcgtggataatcagttgactgtggctgtggtgacagaatctcatgagaagatggtgggagtgtggtagtatgacgcactaggtcactcggagtgtcaggcatctgaactggaaccagagttactggaacacatacttcagcagatacattctgtaacatcgtcttggcttccgactgataaactttgggctggtccatatattgttttgtttctgtttgaaagattttgtcatcagatgagtactcaactggcaaggatacaagtttttcctcagaagtactgagaggatcatcaggagattttatttcatgaacatggtcaatgtggtatttcagcttgtctttccgcttaaatgttgcattacagtgctgacagttgaaaggtcgggcatcagaatgaataaccaggtgttttgttaatgttttcttaattctaaaagactgattgcaaatttgacacttgtatggtttttcacctatatgaatgaacaagaatataattagatgtaaaatgtactcaacttgataagacaatgacttcaagtagcaaacttccaatgtgaatacttgccagaacttgataatagcaataatactgtatactatcacaaaatgcagacagtacaataaactggtaaaaataagaagcttaaacattaaaaagatctgggtttgaattctgactataacacttactagccaaacattgagcaagctacccaacttctatgcctaattttctcatctgtaatatggaataataaccaacctcacagagttggtaaatggaccaaaagagaaagtagagtaatagggcttagcactgcacctagtacataataagtgcttgtaaactattgttattgcttacttttattcccatagccctcaaaaaggttaaaccaaaacatctgattttctcccccacgcaaggaggataaaaactaaaacagcaattctaattaacatggttccttggattagataacaagtagttatctctagcctgaggtcaaaataagaagagttgttcagcggaaagaacaaagaagctggacctgtttttagatccccctgagtcaggttctcacactgtagttttgttttgttttgttttatataaaacattataaattcctaggttagccaatgtggtaggcagaatgatggcctatcaaagatgtacacactctagtcccaggaagctgtagatacttatgtggtaaaagagactttgcagatcagattaaggtaagaccttgaaataggcagaccaacaggcgtacacaggtgagtcaaatctaatcataggcgtcgtagaagatggccaataactgaggaagaatgggtcagacagatgcaacatgagaactcaatcacaaattgttagctttgaaaatggaaggaggaagctagaacataaggaatgctgcggccactataagatgtgaaaggctctcagtttacaataggcaagaaaacgggaatctcagtcctggtcctacaactccaataattgattcctgtcagtaacctgaatgagcaggaaactcattattccctatagcccctggaaagaaatacagctctaccaaacacttagatttcagcttggtgtcagacttctgacctaaagaactatacggtaataaatttgtattgtttaaaccaccaaatttgtggtggtttgttaacagcagcaatagaaaactcatatatccagaaacactaatactgcagtagacacaaaggcattattttaaagccaaattagaaaattacatattaattgtcacatgagtttgttgatattttcctctcatctctccatttgaagcatcatccattctcctagtaaattaaaagataattacatcttcaagttgaatcactaatatcaaactattatttgttaaatattattgttaaatattttgtagcccattggaaccttcaaatcccactaccagaaaatttagacagattgggaggctgattacctagtactactgaatttctacttgtttctggactaacattattactgatgtcattagagaggcagtgagacatgaatacattatatagataattaacttttcagaaaaagtatttttaactgtgtatagaacacacagcatctaacatttgattttacaagtgaatgcctataatcagagataataaggaaaagctcagaggagagtgctttgaaaacaaaatgtacacttccaaaatgcaagaactcttaagtgcgttctataaatccctggcatcaatacttgtcatgcaatgagcattctataatttttttaaaaaaaataagaacacgaccacagcaatactaacaccaccaagaagcacagagtctacttttatagacaaaagtttaagttttgagtgttctctggcacaggaccagcatgatggtccttaagcattttcattaaaaaagttttataagtgcaacgatgtttttaaacttagaataatcttcaatcagttctggtgtgtaacaaatacttttagaaaactgtaatccagatgggcatattcctttgagtagtttccattatcattttaaacaactttcattttcaatagaaaaatcaatttaggtttctaaaaagatgaaaattcataaagaaaatgttaacattattaaatgtaaaaagcaaacttatagtgcttaaagatagatagcagaaaaggtgaaaactatcaacttgaaaaaatatagattaaagaaataaaccttctacagtgagagtttctatggtaaaattatgtatttaacaataatgcaagtagagtgcatctcaagatcataaatcagagacataaggcaaccaaaaggtccctttaatgacagaaaggagcattaagagcagaaggaaataaacaatactcaaagagatgtaaactaatagttaaaatcgtagaatctatgagcctttagaatttaaaaatgtcatccacagaatcatctttctttagatattaaaaattggtatgtgaaaaatgtgcattgggagacttatttcagacttatttcagacttacatcatatcatggctcttactgatgagaagggaaagataaaagatttttaaaaaataacccccacacccaaattactctttgcaggcatcaaagcacagccaagtcagccagaacctaaggggcaaggtctggtgacataggaagtatagaggtgctttcttttctcctcagtgcactttcagagtcagtctatgaggaaatagacgccaagctgcaacccagcacttgaggaaatctcattggaatgggaagataaaagttggagtttgggactaccaaagaattgaagggtcaggagcctgaaaaagaaggaacaacagagaaatgaacaaaaatatctgtatttgccaactattaaaagaaacatttgctgggtgagacagctggaaaccaagagtcagaaggctacagggttgaccaatatttcagcaatcccaagaatactgggagacagagattagagttcaggactcaccaaagtgagaaactctggtaaaaacaccatgcagtcagtagagaccccaatgcaatgatgaactaggagaaaggcagatcagaagtagccagaaacaaaacaaagtcctctcatattctatttgcttgtgagaaaaaatttaaatctaactggaagaaacacatcttcaagggcttctgtaatttttaactcacaaaatctaaagttcaatacaaagtgacccaaatgatcaaatgccaagaggggaaaaaatacaatacacacactcaaagcaaatattatatatataagactgggacatcaaaatcaatatgattaatatgtacaggacaatacaggaaaagtaaattttaccagagattggaatctatgggaaaaaaaggaaactctaaaaaagataagtgaagatgcctaatgtacatgtaatcaaagtctcaggaggaggagagagaataggcaatagcaatatttaaaaagaaaatggccaagaatcttcctaaataaaagaaagacatcaagtcacagattcaataaacactataaacctcacaaaatacaaaacacacacacacacacacacacagaaacactcaaatcaaggcacactatagtaaaacttctgaaaaccaaaaacagaaaaatctaaaaaagtagccaattaaaaagagacatttccttcaaatgagcaacaataagactgatagtatattttttcaacaaaagcaaaacaagctccaaaaccaaaaataacctatctaaagtgccaaatgaaaaaagctgctaacgtaaattctacagtcagaaaaaaaattacctatgaggtaaaataaaaacattttcagacaaataatatggtgccagcagactgcatgaaagagaacttttcatgtataaggaaaatgactccaggtggaagaacagtaaacagtaaagaataaatacatggttaaatagcaataatattaaatatttaaaacaaaaaagcgatgtctttgggttttaagagacatgaagaatttaaatacatacaatatataacagataagaaagataagggtgttataaggtatttgcagtttctggaaagtgacgaataatttcaattattttatttatcttttctagaaggtaaggtagactgtaacaatttcagaatgcacattgttatcctgggtaaccactaaaaacataatgaaagaacacataattaagaagctaactgagggaaaaatgacaacaacaatccttaatgattataaacaaagtgaagacaagagaaaaaagcatcaaggaatcaattgtgtgaacagcatgatgatacattcaagcccaaataagtgagaaatcacataatttaaatgaactaaacatacaaattaaaggacaaagatgatcaaaatagataattaaacaataccaaaagatgcatatcataaatataagtccaaagaaggcttggaagtaaaaaaagaaaaaatatttaatataaaagtatccaaaagagtgctggtaatctttatcccataataaagagcaacattttataatgatataaaagaccattcaacagaaagatatgactaatatatatctaatacatatattatattagatatataatacgtatctaatatattatatatattatatataatacgtatctaatatattatatatattatatataatacatatctaatatattatatataatacatatataatatattatatatattatatataatacatatctaatatattatatatattatatataatacatatctaatatattatatatattatatataatacatatctaatatattatatataatacatatctaatatattatatatattatatataatacatatctaatatattatatatattatatataataatataacctcaaaataaagcaaaaaatgaaaaaatcaaaagaaataaacaatttacaatcatggttacagtagagattttcacataaatatctcagtaacttacaaaataagtggtaaaaaatgaagaatgtagaatatttgaatggaatatcttctctgacaagagtagaattacactaggtatcagtaacataaacttgcttagaaaatccccacatatttaggaattgggtaatacaatttgaagtaaaccattaacgagagaacaatttagaacagacattagaaaatatttttaactgaattataatggaaatatgaaattaaaaatgaggtacggagccaggcatggtggctcatgcctgtaatgccagcactttgggaggccgaggcgggcggatcacgaggtcaggagatcgagaccatcctggctaacacggtgaaaccccgtctctactaaaaatgcaaaaaaattagccgggcatggtggcaggcgcctgtagtcccagctactcaggaggctgaggcgggagaatggcgtcaacccgggaggcggagcttgcagtgagccgagattgcaccacggcactccagcctgggtgacagagcgagactctatctcaaaaaaaaaacaaaaaaaacaacaaaaaaaagtgaggtatggaaggtaactaaagcagtatttagaggataacatggctttaaaatacatacaataaacaataagaaatactacaatttaacaacttaggcatccccataaaaaaggcagggaaaggcaaattaaaaaaaatatatatataagccagtggctgacaagatggccaaacaggaacagctccagtctgcagctcccagcaagatcaacgcagaaggcaggtgatttctgcatttccaactgaggtacccagctcatctcactgggactggctagacagtgggtgcagcccatggggggcgagcagaaccagggtggggcgttgcctcactgaggctgaacaaagagaacacatggacacagggaggggaacagcacacactaaggcctgttgggggatgggggggcctggggagggatagcataagtacaaatacctgatgtaggtgacgggttgatgggtgcaggaaaccaccatagcacgtgtatacctatgtaacaaacctgcacattctgcacatgtatcccagaacttaaagtataataataaaaaaaaagaagaaatacaagcaaaatgggagaaatacaaaagagaaagcagatatgaaaaataaaataaatcaacaaagagaaaaatcagcaaaacctagtggttctttcaaaagcttaatgaaatcaataaatccttagcaagaaaaggcatattactagtaacaggaatgacaaaaaggttatcactaaagacactatcatcactaaaaagatcaataacaaaataccccaaattctgccaatagatttcacattttagattaacagaatacctttaaagtgaataaataaattgaaaatatgacagctctttaacggtcatactaaaacacaaattaaaaaacacacttaaaaaatctttaattaggcccagcatggtggctcacacctgtaatcccagcactttgggaggccgaggtgggtagatcacaaggtcaggagttagagatcagcctggccaagatggtgaaacctcatctctacttaaaaaaaaaaaaaaattagccgggtgtggaggctggtgcctgtaatcccagctactcaggaggctgaagcaggagaatcgcttgaacccaggaggtggaggttgcggtgagccaagatcgtgctattgcactccagtgtgggcgacagagtgagactcggtctcaaaaacaacaacaacaacaaaaaaatttaattaaaacctttccctacagaaaacaaactcaggaatttattctgtcaattcttgcaaacactaatgaggaaatgatgccaattttacacaaactcctccagataactgaaaaagataaattatttcccaaatcatcttttgagaccagcatagttatgataacacagcctgtcagggacattacaagggaaaagatataggcaatatgtctcgtgaaccaaaaaaatgtacaaaatataagcaaattgaattcaattatacaggataatatatcatgaacaggatatatgtatgtgtatgtctgtatatttatgtgtttgaatgtttgtttatttttgagacaagttctcactccatcacccaggctggagtgcagtggtgccatcccagctcactgcagcctcaatttccccggctaggtgatcctcccgcctctgcctttagagtagctcagactacaggcatgcgccaccacgcttggctaatttttggaatttttgtagagaaggggttttgccatgtttcccaggctggtcttgaactcctgggctcaagcaaatcatccacctcgacttcccaaagcgctgggattacaggggtttgtgagccatcgcaccaagcatgaacaggatatattatatcttcaatacaccatgaacaggataaacaagataatatatcattagcaagatactatatcaaaccagtctgggtttattccagaaatgaggtttaatattcaaaaatcaatcagtacaatttaccacataaataaaaaaatatgatcacctcaatcaatatagaaaaaacataaaattcaacaactattcatgacaaaaactctaaataaactagggatagtaatttccttatctgactatctacaaaaaacctataaaaaatatcatacttaattgtgaattattgaaagcttttcccttgaagatgagaataagaaaataatgtctactctcaatgtttctactggagatgtgaccaaagcaataatgtgaccgaagcaacaaggtttacttcccaaccctgaaagacagagagagagagagtgtgtgttataaagactaaaaaggggaaaatgaacctgtcattattcacagataacttgtttgcatgctttgaaagttcaaaaaaagctaggggtaaactataaaatttaatagaaatttagcaaggtcactggataaaaagtcaataaacaaactcaattctattcctgtataccagaaacaaataaaaaataaaattaaaaaaaggtcaaaatttgatacaaaaatatcaaatacctaggcataaatctaatgcaaaatgtgtaagatagctacactaaaaactacaaatcatctttgaaaaaaatctaaacaaattaatggaggtgttcacagactggataatacgatgttataaaaaaaatcagttaaggaaacgttgaccacaggttcaatgaaattccaataattcctagccagtatttttgtgtgtggaaattaacagactatttctaaatttatataaaaatacaaagggacaaaaataataaacacatttgaaactaaaaagttgacaaacaaagcacacatatatgatcacttaatttacaacaatatgccaatgaaatgtagtgagaaaggatcatctttccaaaaaatagcgctaaagcaattggataaccatatgttaaaaaaagaactttcacctttacctaataacaaacaaaaacaaattatagaaagttcatggatctagataagaaagttaaaataaatcttctagaaggtaaccgcaaaaaatattaatgaccttgggttgagcaaaagtttcttaaagaggacacaaaagaactataaagaaaaaaatggtacatgacgtctttaaacttcaaaacctttgttcatcaaaagacatcattaagagtgaaaaggtaagtcatagaggagaaggtatctgtaatatatatatccggaatgtagaaagaatacctacaaatccattagaaaaagacagacactccaatttttaaaaatgagtacaagaattaatctagtattacacaaaagtagatatccaaatggccagtgagcacaagaacaggtattcaacatcaatactcatcacagaggtgcaaatcgaagccattctcagatagtgctacgtatctatcaaatggatttaaaaaaaaagtatcaaatgttggtgaaaatgtgaagcaattgagattctcatatgtggctgctggtggtgtaaactgacacaattactttgaaaaaactacttagtagtatctcctaaagtagaacatatgcatatcctatgagccaggaatcctagggccatgaatatatataagagaaaagaatgcatatgtgtatgaaaagacatggacaaggatgttcacagcagctttattcctaagagaaccaagcaaatataaaccaagtatccataaaagtagaatgaataaattgtaacagtcatatgaagatgaaaatgaaaagaaacaaattactgtcataagggaatccacacttaatatttattaggtaaaagaatccagaaaaaaaagattacatactacatgatttcacttatatgaagttcaaatagacaaaattaatttttggtgctattaatataagtcaaaatagtcatcatctttgcaaggaggttactgactgggaggagccatagagaatccttctgaaatcttggtagtgttttaatatcttgatctgagtcatgactacattgatggattcattcataaaaattaattgaactgtttgagatttgtgcactttgtgtgctatacttcaataaaaaaaagcttacaaagaaaattcaccttgaataaaaaaatcagtcaacattaaaatcaagtcctaaatttgtggtcatctttatgccaatttaatgaatatgtttcaacaagacaactgttaaagaatagatgtaatcactacattctgaggattgaacaaacaaaactcatgattagaaaaagccatctgtacaagaaaatcttatatacattttccaactaatttatctaactgtgtggtttaaaaaaaataaaatagagaagagtcataggagaacataataaatttatttactcagcaaatatttattgagtgccaaactcttcaaaagccctacgatatgcattgattgtacatacttatttgaagcaattaggtgtactgaactggccaaaactgaaacaaacacattttattgtttctccagatgaggatatggagaaaagacatactaacagaagaaaaaaggttatagaggaaatctagttaaggaaattctaaaaaacaaaaatttagcaatatatatataatgaactaagggtatcccaacaaggaaaaaaaaaatctgaagaacaaaatttttctggtcacctgctatgagggtaaggatggttcaaaatccttcaccatttcctggataaactatcccataaaattactatctaattttactctatctctacatttggcaattttccttctgattaataaactcagcaattctgcttccttgataaagataccctagctagtaaacattaatatctcattttctagaatgtaaattaatgacattctggctaatctattcccagtgtttactgtgaagaattactcacaatacttataactctcaatgcacagataaaattgagtctctgaacctataaatctcaaaaatggacttgggaacatggtgaccatttcttgcaaaagccactctgtgaagtcctgtctgggtagactgttggtcactttagattgagagttggtaaatagagttttattggaatacaggcatgcttcatctgtttacacattgtctatggctgctttcacatcacaacagcagagctgaatgattgtgacagactcttagttgcaaagcctaaaacatttactatctagccctcaacaagtatttgctgacttttgccttctattatttttccctctcatttcataatagccatagtctttgtcttattccatcatagagctaatgtcctcaattttcaaagggcagagagacttgtcttctaattccaattaactgtgaaatatccagatattgatgttccacattgtcactggccaccagccaatcactataaatcagtgtttttaaaaattttgatgcaatgtagtcagcactaaatttctactcaagttgtacagttcttaaatcatcaatggtttgaaattaactttctgtaagttcaccatctctttcaagtcatgagttctattaggttaattatttacaaaagatatggaagataccatcaagttcgtttcctcattttacacttttatttatgctctcccaaattatgcctttttttatttggagagggctgtaactttgcttttaacagcagcactgtatcagtagtaaatcctttactgcaactatttgctaataatattgcccaaattcagttatttcccattctaatatttatgaaatcacttatttttctcttccagaatagcagcttgacaaaatccgaattgaatataaaacaaagcagccataaatacataaatgggcttgtttcttaaggaaaacaaggttttaaaaatgttaatttatatgtaaaggcaaacaaggattcagacaatatataagaaagaatctaacatattctgtatttcaaaatgtagtaacattcccaacggagaaaaaagaaagattttgcaaatgacaacttctggaaagcagctgaggcaaagccttttactataactacctataaatcatgactggctatgtaaaaaggaaaatgaaacgatggtaacttggcaaacaagacaatgaggtcatatttgcattactcttttaaaagagaagaaaataaaagataaaaaggaatttaatctgaaggcttaagaaaagccttcagaaagcaaaataaagaagaatcataaaacaatcagaaaagggaaaattacaactaaaagttgagtaaatatcttatggaaaaagttttctcaagttttgtaaaatatttaaaagtattgaagcttacataatagagaatagaagatgagaatattgttcagtcatggcatgaacttcaatataataagtaaaaatcttaatggggaaaaccaaagaaatttaaccaagaacaacaaagtttaaatgcctatattttacttctgattacactatatatatctctctctatatatatatatctatgaaccactcattaaattttacctgaatgcgttcgaaaatgcatttccagacttgatttgcctttaaaaattttcttacaaacatcacattgatgaaatgttgctttatatctaagaaaataaaaagatttgagtttttcaatataattttaataactataataaatatgacaatattaataattatattaataactaacataatgaaaataagttgcaacttcatttacaactgtgtatataattctcacattaacaaagtatagaactccaaagaaacatggaaatacttttaatatgttgagcttgcctctggtttttcctcttccagttacatccaacaaacgaatctataaaaagaggtctgtagattttcaactgctttaagtcactgaacttttattattactagctatccaaatatacaaaaagaaaaattataaggtagaaacagatcaagagtggcctaaaggggaaatgaagagttgtctagaaagggacatggcagaaattttgtggtgatgaaactattccatatcttaattgtggtgatgattacatgacttgcagaattatacactaaaaagaatgaatttcactttctgtaaattacaccttaactaaatttaaaaaatagatgctcaggctgattaaaaagaatctgcggcaattttaaaacccgcatttatcaaaaaggtgaaattgctctcatcagttcatgtcctaacaaaaaaattataaatttgaactaataaataaaattttatacctaaatttaaaaatgaaatattagtcctttatttttactacaaaataatagacagaaataaagcaataagttaccgaaaagttaacttagtaagcaccacagcatagtgcctaagaagtgtctttgagttaaacagttctcaactgaaaattttattgtgagaattgagatatttacaaaataattatcatttaagtggcagttattgagaaagccataccatctcacctcagaagcaattcatatggaatgaatacatggcaaaataattaaatcaaacctgggctacttaatcttctgtaaaacagtttgctcttaacatatccattgagttttactggaaatgtttagaacattgttaccaatacgaaataccaacatactatgcctaggattttaaatgtccctcatttttcaattcatccaacccaacatttataagacaacataaaaagcactgtcctagatgaacttaattctacttgatgaaacagatggttgttttaatttttgttagagacagggtcttgttctgtcacccagactaggttgcagcagcatcataatagctcactgcagccttgaactcctgggctcaagctatccttctgcctcagcctcctgagtagctgagactacaggtacatgccaccacacccagataatttattttcttttattgttttgtagagacagggtctcactttgttgcccaggctggtgtcaaactcctgaaacaaacatttacacagataatttggattttgtgaattgaggttgtgaataataaccctggcaaaagactcctaaccagtatgcttggtttaccttattccattcatatccatggtaaatataaacagagatacaaacagggtcaccatgggcacatagagaaagaggaagtagtactcgactgggggcaattttgccccccataaaacatgtggcaatgcctgaaaacgtttttgtttttcacatctggggatacgataataagtgctactggcatataatgggtagaagccatgaatattgagaaacgtcctacaatacacaagaaaagaattacttggtccaaaatgtcaacagtgtttgggctgagaaaccttgctctatactatgaacaaagtgatattttcaacataaatatgtacaaaacactttaacttcctcacagtggacttaagataaattctgtagggccttgcatggctaagaccctatgaaaatataccttgcaattaccacatggatgctaagccatacagattttcaaggaaggagaggataaacaatttgaactgaagcagagatgtcagtaaaaaaagaacttaaaaatgcctattgatttggcaacaaggaagtcatactgataactgagcagaataagatcagaggtcagattgcaacagtggctggaatgtgaagtggttactgaggtagtcaccataaaaaagtttagaagcaaagattagaaaaataattggtggttggaggcgtgttaatcctatgtacattttgctaattatgctcaggactattaagtgaagtctcttggcactttagaacatgtctgttgtttatcatttgcccaaatgcctaaccccaaaacatgaattacttgaatgttttacacttagcaactaacctcagttaaacttggatatctaaattatactaaaaagctgatgttcaagatagcacacagcgccttcaaataaaataatattttaaatgcttagtatgattagaaacaagtttaaattctgactgcaaacatttcctaacaactgctgtcttattaagtataatatataggcagtatatttagctctcaaagagcctcagcaaccaaatgccaagattttttattaattattgttaacttgcatgtcacctccctggcctttgaattaactgaaaacaaggaggaaaatatatgcttgctgaattcttttaggtctatagagatgctacagaatgtagagaaagagaactggttaacctaacttcaattaaacaaagtaaacaaaaaaagttacaactttcctcagagacttagccaatgtaaactatgagacattttgctttttcacttacttttgccacactttctctccaaggtgtacgcttttgtaatgaacagtgagatgatccctacgaccaaaacattttccacattcttcacactgatgagctttttcaccttaaaataaagacccaaatattttcattataatatacatctcaggtttttatccccagaaacaaactatcaaacagtaagatcacatgatgtcaaatataacaggaaagtaaagccacattttattctgcactatttgctttatattccttactcaaataactttcttcaaaaaatgtatgcttaatttcatggatgtgaatcttttccccgcttggaaaaggaatcaatagccttttgttgaacacttcaaatcatacatttcaatgtaacagagcaagataaacgaaactacttcaaaacttaggaattttaaatatatatatatatatatgtctgtatatcaaacacctcaaattgatatacattaaattaagatgagggtgtcttactgtttataaaaaggacccaaacattttcagatctttgtactttacttttagaagatttttcatctgtgaggatttcttacgtttgcaatgagccaaaatacaaatataatgaaaaattctacgtaagtccaatttctcatctctattcttacatttacttacaaaggcttggttttaaaaaacaattactgtctcaataccagtgtgcaattaaagcatgtggcctctagacttagaaattaagaattctcctcataaaaataaaaaggcataattccaatggaaaaagtcatcagatttttagtatctgttagaagtggtgaaaacaactgcaacctatctcattgagatcatctcagaaaattactatctgttgcatactttatattcaaaaattatgtttaaaataataataataatcacctgttctaccgtgctcatagagatggctctttcccattattgtgctcacagagttggctctcttagcacttcctgaacatcaatctgagaggaaaatatgaaagaaatccccagaatataaaaattatacagtataaagatctgaaattggtcaggattattaaggtactcttctccaaagacagggtttcaaaattcactataatatacacttttagcacctaattttaatcatttcccttttaatatgtaagtttcaccaacttcttctcaaatccaatcaaaatgagaaaaattatcatggcttctccctttaaggaactgtcaatagcaattattagatatatccatgtaatatgcaaaatgcaaattttgagaatttatttaaaattaaactttacactttatagtcacaaagggttaccaaataattaaaattacagtgaatatgtcataaacttatgtcccttttggatgctttttaaaaaatgttttcagaaccagaattacaaagaagtgatgagcataaaccaaattattaaacttatagccaacataaacataacatcatattatgttcctttcaggtatttaaaaaggattttcgaactagcattacaaaatatggtatacctgaatgtatttttttgtgctttgtaaggtgatcatgacggataaatgtttttccacattcatcgcactcatatcttttatcatcatgatgtactcgtaagtgaagtctataaagaaaaaagaattgaacaccattaaaactggtgacatagaaggaaaaagctcaataatgaataaatgatgaataaacaatgaaaactgggctgtctactcaaccactcatacattattggctttatttctatgactttcagagtccttttcagtcttttaccacctgaccccaggtccctactcatctctttcaagaaagcatttcaacatttgtatatgctcaaaccacttctcaacattattccttcccatcatattagatcctaaatctagttcactgaatctatcaaatgtctaaggttattatctagctgactggccaagactcaaaaatataaaaagtaggagtaatcagaaaggaattagaatcagacaaatgaagtaagtgtacaagtgactaggcatatcatgatgatagcaaatgatacagtaaatggtatggtttggctctgtgttcccacccaaatctcatctcaaattgtaatccccacatattgaaggagggacctggtggcaggtaactggatcatgggggcagtttccccatgctgttcttgtaacagtcagtgagttctcacaagatctgatgctttaaaagtgttccagcagttgcccctactctctctttctcctgcttcgcctaggtaagacgtgccttgcttgcaccttcacataccgccatgattctaagtttcctgaggccttcccagccatgcggaactgtgagtcaattaaatcctttttctttgtaagttacccagtctcaagtatgtctttatagcagtgtgaaaacagactaatagagcaaataatggagaatctgtcctattctggataattgttatcaactacaaactgatatttaagaattttcttttctaagaactcaactttatgaaaattacatcttactgcttttcttcacaccaatagaacaaaatggggctcattttatagtcacccaaagacagtataaaaggctcagattattaagattaatttaacttgaattacttttatctccagagcctctctctctatatatattctaatgaaaggaatagctttcccttgcaaattgccaaaataagtgttgattttaccaagaccaactgactagactacctctaaaggggaagtattcaatttaaacttaaagcaagataaataataaatgaaagtgtatatattaaagccttgtaacattttaataaaaattaaaattgtacacacatttcagaagtagttacatattatttatttagaaaaaaacttttcataaactgcaaatatggtcaaggattcaaccacagaaataactaaataagttataatcactattaatgcacagaagacttttgaaaattgagaatggggagttttttactttgtcttactttcatattaaaatgttctttgatagtaaagagtggagaaatacactaagtttaactgacttttcattcagagaaaagtaatgaaataaatatttaaataatgccttagtaaagccttctgcaaacttggtgtgagaaaatatttaataatattttataccacagaataaagataataaaatgtttagtaaaaaaaaaatctatgcagtaaagtttttgcacaactttgcatatcataaggactaagaaatgtttcaattcaacaaagtaataagaaaatagaactaaaatagagatataattctatcttacttaataaagggaaaaaatggttttacttacctatacgaacttccatgacgaaaactttgcccacaaatactacaaaggtgaggcttttctccactgtggattctcaaatgttctttcaaagtagttctgcattaaaatatatagattcgagattttttaaatgcctatatatagtaaatagatttctggaaaacttactagaaaggtattcaagctaactgatattatggcaattctctcctctttcttacaataattttgttcttttctattctcactagtatacaaacatgcttgttatagctctctctccttaaaaacaaaaaatacttcggcctcatttgccattggtttgctcagagatttaattacacaacttaagcagactttcaagaagtataattttaaaatgctcattatgacactgaattaagttgatgtgaattttgatagagagggtttaataatatttaagtaatccagtttatcagtactatttcttccaaatatgtgcttagtatttattgaaaaaatgttttaaagcaaagaaaatgttgtagtatttctaacttccaggtgctgatgtgaaaaaggaacctatatacagaatgtaattattgctattcctaagtcttccagccccactggccctggatgggctactatgaaaccattactcctcaaagtacatcactagcaattcctacagttctaaccttcagagcttccccacatatctaaagtgctgagtaataatgaacaaagttattttaaggggaaataaagtgaaagggaaatatgactgacctctgcaggcttttagctatcactactacagtcatgtactgcataatgacatttcaatcaatgacagaccacataaacaatgctgtcccataagattacaacggagctacacaattcctataacctagtggcatcatagcacaatacattactcacatgtttgtggtgatgctgttgtagacaaacatactacattgccaactgtatataggcatagcacatacaattgtgtccagtacataattattgataatgataagcgactatgttactggtatgtatttactatactttttatcatgatttagagtgtacttcttctacttattaaaaaaaaaagaaaactaactgtaaaacagcctcagccaagtccttctagaggtattctctaagaaggcatggttaccataggacatgacagctctatgcatgtactgtccctgaagaccttccagtgggacaagatgtgcaggtggaagacagtgatattgatgatcctgaccctgtgtaggcctaggctaatgtttgtgtttgtgtcttttgtttttaaccaaaaaaaagtttaaaaagtaaaacataaaaaatttaaaaatataaaaaagcttatagaaaataaaatatctttatgcagctgtacaatgtgtgttttaagctaagtgttactttaaatgagtaagaaggttgaaaaaatcaaaagtttataaaataaaaatgttacagtaagctgctgttcatttgagggaaaaaattttaatacatttagtgaaacctaaatgtacagtgtttataaagtctacattagtgtacactaatgtccgcggccttcacattcactcaccactcactcactgactcccctagagaaacttctagtcctgcaagctctactcatgatcggtaacctacacaaacacatatattcttttttatattttataccatttttacagttctttttccatgcttaagtatgtttaaatatatcaacacttaccactgtgttacaattatctacagtattcactacagtaacatgctatacaggtttgtagcctgggagcaatgggctggctaaaccacatagcctacatgtgtagtaggctataccatctaggtttgcataagtacactctatatttgtgtgatgacaaaactgcttaacaatgcatttctccgaacatagcactatcattaagcggcgcatgactgtacttggtttgtatttcaatcccatacctagtaagtttaaaggatgaatctgaaataaaagtagagttttgccagtagatggtgctcttctacaaggcccaccaatatgacagtctgtagataacacccagctttgtggaaaatatctctaaagatattcccagatccctacctgttaaatagttatagtaaaagatggaaaggttatctttgggattcttgttttgccttgatccatctgttttatagcttccaaacctgtgtcattcatgttacatttctgttctccctatctttgtagcttattctttttaaaaaacaaacaaaaacccttaatctagttttagtggggtttcagaaagacataaaatatgtacattaaatcatccatctaaaacctgcaaatcttgaatccatgtcatcttccataacatttgtgtaattccttttttccttatatttcaaactaaagcacaattcatgcattttgtgtcttatgttaccctaattcctataaatcatattgattgattatttctacataatagtactaggatttttgtgggtgtgcagataattcttcacctttctcgtactgattttccacagataaagcaagtccattttctctttccaccatgagtacattctatatgacgtttcaaatttccagtgtcgttaaactggcgaccacatatatcacatggaaaaggacctaaaaaggaaaaaaaaaaagtgtgcatttaaagtttaaagaggagatactaagttaaatttaataggtatgctgtaagttcatgcctatcctattggtgcatatgtcataatacactgcaatttctcttctaggttatttattcctagaataacatttccatatccctataaccaagtatagggctcagcatctaacaaacagaatgaatgctgaacaaactaatgagttaacaaattgaaatggccaattcctggtttgaaatcagactggaacaaagtagaaatggctgcatactaaagtttttgggaaagcgggtaataaaaaactttggaagaatgaatggaggacttaagagagtttatagtttggaaatatttctatttggtgatacaaaattaagcccaggcctctcatagtaacactgacattagttggatactgaatttcactatgattttaccaaataaaaaactggagacaagacagtgttctactgactgacaaaatataagaaagacaaagaatgcgtaaaaaagaagtttagtaaatacagctcaaagaagctatatattagcaagaagatgtctcagtatatggaaggacaaactgaagaaagaattctaatgaattaatcataatagcacaatggaaagaaaatagaattaagatgctgaaattcagaaacgtaactataagcaaaattgcttggtagccacagtagctctgggtaaatttcaatgtgttttacacattagaaatgagagatgacctcaaaatgtacattgtattaagtatctttaatggattctcatttaaaacctctaatatttcatttttcatgggatctaaatattttactcatttattaactcattcaacaagtatttatttattcttaattcacatcaagcactgtgttaagtattatgaaaaatctctccacctcctctgaaccaaaaaaaggctctaagaaattgagaaaacgaaagtcagtacttacatagctgaaaaaaaaaggtgaagtaaatacacgtgccaaaataaggttattatgcaaaatgtgtggttagtcaaagaatgaaatatctactagtaaaactttttataaaatatgactatctgtatagctggcggcttcagctgggcaaaggaagaaatgaagcattctctttaatgttcagttacttatcaggattcttcaaagaaaataacaactgcatttttttcctatactggatatccagttttgcatgcagctaaacctattttaaacaacctcctgggctcaagcaatccttccacttcagcctcccctcttttatttatttattttttctatatagacagtatctcactaggttgcccaggctggtctcaaactcctgggctcaagtgatcctcccacctgtctcccaaagtgctgagattacagacgtgagtcaccatgcctggccaagttctgacttttaaaagccaaactacaacttttgcacatatatattcatatatattaaaaattcttctcctttaactgttcagattgcattaaatacatatctttccctctgatttaacagaatatatattcctaatgtagacagtatgagtattgctttgaataatctaaagcagtcattatcaaaatgtgatatctagaccatttgcaccagcactacctgggaacttgtgcaaattgcaaactgtacaagttccaaatgcaaatacaaatttggggccatacgccagacctatctgagtcagacactctgggaaatccgttttaataaggtctccaggtgcttgtgatatataccaaactgcatgaagcacttatctgaagtgtacagtgattcaagggaacagaaacatagagacggaatgcaaaagaagctctctctatatatatataatattgctttgagtattttatatatgcatgtatacatatatgtatacatatgtacacacacacaaatacagaaaatacttataacaatactctatttggtttattaataatagtggcccaaaatgcaaagctactatgtcacaaaccatatttctcaaaggtcttggaaagactgaaaactataatactagaaatgacaatacattcagagaaagagaatgaaaactatgcctggctctacatttggcacttatacagtacctcatataatcctcacaacagtatctaagaagtacgtattaacttcattttaacaaatgaggaaactggaagtctgagaggctgttccagatcacctagtaagtggctaagtcagactcagaaaacaaggctggctagaaagtcttctacttccacttctacatcatgccacacctattaaactttttcttctagtaaatgtcaacctaacccagtaaatgtcaactcttattaaaaatcatacaaattacctaatcagttgtaaaatatttgtgggtgtacagtagtaaaatgtaatgatttatttactagttagattacctattgcgccgtaatttaatttggcagaaatagtatccccagatcctaacacagagctgatcatacatttagcagttgctccataaatatttactattttgaatgtcgaatgtactttccttgtatattttccgccatgaacattagatagcaggggagctaagccttactgcctaacatttctggaacacctctcattattggtatgctgcagcatgatagaagaatctcttaacaagtcataaaaatcttccagttcaaccacttctgaagaatgccctcttcaccagctctaacagttagtaaggtaagttcagcatatgcttgtatacttgtataatttcactgatgggaaagtaactattgtgtaagacaagttactttagtttgtaagttccaacacttaaaaagttattatagttccctctgatgtttctacaaggtagaaccaaaaagattacctaaaattttcaaatcaaaaagaaggaagtgcaccaattctccaataaaaactactttttctggaactaaactctaaagaaatttctcccatgaaacagaatcatgaacatgtcaactacagtttggtaactataaaaactgtttctacatgatggcttcttagaagtgctgaaactgaatactatgaaagaacaacttagtaaaggcaatttggagagattaagcttcaggtaaataatcttccaacatatactagtcttatatactagactcacaaagattaagaatcccttgttgcgcaatagtgccttgaaagtatttgaagacagctgctctatcttcctttcccagacaaaaaatttcaaggaccatgtttttcacatgataagatttcaagactctacatcaccaaaattacccatctctaaaatatatatttgtcaatatccatcttaaatgtggtatacagaaatgaatgcaattttccagatcaattcaaaatcagactattatttccctaattctgaaaaatacacttttattaatatagtttaaaactacatttgttttgtaaatcatatcacattattggttcacactgtgtccaaaaagcctctgcctttaagatcatctgtaaagtgagtagtttggatgataaactattttatagttcttaaagacttaatgactaaaagtcagatcacttccttaagtttacaactatttatttatttatttatttatttatttatatttttgagacagaatttcgctcttgttgcccaggctggtgtgcaatagcgcgatcttgactcaccacaacctccgcctcttgggttcaagctattctcctgcctcagcctcctgagtagctgggattacaggcgtccgccaccacgcccagctaattttgtatttttagtagagtcaaggtttctccatgttggtcaggctagtctcgaactcctgacctcaggtgatctgccagctttggcctcccaaagtgctggcattacaggcgtgagtcaccgcacacagcctaactttgtatttattcttaattaattttaacttaatttgttttgacctattgtacagcatacagattttttaaatatgtttattttctggtatactaaatacccttgatagctttatgacatctataaatttcataagcaatgaagtgtatatttttatctaagttgttaacaaaagtaatgaactgaacatggagaggacctctacctggaatgacaaaattcattagtgggattaacaatcagaaatttaccaaagtataccaccatctagaccacaactctccaccttggccataagcattagggaggtaattcattaaatactatagcgcattccaaatatactaagtttattctactccttgaaaaattatctttttccaaaacaagaatgtctcattctaagcactcacaaacctatgcaacatcaactatgaataaatgcacagtttatgcccactggcacatttgtcaccaaaaaaaaaaacaaaccaaaaaaaccccccaacacacacaaaaaaacacatttacacatctccaagaactgtgacatatacagtactcctttcaatttatatgactttctttgcctaagccaatactcaaggttcaccaagagtagttcaacaatcccccaaaatgaaatatttaggtataaatctaacaacataggtacaagatctatatgagaaaactacaaaactcggatgaaagaaatcaaagaaaaacgaaataaatgaagagatatcccatgttcatggaaagaaagactcaacttcacaacatgatctatacattcaatgcaatcccaatcaaaatcccagaaagtcattttgtggatatcaacaaactgattctaaagttaatatggaaaggcaaaagatccagaagagccaacacaacactgaaggagaaaaataaggttggagggctgacattacttggctttaaatcttactataaagttacagtaatcaagacagtgtagtattggcaaaaataaaaaataaaaaaaaaagatcaacagaacagaatacagagcccagaaacagacctacataaatatggtcaactaatctttcacaaagaagcagagccaatacaatatagtaaagatagtctttttaagaaatggtcctagtacaaatggatatccacagacaaaaaaaaaaaaaatacatctagacacagaccttacatcctttgcaaaagtgaactcaaaatgaatcacaaaaatgtagatgaccttaggtttggcaatgacttcgcacaatccatgaaagaaacaatggataaattggacttaattaaaattttcctctgtcacagaaactgtcaagatgatgaaaagtcacagatgaaaggaaatacttgaaaagaaatatctgataagtgttatccaaaatatacaaagaactctcaaaactcaacaataagtaagcaacttgattaaaaaatgggccagccaggcgtggtggctcacgcctgtaatcccagcactttgggaggccgaggtgggtgggtcacctgaggtcaggagttcaagaccagcctgagtaacctggtgaaaccccatctctattaaaaatacaaaaaacttagctggacatggtggcaggcgcctgtaatcccagctactctggaggctgaggcaggagaatcacttgaacctgggaggtggaggttgcagtaagccaagattgcgccattacactccagcctgggcaacagagcaagactctgtcacaaaaaaacaaacaaaaaaacaaaaaaaccaaaaaaaattgggccaaagactgaacagacaccacaccaaagatatacagatggtaaataaacatgaaaagatgctccacattatatgcatcaggaaaatgcaaatcaatgcaatgagataccactacaaacctattacaatggccaaaatttggaacacagaaaacaccaaatgctggcaagaacatgaagtgacagacattctcatgggaatgtaaaatgatacaactactttggaagacaatttgacagtttcttacaaactaattatactcttaccatctgatccagcccctgttttccaaggtatttaaccaaaggaattgaaaatctaagtctacataaaagcctacacaaagatgtttatagcaattttatttataattgccaaaacttggaagcaaccaagatatccttcagtgagcgaatggataaactgtggtatatccagacaatggaataaagtcctccctaggtatccatgagggactggttccaggatggcccaggataccaaaatccatggatgctccagtccgttatctaaagtggtgtagtatttacatggaaactatgcacatcatcccatatactttaaatcatctcttgattacttaatactaatacaatggaaatgtgatgtaaatcactgttatactatattttaaaatgtgtattattttttattgttgtattgttatgttttgttatttttttttaatatctccaatccacagttggctgaatccacagacatggcacttatagatatggagggccaattgtatcatttagcactatactaagtggaagaaggcaacctgaaaaggcaacacagtgtatgattccaaccatatgacattctggaaaaggtaaaactatggagacagtaaaaagatcatcaaatagtagatgaggtatctaaaaaaaatgaaccaacaaacaaaatacaaaggtcagtggttgccaggggttggtgtgggagacagatggagaagcacagggaaatttcggggcagtgaaactattctgtatgatactataatgatacccgtcattacaggtttgtctaaaacaacacaaaatacaatactaagagtgaaccctagtctaaactagagtctttgggcgattatgatgtaccaacgtaggttcttcgattgtaacaaacgtaccactctggtgaagaactgctgataatgggggaggctgtgcatatgtggaggcatagggcatatgggaaatatctattccttcctctcaattttgctgtgaacctaaaaccactcttaaaaagtcttttagaagaaaaagagtaattcagctatagaaggctcctccagcatgatgtgataattaaaattgtcatgactgccttaagaaaaagtaacttgcttacccagatggaacttttcttgatgctttaaccgagcaaaccgtgatttaaaatgttcttcacaataggtacacttaaaaggtttatcttgagaatgtagaatcatatgttcctccaagtgtggtcttcgagtaaaagatttcttacaaatctaaattaaaatgcaaacaaaatgttaagagaacctgaattaaaaattgtaatattaagcttgtaatgagaagaaaaccatataaattcaataaagagacttttctcccaacagaaaacttacaaaaagtaaaattcaattctaattgtgcagaaaaaaatgctctagaggaagtaaggaatgattttaaattagtactaaaggtagctgaatttcaactctttacatttctagtagggatacagaataatcatactatcttaattctagtcagaatttctaaatccatgaaatatattgttttttagtcacttatgtcaggaataaaaggttttttcagtgttgccatatatttgaataagaatctgaataagaagtcacagaaaaattattttaaagtgtatctcttgaagtggtcagtctaaaaatttgacattcatcaggtttttaaaaagaggtaggctgctatagtaacagcaccaacaataatgacatagcacatattatatataccaggcacaacgctaagtaattcatggattatttttcttgattctcacaataattctgtgagatagatgcaactggcattattaacattttatagccaaggatgatgaaacttggtaaggggaagacactatcttatgcagactaaaatactgtaataaataattaacttcaatttctagaagctgaaatcagagaaattgtgagaaatttgctgtatatataaattgaatcttggattaaagaaggcaaaaataacagctagggatgccttaaaaaagattaacctaggctgggcacagcagctcacccctgtaatcccgggaagcactttgggaggccgagacgggtagatcacctggggtcagaacttcaagatcggcctggccaacatagtgaaaccccatcactactaaaaatacaaaaattagttgggcgtggtagtgtgcacctgtagtcccagctactcgggaggctgaggcacaagaatcacttgaacccaggaggaggaggttgcagcgagccaagatcacaccactgcactccagcctgggtgacaaagcgagactccgtctcaaaaaaaaaaaaaaattaatgtaaatactgaaaaaataattagaggtactgtagaataaagatgtccataaatacgatggtactcctcctgttaaaaaatggaatctaattcccttctctttaaatctacccaggttggagtgatttgtttggccaacaaaatgtagtagaagtgattttcagagacttctgagactatgccataaagtctaatagtttttatctaggtttcttggaacacatactcactcttggaacttagttgctatgctagaaagaagctcaagaagcctcaaaaaaagaccgaagtagagaagaactaaggttcctggtaaacagtccttgctgagattctcgccaagaacaaacaccaagtgacctgtcacgtgggtgggccactttgttttttttgagatggagtctggctctgtcgcccaggctggagtgcagtggtgtcatcttggctcactgcaacctctgcctcccgagttcaagtgattctcttgcctcagtctccagagcaactgggattacaggcatgtgccaccatgcccagctaatttttttttatttttagtagagatggggttttgccatgttggccagattggtctcgaactcctgacctcaggtgatccactcgcctaggcctcccaaagtgctaagattacaggcatgaaccaccatactcggccttgagtgagccactctggaagtgttcccagaccagaccagaccatgcactagttgaaaacagctgagtgacttcagctgacaacaagcagaacagaagaattaacctagcaaatccctgccccaaatttggattcctaacacacaaaagggtgagacatatcaaaatagttatttaaggccactaagttttgatatagtttattatgttaacaccacatacccagaaatgggggagaaagtctaacattttatactctgtgcaacagtaatgtcacagtttatatacataaccataaatacatggtatggtgattacaatgaaaataaaaactaggatttccactgtttaggtccatcatctaaaaactaacctataccaggcttaatttacaaaatatattagaataattttatataaaaggaaaattctaaaagtgagataagctaagtcacattactttaaaacctaattactttacttccccaaaagacgttgcatttactttggttttctaatttgttttaattaaaaactcttacatcacatttccaactttcactcttagtcttcttaatggaaataaattcttgtgcattttcaggatgaaatctatcagaggaaaagaaaaagattattaggaaaaggttatattagttaaatcaatattccatgtgaatatgttgacagtaattaccaggatcaagtactgattcctttcataatgagacaagtaggcatagatgagctctttaagaaggtatcattatcattttaaacacattcaggaacctagctctttatagataaactgaaaggtaatatacctgattttttttagtccagatttcagtaaatttaatttttagagttaaatatataatactctattaaatattatttatctcacaaactgttacacattaaagacaatgttgagtataagaataaatttcttgaccgggcgtggtggctcacacctgtaatcccagcactttgggaggtcaaggcgggcagatcacttgagcctaggagtttgagaccagcctgggcaatatagtgaaacccagtctctacaaaaaatacaaaaattagctgggcatggtgcacgcctgtagttccagctactcaggaggctgaaatgggaggattgattgaacccaggagttagaggttgcagtgagctgagattgtaccactgccctccagcctgggcgacacagtgaagccctacttcaaaaaaaaaaaaaaaaaaaaaagagaaagaaacttatcagagtataaaaaccacatatttctgaagacagacttgccaaaacccaagaaagaaaacaggataatcaaaatactgtatctcaatgaatctccaatgaaagaattggagataagcactttatagatgtttttagctttccacatatttaaattaaaaggcacaataaagtatattatggaagcaagataatacttgcctcttaacatgcttggctaaagtcttcttgcttgcatgaagtttattacaataagggcacttgtgctccttcttatgaaattctgtttcattactgtgcttctttctgtgaacagttaggttagactttgttgaatagcgctggtgacaaatatcacactcaaagggcttctcacctgtgtgaacacgggtgtggctctcatattttcctataaaaaaagaaaaattaaaattaaatttagtacatttgctatactgtgattggaatttgagagtggaataaaacctcatgatttagcaaacttatatacacatccaaatccacacacaaaactagaaaaaagtttacgtaaatttctacctctgataaacctaatgacttactattttgtgcttcctgttcaaagtgtacttttcctcaaaaacttgagtcattaaaaaaaaatattcatgatcacacattttaaaaattaagaggtttgatacattttctgaaaactgttggaaaattctctgaaacttaaatttttaaatgtatttttaaacttaaaattaacttttagcaaaagatcaattcatcatttaagatttattatgttcatatttttggtatctctgtgggtccatacacctggatatggatactggctctctaaatagagggttacgtgaccttggacaagtaacctctatatgcctcaaatcttcctcatctgaaaaactgcggtaataacagaatttacctaatagaactgttgtaataataaacaaattcatacacataatgcacttacaacagtgtcgaacacataagttatcaattactgttgtctattattattactgggtaatctgtgtactgtgaatatgcacatctagtaatttgaattagaaattttgaaatatatttccaagcaaaaggcaataaaaataggaaaataaatcaacatgaaaggtaactcttaattaaaaacttagctttgctctctcctgaaaaataaatgtataaataaatttttcttcaggtgaaaactaatgtgaaagtatagcatttcagtcatatactttaaaaaggatacatcctatgtataacatgaaaattatgaaaaatccaaaatattccaaggccactgaggaaagatataatcataattatgtgtctacccaataaaataaaataaattcaataatttagtaaatatatatacaactgattttattaagcaagtaatatcatattttctaaaaataataaaaaaactgaggaaaggaaaccaatgtatttccttaaggtaagggaagaatgttaatcacaagcaaagaaaacagaagtacaatgaaaaattaggtatttaggtgtagaacatagtaatggtatatgcatatctgatatgcatatagtcagaaaactcagtcaatatttaggcatctcctaaattagttgcgcgattttaatcaagctaataatttaacctctctttacttgcgttagtaacacttcatggggttgtgacaagtaaatacgttaacaaatacacacaacaacacttaaaacatcctggcacagccaggcacggtggctcatgcctgtaatctcagcactttgggaggccaaggtgggtgaacacttgaggtcatgagtttgagaccagcctggccagcatggcaaaaccccaactctacaaaaaaacaaacaaaaaaaaaaccaaaaaaacaaaaaaacccagcacatagtaagcactaataaatattaactgtcatcattattatcatacgggttactagtcataatatggacatgtaggtatacctcaaatataaacatggatacatctgatttatgaatatctgttataacaaatcaaactagggtttcagctctctgataacattggatacacttggctctttccccttgccactgctaaaattgcttagtatctcagttccctctctgctactgctagagtatactcaaccatttacacatacatgtacacatcctaccaccaccacctcccccgctgtgttcaaggaatcagaccaaatactgggaaaagacagaggtcactatatgggtttttaagtattcccttattgtgaaagttttcacatttcatttttaactcaccttttaaattatgtaaataatcatactgatatttaaaaaactgtaaaatcaaaagtatacagtctgattttttaataactaaacttgtgatttttggaacaggtccatttttaactggggattgactgtgcatgtttagcacagattctcaagattgagagacaacttatcaacctcctaatgcttaaatcttctcatctttctttcttttttttttgagacggagttttgctcttgtccaggctggagtgcactggcgcgatctcggctcactgcaacctctgcctcccgggttcaagcgattctcctgactcagcctcctgagtagcagggattgcaggcacatgctatacgcccagctaattttttgtatttttagtagacacgggtttcatcatattggtcaggctggtctcgaactcctgacctcaggtgatccgtccacctcggcctcccaaagtgctgggattacaggcaggagccactgcgcctggacctcatttttatttctaacaaaagtagcagcataataaaaatcttaaagtatgaaaaatttttcaacaaatcatttacttgctatgaaaatgtctttgctgaaaagatgttaaattaataattagcagcattctccctctatttaaaattgagaatttcttctatgcatgcaaataaaaattaagttacttatagctaaatactgaagtcattgaaatggcagttatattaaaaattaaaatcactttgactagtaagcttccatttccctacagaccaggagagataaagatttaagcaagaaaaaaaaaaaaaaagaagaagaagaaggaagtttgggaatttaaactgaaatagccaaatttagaaaaatctcatgatttttttaaaaaccattttaaataaattcagccaaatcaagcagaccaatgataatacagaaatttgagtaagtaaaataattttttagttattaattcaaattttatgcacttaggctttgcatggcctgttatcaccatggatttgaatttctgaacaagaacaggagagacaacttttgacggaatgctggacccagaagagctaggtagatctctacagactagtgggaaaatatatgttaatcttcgattttcatgtttaaatcatttggtagggttttttctttgtttttgttttgtttcgttttgttttttgccagggggagggcactcctcagcacaaacagtaaacatctacaactgtttctctactttcatggagtggggcattcaataataatgtataaatcaaaatgttcacttaaaacttatcaaagtttcaatttcaaaaacagtattccttcacagaatattaaactacacccaagcattcctgatcctgaacagaaaatacataacattttataacataagaaattttatccacagcatttttctgaactgaatcccaatatgaatcatgtctcaaatcagaagtcataaattaaagatattttcacatgaacaaatttgaccttatacagagtttactcccacatgggtcatataaaattaccaatgttagattttgtatgcagtttttacaaagagaaatatcaccagatgagttcattatatatctgatattgctacatcttaaaatgtaccttgaaatattcatatgagttagtctaaagaatatgtaattaaaatacttagccttagagagttgtgccattgttataacccttttctattaagaactaagtggaatatctgcacgatggactagtcacatttttttttaaaggtataaaacatgttctacctctagaagagattgtgaatttaatctaatgaaagattttagttctctgtggaaacaataaaaaagatgaattatccaaattttctctctcaccccatctgtcatctccctatttttgcctgtttatccactaggtttttggtataaggggaaaggtcaaaggactcttatttgcatgataatttgctgagaggaagacagccggtagcctaaggaaaaatataactggaagaaaggataaaagatgcaaagtaatggaatcaaattagtagattacttattgtggaactaatggttccagcagaaggtctcaaagcttatgcatctctcataaacccaccccaaagaagccaagttagaagcttaaagaaggctaattggcttcttacaagcccaaagtcaagccagataccaacttttcaacttagctcaaataaacaagtgcttactaaaaatttatttgaaatgacctgagatgttacaaagaatactagccaagagtaagatacgtaacctccaggctcacaatctaagacagataaataccccaaaatctgggtggcattttaaaattctacgaaaggaatgtggatgatatgagaataatgggaaggtggcgctcgaactcctgtgttgttatttttttaaataaactgtacttctaataataaagatggtaagagaggacacttaagacacatggatcttctgctacatattcttttcattctactcatcaccagtctacttagtctacattcaatgtatcataactctctgctttactctcattctacatcccactcccaacgccactcatcttccaagtctaagctacattatcattctggtcctttgttatatgctccttcttgtctccctggctcttttttcatccctttttccaatttccttctccacactgaagccaccatgatctttctaaaattcttacaggccatggtttcctttgtaaaattcttttcaacagtccctatcacctactgaataaagtctagtctagttaaattagattgtccaaagtatacacctctgtagaacatacaagacatacaaaatctgaccaccactttcttgcccaccttcatctcctgttattttcactatgcctccctgaccaccttgaaaccactcacacttgagcaatttccagaatacaacatacctcaatgcctttgcacatgctggtccttctgtcttgtaaactgttccctattctttgagtctcagctcaaatactatctgctctgagacacttctcctgatttccttagtcttctatacttatcctgataaaattatctttattgtaacatgattgtgttttttcatgtacccattaaactctaaggttcttgatgacagagaatatatcatttcatatttgtttaataatgtttggcagcttagagacaataaatatgctagaacacctacattttgtgcaatattttaagtgattccctagaattaccccatttaatcctcataataacctttccctaccccatgagaaggtactattagcatcacattagcatcatctcactttacttatgaggaaacaaaaacacagacaggttaagtaactcacccaagaacaggattccaaaaaaaccaagcagtcttatattactataactcaggctttttaactagcgatatatgaataagatatagatagatatagatatagatacactaaggtaatagagatgagaaactactggtgaaaagcaagcagcagggctaaacaaaaaagaggaatgggtagaagagtgacataatgtaaaatacattcagaaaggtcagtcagaaataaacctacaatgtgacctactgattcccacaattatctgggctgaacttggaaaaaaaggaaggggaaggggacaggagggagagagggagggaaggagggagggagggagggagcgagggagggaggaaggaaggaaggaaggagcaaaatgtcctcctcttagtaaatcagcacctcaatcttgagcagtattttcccaaattgtgcagaaaactctagtttcctaggatgctcaaagaagtacctccaaagtatcttgcggtaaaatgatttaaggaaatactgggttaagcaaaatcaacaggtttctttactaaagaattgggcagttaaaaccgattgtgaattacgtagttcccaatcttacttgaacacagaagccttctcttacatagcatgtcacgggactaatgttcagtgggacagtttgagatatttgtgttgcacctacaataccatttgtgaactcatccctattcactcatctccaagtcaaattaagacaattaaggcagaatacaggaagcatgcactaagagtacaaagtctaagaagtctattggaaagatgcaatgttctcaggtacttcaacccaaaagctgttctcacctctatacatatcttcacagtatttgtttacagttctacaacagcattttatccagtctaactttaacaacttacttgtatacatatgctcttggaattgttactgaagaagttattttattcatgtttacacacagcctcagttaaaatattaataattattaaattagattgtccaaagtattctgattcagagagaaaattattccaaaaaacattataaaaagcaaaaagcagataccactgttatgtcagcgtataatgcaacatctttttacagcaaatgatcaccaattccttaaaaaaccaatttccgcctatatcaataacataagtaagttaacactgtaagacatatggggatatattaaactgggtaagtaatttctaccaggtcagattgcagtaatttttttttatcattatatgtggtagaatatatttcacaatttcataacttcaatttacctggaagcttaattgttgcaactgaaaagtttacattagaacagttcatctcagacacttccaagaattatcttacctagcaaatattagacaacttgaaattaaacatgtactgacataaaacttaaagtgatagactacatttcctcaaattcttttctaaaagaaaaaaagttgatgtattcattattataacaaccaaagcttcttggccttttggctaaagtcacatgtataatataaccagagtgctactaactaggatactacctaaagtctctatctacagtattaaattacattcatttcaattttatccttcaccatagtttaatataaaacatcccctttctattaaatagtgctagatactggaaaagtgacaacatttataactcatatattaccatgcacggggaaaacagtatacacattattaaatctaatataatccacttttttaatgagttaaaaatagtatttatcactggaattaaaccggcatataaatcaaagctctacatgataattattgacactctggagtctttcatagcaaatacatgatctaatgatgtgtcactgggagatgaagaaaagtaaaggctaatataaatacttaaattaattcctgaatcacaacaactttaaagtaacaggataaacactattgaaaaccaaggtattctccctacttaaacagtctttttagaagttactttccaagtttagtttttatttatcacctttaaaatatccaagaaaagtaagtgattagagatagaaaaccagttttcttttcttacctattcggtcaaatgttttatcacatttaggacactgcaatatttttttgttgctgttctgaatgaccactggagttaacccctcatgaacatttcctacagaatcaccagcctcaggttcttcttctgcatcattatgatccttttcactttgttcttcaatgtcagagtactcatctgacatctcctcctctagctcatcttcttcagcattatattcacttccagggtcctcagaatcatttctatctgacttttccttatcaaaattttcttgattcaaattgtctgacccatcaccactttcctgttcatcatcgctggtgtcatcaaacttaacagggcacttccgattcctttttgatcttcttgcggagaaacttctctccagcatttttaacccatgttttttccctaataaaagggacctatgggttttagccaaatgattctctaaagactttttataacaaaaatgtctactacagaatttgcactgatgattatttgatagtcttccagttaattcatttagtgtttcttctggtgatgacttttcagttagctctgaatgaaaaggggcaacattttcgttatttaacaacttcactgcatctataatgtccaaaaattttgcagcctctaaaacaagaggtatttcatatttgtacacaaaaaattctgatgtgtaaagaaattcaagcaaatgctgaaaaactgaatgtgttacgtgatccagggtgacaacatcagtgcttggatttttgctcaaacacgcatgaaaataactactgccgacagcaacgactactttatgtgcactaaattcttttccttccactatgataagtaaatcacaaaaagatggttgcttctgcctatcatcatttaaatattttagcaaattcttattatactgcaaagaacttaaaagctttctctgatctggagagggaggaagttcctggtaacagtgaagagcttcaggagttggtcttcctgcagaatgagtataggtcacttggtcacactccactgcaacatttccttctgaagaatctttatgatagcctagatggatcttctcaagatttgaagtaacctttctcctcttcttcattgcagtacagcaatttcagaacaagaaacttcataagtgtcttaagtgatttataaaggaaaactagattgtcttggataacagcttctgaaggggcgtgcccaagggtttcatggtctgcaaaagagtgagaaccacgtaaaataactccatggcaaagcaatgctaaatcagccaacggcaatcatcaacgaattctttctaattataactgaatgatgataaaatcacagcttacactcattcgtggcaaagattttggggcggagaacaaggagggccgggtttagaaaaggcagccaacaaaagaataattttaaaggaacccaggcacaccttccaggcctgattcacgaacagggtgaaaatacccgggcagaaaggggagagatcttccaagatcgttgacggtgcgggttgaggaggctgaagtcgtggtttaggggtgctgggatggtgacaataaggccgtggcggccgcgagatccgagtctctccattaacatgctttcctcgggcgggcaaggcacagctcttcaggaatagagagcgtccctcagccaaagccacccggtgagagacggccccaggaggggcgcagagcagaagtggggtcaaccagagggacgactaaaggaagcagaagagctttcccaggcccgggcaaggcggagaatgcgcttgtagtcggcgatcccgctacccttcccacccagtttccctgggaaaacgccccacagatccattaccgggaacccaaggctcccccgctggctcccagcagctgagctccactctgggcgcgctcgctcctgcgcctacccacttccgggttcagccccccacctcaccaccccctcccctccctccgctccttcccctcccagagctccgccgcctccgcagccaacgaacacgtcaaccgctcgcgcagcctccaagccctcctgagagagaccggcgcgcgaccctgcgcgaacgagtgcgcatgtgcgcgcacgccgctttacgcatgctccttaagttccccgtactccctcggagaccctagctacacgccgaatccgttactccgggttttcgcagtggctcggtggcctaccccgatcgaaaccgtgaggcttttgctgagggagggcaatgggagaggggaggatggacgcagagtttagaagtagtttgccgaggtgcagtcgcacgaatggatttcatcctcactggtgtatttaatagtttgtaatctaccaaacagcaactgccagaagccagtcccagctaacctactggcgtgcacgaaagaacccagcgatgctgatctcgtttcgttatttttctgacttaaacggttaaatctaaacgcgattactaagaaaaaaaattttatacctatcattgtacacagaaaaaaaatagaaaaatgtttatataagcgtaaagctggtaggacaggaaaggaagccgaaacaaaaagtaaagaaaaatccacaaggacaacttttggagctagtgcctgagattttggatttctgagtcccaggaggtgctgatatcatttatctgcggactcgtattatgaagcgcaaggtcctagagcgtgtgattttacaggcataaggaatataagatgaaggctgagacaaaataggatgggtggcctaattttcttcccccaccctctcgtccctcccatacacatacaacctgacaactaaaagggccgcactccatggaagaactcctgcagagttggactccccaccggcaaacaggaggaggctatgaagaaacttgcctgtctccgattttcttgggaattgaaaaaataaaatttttaagcctttcatgaaaattcctagcaaaaactcacattcacatggatttgcacaaagattcatatcacctgtgagactcatcccacaaaaactagccacactgaaaagagagaaaaatgtaaaaccaagatagaaaaaggatggtagtctgcagatattgcaattatcagaaacaagtatatttaaagaaatgaagggaaatgaaaaaattatcaaaaataactaagcagattaaaagaataatttagaagtgaaagctatcattatcttagtacttagaacgttgatggaaatgtgtttttattaaaacagaagggctgatccaagatagaaaaatataaatccaaagaaatagaaaaaattctgataagagcaaataatgaaatagtgaaatatacaataaagagaaccaatagaccaaaaatttgggtgttgggatatgtaaaaggtttagaaacttttggaaagatttgatattgccagttttacccaactcttcaaaaaatttaaaatgggtggcaggggcaggtcacatctcatgagacaagcataatgattatacccaaacttgaaaatacgttgcaggaaatgaacattataggtcaaactcataaaattaggtgcaaaaatcgtagacctacaagtgatgtctttgtggtgtgtgtgtgtgtgtgtgtctgtgtgtgtgtgtgtgacggagagagagagagatacaactgaattggatttaataaaggaatgaaagatttagttagcatttaaaaataaacgtgtaattcttcgtattaacagaatgaaagatgaaaaccattgatcatctcaatagatgcagaaaaatatttgataaatttaacacatgattttttaaaaatctcaagcaaggattagaaaatggcttaatataaatagaagctactgaaaaatttttaaatggagcaaatatcacacttaatgaaagattgaaaacttccacggaatttgagaataaaccaagtatgctttctatcattacttgactttttttttctttttttgagacagtctcgctctgtcacccaggctggagtgcagtggtgctatcttggctcactgcaacctccgcttcccgggtttaagcaattctcctgcctcagcctcagcctcccgagtagtgtgactacaggcgcatgctaccacaccgggctaatttttgtatttttagtagagaggggctttcattatgttggccaggctggtcttgaactcctgacctcaggtgatccacccgccttggcctcccaaagagctgggattataggtgtgagccatggcgactggcctacttgacattttaatagaggccttacctaggagaaataagcataagtaagaaatagaatgtataagttttggaaaggaagactaaaattaatcattatatgttttaagtatgttggtgccatatttagatatttagaaaaaatggttttaaatcctatggattaattacttttgactttttaatttcaatatgtttaggggaacaggtggtatttggttacgtgaataagttctttagtggtgatttctgagattttggtgcacccatcatccaagtagtacacactatacctaatgtgtagccttttatccctcacccccctcccaccctttccctgaatccccagagtccattgtattattcttatgcctttgcatcctcatagtttagctcccacttatgagtgagaacatatgatatttggttttccattcctgagttacttcacttagaataatagtctccaatccatgttgctgtgaatgccattattttgttcctttttatagctgagtagtaatccataatatatatgtatactacaatttctttatctgctcattgattgatgggcacttgggctggttccatatttttgcaattgcaaattgtgctgctacaagcctgcgtgtgcaaatatatttttcgtataatgacttcttttcctctgggtagatccccaggagtgggattgctggattaactggtagttctttaaggaatctcctccgcttttccatagcggttgtactagttcacattcccaccagtagtgtaaaagtgttcccttttcaccatgtcccagccaacatctattattttttgatttttttattatggccattcttgcaggattaaggtggtatcacattgtgcttttgatttttatttccctgatcattagtgatgttgagcattttttcatatgtttgttggccatttgtatatcttcttttgaggattatctattcatgtctgtagcccactttttgatggaattttttttcttaccaatttgtttgagttccttgtagattctggatattagtccttcatcagatgtagagatttcgaagattttctcccactctgcgggttgtctgtatactctgctgattgtttcttttgctgtgcagaaaattgtagtttaattaaaccccatctatttatctttgtttttgttgcatttgcttttgggttcttggtcatgaagtctttgcctaagccaatgtctataagagtttttccaatgttatcttctagaatttttatggtttcacgtcttagatttaagtctttgatccatcttgagttaatttttttataaggtgagagatgaggatcacctccttggttaggtgtattcctaagaattttattttatttttttgcagctattgtaaaagggtttgagttactgatttgattctcagcttggacgctgttggtgtatagcaaagctactgatttgtgtacattaattttatatcctaaaactttgcttaattcatttatcaattctaggagctttttggagtaatgtgtagggttttctaggtatcatatcatcagcaagcagcaacagtttgacttcttcactgatttggatgtcctttatttctcgtctgattgttctggctcagacttccagtactgtgttgaatagaagtggtgagagtgggcatcgttattttgttccagttctcagggggaatgctttcaacttttccccattcaatataatgttggctgtgaatttgtcatagacagcttttattatgttaaggtatgtcccttctatgccgattttgctgaaggtttcaatcataaagggatgctggattttgtaaaatgcattttctgtgtctattaagatgatcatgtgacttttgttttgaattctgtttatgtggtgtatcacatttattgacttgcgtatgttaaaccatccctgcatctctggtatgaaacccattggatcatggtggattatcttttccatatgctgttggatttggttaactagtattttgttgaggatttttgcatctgttttcatcagggatattgatctgtagtgttctttttctgttatatcctttcctggttttggtattagggtgatactggcttcatagaattatttagggaggattccctctttctctgtcttgtggaataatgtcaataggattggtaccaatttctcattcaatgtctgatagaattcagctgcgaatccatctggtcctggactttttttttttttttgtaggcagtttttaaattaccgtttcaatttcactacttgttattggtcccttcagagtttctaattcttcctggttttaactgggagggttgtacatttccaggtatttatccatctcctctaggttttctagtttatgcacataaagatgtacacagtagccttcaatgatcttttgtatttctgtggtatcagctgtaatatctcccatttcatttctaattgtgcttaatttgatcttctcctttttcttgtttaacctcctcactagtggtctatcaattttattcatcttttcaaagaaccagctttttgttttatttatcttttgtatttttttgtttcaatatcatttagttctgctctgatctttgttacttcttttcttctgctgggtttaggtttggtttgttcttgtttctttagttccttgagatgtgaccatagattgtctatttgtgctctttcagactttttgatgtaggcatttaaggctatgaactttccttttagcactgcttttgctgtatcccagaggttttgataggttgtgtcactgttattgttcagttcagagaatttttaaatttctatcttgatttcattgttgacccaatgatcattcaggagcaagttatttaatttccatggttttgagggtttcttttggagttgatttctaattttatttcactgtgatctgaaagagtacttttataatttcagttttcttaaatttattgagactcattttgtggcctatcatatggtctgtcttggagaatgtaccatgtgctgatgatatattctgtagttgttgggtagaatgttctgtaaatatcttttaagtccatttgttctaaagtatagtttaaatccattttttctttgtttaatttctgtcttgataacctgtctagtgctgtcagtggagtattgaagtcccccaatattactgtgttgccatctatctcatttcttaggtctagtagtaattgttttgtaaatgtagaagctccagtattaggtgtatgtatatttaggactgtgatattttcctgttggacaaggccttttatcattatataatttccctctttgtcttttttaactgctgttgctttaaagtttgttttgtctgatatatgaatagctattcctccttgcttttggtgtccatttgcatggaatatctttttccagcccttccttatatgttgagtctcttgaagacagcaaacacttggttggtgaattcttatccattctgccattctgtatcttttaagtggagcattttggccgtttacattcaacattactattgagatgtgaggtactattctattcattgtgctatttgttgcctgaataccttgccttttttttttcattgggtttttattttataggtactgtgagatttatgttttaaggaggttttattttggtgtattttgaggatttgttccaagatttagagctctttttagcagttcttgtagtgcttggtagtggtgaattctctcagcatttgttagcctgaaaaaagactgtatctttccttcagttatgaaccttagttttgctggatacaaaattcttggctgataattattttgtttaaggagggcaaagatagggccccaatctcctctagcttatagggtttctgctgagaaatctgctgttattctgataggttttccttcatgggttacctgatacttttgcctcatggctcttaagattctttccttcatctagactttagataactttatgactatgtgcctaggtgattatctttttgcaataaatttcccaggtgttctttgagcttcttgtatttggatgtttatgtccctagcaaaactggggaaattttttttcgattagtcccttaaatgtgttttccaaacttttagatttctcttcttccttaggaacaccagttattcctaggtttggtcatttaacataatcccaaacttcttggaggctatgctctttttttaaattattttttctttgttttggttggattgagttaattcaaaagccttgtctttgagctctgaatttctttcttctacctgttcaattctattgctgagattttccagtgtattttgcatttctctaagtatgtccttcatttccagaagttgtgatttttttttaatttatactatctatttcactgaagattgttcccttcatatcttgtatctgtttttataattcactaagttggacttcacctttctctggtacctccttgattacttaataatcaactttctgaattctttttctggcaattcagagttttcttcttggtttggatccattgatgttgagctagtgtgatctttttgtgttgttaaagaaccttgttttgccatattaccagaattgtttttctggttacttctcttttgggtagactatgttagagagaagatctggggctcaagggctgctattcagattcctccatcccatggagtgctcccttattgtggtgctctcccccttcccctaggtatgtggtttcctcagagccaaactgcaatgatttttatttttcttctggatgtagccacccagtggagctaccaggctccagaagtgtctgcgcagagtcctgtgatgtgaactgtcttcaggtttctcagttgtggataccagctcctgctctggtgtaggtagcaggggagtgaagtggactctgtgagggtacttggttgtatttttattaaatgttctggttttctgttggttggcctctagccaggaggtgatgctttcaagaccacatcacctccggttgtgtgggaaggatacaaacttgccctaggctcaggcattagatgagccatagagctcccaaagaactatgtgcattgtctttggctaccagggcaggtagagaaagaccatcaggtgggggtagggttaggtgcgtctgagctcagactctccttggtcagtgtttgctgtggctgctgtagggatgggggtgtggttctcaggccaatggagttacgttcccaggggaattatggctgcctctgctgcatgtaggtcaccaagaaagtgagagaaagctggcacttacagacctcaccccgctcccacacagcccaaaaggccagtctcacttccatcatgccctgccaacagcatcaagtttatttccagatggcatgtgagcagggctgagaacttaccctaggctactagcctcccaactgagaaagcaagcacagctttcaggtttcatgcctccccacatgcctcagcttctgtgctgtgtctgcactcccgatttgctccctctcccaggttctgtccagaaactttgcattcaatcaaaattgttcagctggaagtttccttctcttgccatttttgttttgtttttgtttttgttttgttttgttttgttttgtttttttgagatggagtctcgctctgttgcccaggctggagttcagtggtggcgatcttggctcactgcaacctccacctcccaggctcaagcagttctcctgccttagcctcctgagtagctgggactacaggcgagtgccaccatgcctggctaatttttttgtatttttagtaaggacagggtttccccatgttggccaggctagtcttgaacttcttacctcaggttgtatgcctgcctcagcctcccaaagtgctgggattacaggtgtgagccacaacacctggcctctcctgcggtcttttcccagttcccctggcagccctttccaaaaacccgtgtgagacaaagtcagaaatggcttccctggggaccaagaatgcgcatagggctcttcttgctgcgtcttctactcctgtatttcgctcagctctctaaatttgtctcagctccaggtaagtccaaatccttcccctgtgatctggaccttcaggttccccagtgggggtatgtatttggaggcagatgatcccccttttacacattcacactttgggcattcacagtttttccactgtatcccagggcagctatctgcttctttcaaagggtctgtgaattatctcagctttcctggtatgttcctatggtagttcttggagtaaaagttcacaatgtgagcctccacacactgctctgtccatccaagtgggagctgcaagttagtcctgccccctattcaccattttttccctatggagaaattattagttaatgaagttgcaggatgtaacattgaagtacaaaataaaatagtatttaccagtaacaactgtgatggttcattttatttgtcaacttggctaggctgtggtgcccaattatgtggtcaaacaccctgaggatgttgctgtggaggggtgttttatatgtgattaacaggcaaataagtagactttgagtaaagaaaattaccctccataatgtggtaggcctcattcaatcagttgaaggccttaagagcaaggacagttttcatgaagaaaaagaaattatctccaggaattcaaggtagaaaccctaactgagttttcagcttgctgtcctgcggaattcagtctcaagactgaaacatcatctcttaccaggatttcccatctgtggacctgtcccacagatttcag
